United States Patent Application Publication US 2008/0050393 A1 - sequence listing, part 47

SEQ ID NO: 150977 - DNA, 1780 bp, Homo sapiens
aataaggcacagaactgggctgaggctgtggctgcagccctttccctctacgttgtccccatagaggctagacattttaaggtcagtggagcactaccaaatcaaaagagcctcttaaattgtcttctactaaaaaattttaatagtagcatattaatatttttaaatgttttagtatcatctcatttcaaaaactatatctattgttcttatatataagaaaaacaatgattttattttaagttgtttattttaagataatttacaaatatcttgctgtcttcagtaattcaaataatggaggaacggtttcttcggacaaaggcagcagtaagctaaaaacaaaatcaactggcctgaaattttcccttctttacctcttgtctgagggatgggaacttgattttcattaaatccagaggctgcagcaccagagataaatttcaatcaactcttttgtgatgacagcttgggcggggtacggttgaaatgtccaaatgtccaaattgtccaaatccatcctccagaaagcaatccttgcctggccattgtcccatgggctgtcaacccctggcactcctgcctccactagtgggtgggacttccttcagaggagtaggtaggatggatgttgggcccaggattgtattcttggggtaatttttgccagcacggtcaggcatcaatatcggtcataggatactccatggctggtcagcaccttgcaacgggtattaagggggaaaagatgggggcttttccttcctgtccttaataggagatgaacaagaccctgaaatttatttaaagatgaatggagcccttcatcaaaattcatatcccagaatttagtaattccaagggcaatgactgacgcatctcccaaaaagtggggggctttcttccccacttcttttgaatgcccacccagaaactgggtcagaatggagtccctaataaaagtatgccctctggatttttggtcaacccaattcccaaacaagcattaacttcttttccccagctgctggttaggtgtaggcaaccctcgctttttcatcttgtttagccaatggaggaatgaaatagcacccacacagtccctcgatctgaggacacacaattaaggaaaggtgtttttcttttcttggttcttcagggcccctggatatcagctttttccatacagagctaaagatcccaatccataatattgaggcgggtttcagctctctctcagctcggggcatattttgctgccgctaccattttcatagacttggtaattttctggatgtttttgatggactttagtctcctggtgatatctttcaaagttgccatatttcgaacttgaatccattgcggctgcaaggtccaggccgacagcccagcgacacccgcgcgagagaaagctgaaaccagctcgaatatatggattgggatctttagctctgtatgaaaaagctgatatcaaggggcctgaagacaagaagaaacacctccttattggtgtgtcctcagatcgaggactgtgtggtgctattcattcctccattgctaaacagatgaaaagcgaggttgctacactaacagcagctgggaaagaagttatgcttgttggaattggtgacaaaatcagaggcatactttataggactcattctgaccagtttctggtggcattcaaagaagtgggaagaaagccccccacttttggagatgcgtcaagtcattgcccttgaattactaaattctggatatgaatttgatgaaggct

SEQ ID NO: 150978 - DNA, 449 bp, Homo sapiens
  misc_feature (1)...(449): n = a,t,c or g
ctggtgaggcaccgcnnttaaggttcagggcccccacgcgtccgcccacgcgtccggtgagggctcactgacaattattccggtaacccgatcaccgctggccaccatgaaccacattgtgcaaaccttctctcctgtcaacagcggccagcctcccaactacgagatgctcaaggaggagcaggaaggggctatgctgggggcgccccacaaccctgctcccccgatgtccaccgtgatccacatccgcagcgagacctccgtgcctgaccatgtcgtctggtccctgttcaacaccctcttcatgaacaccggctgcctgggcttgataacattcgtctactccgtgaaggcgtagggacaggaagatgggccggcgaacgcgacctggtgcccaaggctagggcctcccccggccaggggcctggaacattcggggcccctgattc

SEQ ID NO: 150979 - DNA, 627 bp, Homo sapiens
  misc_feature (1)...(627): n = a,t,c or g
cgacgcgtgggccatgaatcacactgtccaaaccttcttctctcctgtcaacagtggccagccccccaactatgagatgcatcaaggaagaacaccgagttggctgtgctggggccgccccaacaaccttgttccccccaacgtcaacgttgatccacaatcggcagcgagacctcccgtgcccgacccatgtcgtctggtccctgttcaacacccctcttcatgaaccccctgctgcctgggctttcaataagaattcgcctactccgtgagagtctatggacaggaagatggttggcgacgtgaccggggccacaggcctatgcctccaccgccaagtgcctgaacatctggggccctgattctggggcatcctcatgaccattctgctcatcgtcatcccagtgctgatcttccaggcctatggatagatcaggaggcatcactggaggcccaggagctttggccatgaancctgtatcccacgtactccaactttccattcctcggcctgccccccggagcccgaagtcctgtatcagcccttatatcctcacacgcttttctacaatggcattcaataaagtgcacgtgtttctggtaaaaaaaaaaaaaaaaaaaagattt

SEQ ID NO: 150980 - DNA, 982 bp, Homo sapiens
  misc_feature (1)...(982): n = a,t,c or g
gagactcccaacacaggggaagtctccaggacctccacaccattaacaagatgagccttgtgctcccttgggctctagagaggaagcccctctgagccctcagcccctctttcctccctctcctaaagtaatttgatcctcaggaatttgttctgccctcatctggccctggccagctctgcatttgacaaatgccaggaagaggaaactgttgagaaaacggaactactggcggaaaggcgagggctcactgagaaccatcccggtaacccgatcaccgctggtcaccatgaaccacattgtgcaaaccttctctcctgtcaacagcggcccaggcttcccaactacgagatgctcaaggaggagcaggaagtggctatgctgggggcgccccaaaaaccgtgcttacccgaatgtccacctgtgatccactatccgcagcgagacctccgtggcctgaccatgttcgtctggtccttgttcaacacccttcttcatgaacacctgcttngcctgggcttcatagcattcgctctactccagtgaagtctcagggaccaggaagatggttggagaggtgaccagggcccaaggcctattgcctccaccgccaaagtgcctgaacatctgggcccgtgattttggggcatcttcatgaaccaattcttgctcatcaatcatccccccccaagtgttgggtcgtccaggcccagcgatagatcaggaaggcatcatttgaggcccagggagctctgccccgttgaacctgtatcccaagtcaaaaactctatcttccattcactcgccctgcccccagaggccaggaagttctgcccttgaactgtattccacttactccaccttccattcctcgccctgtccccacagccgagtcctgcatcagccctttatcctcacacgcttttctacaatggcattcaataaagggtatatgtttctggtaaaaaaaaaaaaaaaaaaa

SEQ ID NO: 150981 - DNA, 531 bp, Homo sapiens
atgacaacagataatctcagtgataccttgaagaagctgaagataacagctgttgacaagactgaggatagtttagaaggatgcttggattgtctgcttcaagccctggctcaaaatattctctttacgagtgattttcttatttctgagttcaaaatgggtcgtaaagcagcggagacaactagcaacatcaacaatgcacttggcccaggaactgctaatgaacatacagtgcagtggtggctcaagaagttttgcaaaggagacgagagcctagatgaggaggattgtgacgtgcaacaagaagtggattttatatggcaactgaaaagtggattttatacaactggagatgaccagttcagtgattggaccaagaagctccaaagcacttcccaaagccaaacttgcaccaaaaaaaggtcatggtcactgtctggtggtctgctgctgatccactacagctttctgaatcccggtgaaaccattaaatctgagaagtatgctcagcaaattgatgagatgcactga

SEQ ID NO: 150982 - DNA, 1684 bp, Homo sapiens
atggataatctcagtgataccttgaagaagctgaagataacagctgttgacaagactgaggatagtttagaaggatgcttggattgtctgcttcaagccctggctcaaaataatacggaaacaagtgaaaaaatccaagcaagtggaatacttcagctgtttgcaagtctgttgactccacagtcttcctgcaaagccaaagtagctaacatcatagcagaagtagccaaaaatgagtttatgcgaattccatgtgtggatgctggattgatttcaccactggtgcagctgctaaatagcaaagaccaggaagtgctgcttcaaacgggcagggctctaggaaacatatgttacgatagccattcgcttcaagctcagcttatcaatatgggtgttattcctaccttagtgaaattactgggcatccactgccaaaatgcagctcttacagaaatgtgtcttgttgcatttggtaatttagcagaacttgagtcaagtaaagaacagtttgccagtacaaacattgctgaagagctagtaaaactcttcaagaaacaaatcgaacatgataagagagaaatgatttttgaagttcttgctccattggcagaaaatgatgctattaaactacagctggttgaagcaggcctagtagagtgtctactagagattgttcagcaaaaagtggatagtgacaaaggaaggtggtattactgagctcaaaactggttcagatctcatggttgtattacttcttggagatgaatccatgcagaagttatttgaaggaggaaaaggtagtgtatttcaaagggtactctcttggatcccatcaaataaccaccagctacagcttgctggagcattggcaattgcaaattttgccagaaatgatgcaaattgtattccatatggtagacaatgggattgtagaaaaacttatggatctactgggcagacatgtagaagatggaaatgtaacagtacagcatgcagctctaagtgccctcagaaacctggccattccagttataaataaagcaaagatgttatcagctggggtcacagaggcagttttgaaatttcttaaatctgaaatgcctcctgttcagttcaaacttctgggaacattaagaatgttaatagatgcacaagcagaagctgctgaaccaattggggaaagaatgttaaagttagttggagcgtttggtgggatggtgtgaagccaaagatcatgctggtgtgatggggggagcaaaacagactgctgtctgcccttatacgacacagtaaatcaaaagatgtaattaaaaccattgtgcagagtggtggcatcaagcatctagttaccatggcaactagtgaacatgtaataatgcagaatgaagctcttgttgctttggcattaatagcagctttagaattgggcactgctgagaaagatctagaaagtgctaaacttgtacagattttacatagactgctagcagatgagagaagtgctcctgaaatcaaatataattccatggtcctgatatgtgctcttatgggatctgaatgtctacacaaggaagtacaggatttggcttttctagatgtcgtatccaaacttcgcagtcatgagaacaaaagtgttcgccagcaggcctctctcacagagcagagacttactgtggaaagctga

SEQ ID NO: 150983 - DNA, 910 bp, Homo sapiens
gcggccgccccccgcgggtccctccctggctgcgggagagacggaggttagagggaggacacagagccgcgccgcccgcaccatatgaccttcgcctcgccccgccggttcctcaccctcggggagcaacatggcagataattctcagtgataccttgaagaagctgaagataacagctgttgacaagactgaggatagttttagaaggatgcttggatttgtctgcttcaagcccctggctcaaaataatacggcaaacaagtgcaaaaaatccaagcaagtggcaatacttcagctgtttgcaagtctgttgactccacagtcttcctgcaaagccaaagtagctaacatcatagcagaagtagccaaaaaatgagtttatgcgaattcccatgtgtggatgctggattgatttcaccactggtgcagctgctaaatagcaaagaccagaaagtgctgcttcaaacgggcagggctctaggaaacatatgttacgatagccatgagggcagaagtgcagttgaccaagcagggtggtgcacagattgtaattgaccatttaaggtcactgtgcagtataacagatcccgcccaatgagaagctcttgactgtcttttgtggcatgctgatgaactatagcaatgagaatgattcgcttcaagctcagcttatcaatatgggtgttattcctaccttagtgaaattactgggcatgcgactgccaaaatgcagctcttacagaaatgtgtcttgttgcatttggtaatttagcagaacttgatgctattaaactacagctggttgaagcaggcctagtagagtgtctactagagattgttcagcaaaaagtggatagtgacaaagaagatgatattactgagctcaaaactggttcagatctcatggtt

SEQ ID NO: 150984 - DNA, 1514 bp, Homo sapiens
caaagttcaccctctgtgggtgtcccatggaacaccccttattttcttgtctttagtaaagtccctactatataattcaaccaaactgtaatggattcctttctaatcaagacccttgattccgtacagaaaatctcttatgtatcaccaattaataacctgtttggggacaaaacttccttactgatataagcatgggagaactactcatatttccgagtgtgctggtgaatgatataatgagcattactttctaatgagattctctcccttagcacaccatgtacctgtcagtcatacaaccagtatttggtgagatgctgttatacactagtgtttactttcagcattatcctgtttcctatgcagaaagtgctcagattgttccaacaataggtctccttttgtacacaggcacaatactaaacttcagcatgttaataaaggtttgacttagaatttttcttttgccaattagcaccaagaaaagaggtgaaaaggaggaagacacattccatagtaagaattctacaatgtacagatttgaatggaacgtaactcagaacaaagccaaaccattcaattactttacctactgttaggaagctgttcctctaacatatttacactgggaaatcaggctcccattatactaacaggcaacaataaacaatctactttaatagtcaaagtctcttgttctaatggaagggggttcaatgaagttgacaattaactgacaacaccatggaaaacattccaagcctttatggtgggaggaagggatatttgtactgtgtacgcatgagcaactttctccagatttagtgctacagtgaaaaccgaaactatgtgaaaacaagttaaatttacaataagaatgattatctgcaaccctatttgttaacaatcaccactagctcttagaagagaaccaatagatttttatagtcctatagattttgcccaacagaaatagcacaaggagatgtaaaagttacagagtacaaatgtatatataactaaacctacttcagtactaaacctttttttttttttgagacagagtctcgctctgttgtccaggctggagtgcagtggcatgatctcagctcactgcaacctcccatctccagggttcaagcaattctcctgcctcagcctcccaaatggctgggcctacaggagcgtgccaccatgcccagctaatttttgtgttttttagtagagacagggtttcaccatgttggccaggctggtcttgaactcctgacctcaggtgatttgcccgccttggcctctgaaaagtgctgggattacaggcgtgagcacaccgcgcgcggcccagttactaaaccttcttactttcaagttttgttttttagactacaccccatctttataaatcacttgaatacatgaaaagacttcatgtttaacatctttaattcaaatgtaaaagttcaatacaagccatttatagggcttgagatttgttggtcttttaaaaacaa

SEQ ID NO: 150985 - DNA, 513 bp, Homo sapiens
gactctcccgtttcgagccacgcgcccggtccagggagctgccccggcgtctctctggtttcctaatctgggcaaagccgcgggagagaacctttaccttggctgcactaagttctcggtgccactccctggcagggcgggaccttgtttaggccctgtgatcgcgcggttcgtagtagcgcatggcgcagaggggaccttgacccgcctagggcgggaagagtttggcccgccgggtcccaaagggcagaatggacgggctcctaaatcccagggaatcctctaaattcattgcagaaaacagtcgggatgtgtttattgacagcggaggcgcacggagggtggcagagctgctgctggccaaggcggcggggccagagctgcgcgtggaggggtggaaagcccttcatgagctgaaccccagggcggccgacgaggccgcggtcaactgggtgttcgtgacagacacgctcaacttcttccttttggtcggagcaggacgagcacaagtgg

SEQ ID NO: 150986 - DNA, 827 bp, Homo sapiens
atcgagaccctagtccacgtggtggaattcgggaaataaactggtgatatggcagctgggccatcttgaatagtgagaaccagtaagaatattgggtattgcctgaagagcatctgtaaaaacatatcagaacaaatgaaagaggaaagaatgaaggatttatatgtgtgcatagagtgaatatatgtgtgcatagagtgaaatattcaacttatacttatttctaataaaatctgaaaattatttttcataaatattcaaattccctttaaacagcttaaaatacagatttagtgactcagtacttcaaaccttgaatagaaacaaatatgattataaaatatttccaaacttatgttacatctaatctgaaacatattaatattataagcttaattcatgtcatcatttctttattttttattatatttcctgggaggtataaggatatttatttttataatttccaagcactgagtaataatttatttcagaaagtttcagaaggttacagtaaactttaccaaacttgaagaagaatgactcagatcagtaagaagagtctgagttactcactaattgatttttattttatttatttattttttttgagacagggtctcactctgttatccaggctggaatgcggtgacacaatcatggctcgctgcagcctcaacttcccaggctcaagcgaccctcccgcctcagcctcctgggtagctgggactgcaggtgtgctctaccacacctggctaagtttcgcgtttttccgtagagatggggtttcgcgagttgcccgggctggtctccaactcttggcctgg

SEQ ID NO: 150987 - DNA, 699 bp, Homo sapiens
ttttctgtatagtgatttattagggcccttgggagagcactgttttgctgttttctctaactagaacaatttatactctatttatattttattatgcaaagaatgtagctggcatgaaccttaacccaaaaatctgagcagacaagaaaagtcacattaaaatttttctcttttgtagttgtagttctgactgagccctcattctgcctgatttgatgggttgagggcaggaaattcaacctcacacatcataggggctgtctcctcttctctagggtttgcacaaacattggggggaaggaggcgtggcttccgtgctgctaagacacaggaaaaggcttttagctttcagtagattctatctacctaatgcaggtcattgtccaggcctcagtgtttgtctgaagatggaaggcatgtgctattcacatcctgaattaagtagaagagggtgggagtgaggcggggtgggccttaaggatcaaatgtatcaatggtgtgagcccaaaactctgttgcaacttcttcactttccccagatcttcaatggcagctttgttaaactcaacaaggcttcagttaacacgctgaggattgtggaaccatatatcacatggagtacctgaacttcattcttcccagtaggagaacccagggcctgttccacgcccacagactttggtcaggcaaagcggccgc

SEQ ID NO: 150988 - DNA, 441 bp, Homo sapiens
gcggtggaattcgaaggaagcttctaacttttcttctggttgccggatgctggacaccggaagcgagccctataattatggcgacctccgcgacgtcgccgcacgcgcctggttttccagctgagggtagatgcggttactatgtggaaaagaagaaacggttctgcaggatggtggtggccgcagggaaaagattttgtggtgaacacgctggagccatggaggtgtggtatcgccctactctctcaagagtcggaaataagtatcctggtcctgtcggtgctggaacccggcccctcccctctttgacagctttctgcttgtgtcccctggattctccagctttcactttaataaacccagttttgccctccttgcggagcgattatgagttctagtgatgagaaattttttatttttctaagtaaagcgccagcagtg

SEQ ID NO: 150989 - DNA, 960 bp, Homo sapiens
attatggcgacctccgcgacgtcgccgcacgcgcctggttttccagctgagggtagatgcggttactatgtggaaaagaagaaacggttctgcaggatggtggtggccgcagggaaaagattttgtggtgaacacgctggagccatggaggaagaagatgctcggaaaagaatcctgtgtcctttagatccaaaacacacagtatatgaagatcaactagcaaagcatttgaaaaaatgtaactcaagagagaaaccaaaacctgatttctatattcaagatattaatgcaggcttaagaggtgaaacagaaatacctgaacaattagcttgaattctacacttacagatcatattatgtcccatccagcattacacgatgcacttagtgaccctataaatggcgattctgcaaccaagcacctgaaacagcaggcttctatttttaggtaacattgaaaatttaaagttacttggtccaagaagatgctttgttgagtttggagcgggaaagggaaaattatctcattgggttgatattgccttaaaagatgctgaaaaagttcacttcatcctagtggaaaaggtgaccacaagattcaaggtggatggaaaacacagaaagaaaaattcagtgtttgaaagacttcaaattgatattcaacacttgtgtttgaacaagattcctgtgctaagagaagaaaaactacctgtggtaggaattggaaagcatctgtgtggtatggcaacagatcttgcattacgatgtttggttgaaacctatgctgccagttttgaggaaaggaatgaagaacctttagccaaacgcataaagaatgataaaacagaaaaagaaatttacactttggccaaggaaggaaatgaaaaaaatgtcccagagaagtggaaccctgtggctggcattgttattgcactcttgtgtcaccacaggtgtgattgg

SEQ ID NO: 150990 - DNA, 349 bp, Homo sapiens
ttgtgttattgtggctctactgggaactctttcttaagtgtggttagctattgtaccgctttttacactgaaactatacttgcgcagcggcgcctgtacatactgtctaaagcttggactctgactcaggatgtaaggcctatgtgggagatgaatatcctgcctggaccttgtagatctgcatgcacagccttcccttttgaaggaacatgaagaggaaaaaatgttcacacttaaaggaaatcgtttgccggcagctgatgtgaagaatataattttttttgtcagacccaggctagagttgatggatataatcgctgaaaacgtgctcagtgaagatagacgaggc

SEQ ID NO: 150991 - DNA, 747 bp, Homo sapiens
gtcagggtgtgtctgtgctcttcctccagggcagggttcaaagtccgagtgtccccctctcccattccccctccactccctccccatctctcccactgatcggtgtacagagaaattatttatatatatgtataaatgtctatttagtaacggtttccctctccccttgccccgcttccccctccacagccacagcccccgccccctccaccttgtacataatgtataggaaaagtctatgtatggctggggggggtggggtggcttcagaagagctgggggacccccctcttttccccccatccccctggcaggccaagatcgtttgctaaaggccattcccctccgcagggcattttgggcgtcgggttgggaggggaaaaccgcattcttgtaattatttttaatctaatttattgtacatacctggggcaggggcttggggaggtggaggggggagaagggtcccctctctctgcccctcccactccttttctacggcgatttgtctgtgtctggcccccacccactgcccatcccccattgttgtctggatgtggttctatttttttatcggtctcctttcccctcctccccgttctcgcccccgccccaccccctgctcccactaccctttgtctcttgctctttcttgggcttctgtacaactcaacttgtatacactgtgtacacacaaccagccaaacgaaaacccaacggcaaacactttaaaaaaaaaaaaaaaaa

SEQ ID NO: 150992 - DNA, 361 bp, Homo sapiens
  misc_feature (1)...(361): n = a,t,c or g
ccccagttaattcacctgnnnnnnnnnnnnnnnnnnnnnnnnnnnnnnnnnnnnnnnnnnnnnnnnnnnnnnnnnnnnnnnnnnnnnnnnnnnnnnnnnnnnnnnnnnnnnnnnnnnnnnnnnnnnnnnnnnnnnnnnnnnnnnnnnnnnnnnnnnnnnnnnnnnnnnnnnnnnnnnnnnnnnnnnnnnnnnnnnnnnnnnnnnnnnnnnnnnnnnnnnnnnnnnnnnnnnaaaaggatgcaaataaatagccagatggaaagataacacaaggcaagatctggaggagcttccgttcctgtggagttggggtgcaccactcgcccagcgcgtggatgagttctccttcactgtcctgtca

SEQ ID NO: 150993 - DNA, 848 bp, Homo sapiens
acgaggcgcatggaggctgacaggacagtgaaggagaactcatccacgcgctgggcgagtggtgcaccccaactccacaggaacggaagctcctccagatcttgccttgtgttatctttccatctggctatttatttgcatcctttttaaatgtaagtaagtgcttccatgagttccgtgagctcctccagcaaattaatcaacccccgaagagggtggggtccatggtaaaccccccaacttgaaagcccagctggtccagaacattcctggaagcccccagactcgtgacctggtgggaaaggagggaagccagttcctgtggaacctgaattccctcaaccctgtgggttttctggaggctattttccagggtaggatgggtgtttcacagtttgaatttaacttgggtgggacacccggctgtgtcccacttgcagaactaattgcttaattgggtgttttggggaagaaacccttacatatttttttcacagaaagtcttctgtattattatggtgtaagagaacaggaaaaatgcatgttgactgttttttccacactcccagtccacaaaagttttctccacttatgaacaaataatgtgtgtgtgtgtttttttgtttttttgtttttttgtttttcctgagacagggtctcactctgtcatccaggctggggtgcagtggtgtgatcatggctcactgcagcttcaatctcccaggtccaagtgatccttctacctcagcctcccaagtagctgggaccacaggtgtgtgccaccatgcccagttaatttttaaattttttgtagagcctgggcaacataccgagatcccctctttagg

SEQ ID NO: 150994 - DNA, 375 bp, Homo sapiens
cgagtatgcggattttttccgccaggtcgagtcttcaccgctgaatccggcgcaggcccgggcagtcgttaatggcgagcattctctgttagtgctggcaggtgcaggaagcggaaaaacgtcggtgctggtggcccgtgcaggctggttgctggcgcgtggtgaagcgtcccctgagcaaattttattgctggcgtttggtcgcaaagccggtttcatgcgctggcgctgcatattattcagcagggcagcaaaaaagttccgatagtcagcaaactggaaaatgataccgctgcccgtcatgaactctttattgctgagtggcgcaagcaatgcagcgaaaagaaagcgcaggcgaagggctggcggcaatgg

SEQ ID NO: 150995 - DNA, 2400 bp, Homo sapiens; identical to SEQ ID NO: 132396

SEQ ID NO: 150996 - DNA, 1526 bp, Homo sapiens; identical to SEQ ID NO: 122711

SEQ ID NO: 150997 - DNA, 1005 bp, Homo sapiens
atgctggtggaacaaaatcgttttagtcgccagctgtattacgcgctgcatgcatttgaaattaccatcccgcctctgcgtatgcggcgtggcagcattccggcgctggtgaataacaaattacgcagtcttgaaaaacgcttctctacgcggctgaaaattgatgacggcaacgattttgaactttacagcgtcatcgagaatcttgctctgagtagtgataacgggcgcattcgcgtcagtgatttgccggaacatctgtttaccgagcaggcgacagatgatgtcagcgccacccgcctttccaccagtctgtcatttgcggaagttgaaaaagaggcaattattaacgcagcccaggtcacaggcgcgtttccgtggtggctgggtgatgtaaaactgacgattccgctaacgctggggatggtggcagcggcgctgaccgatctcgatgaccgactggcgggacgtttgcgtaacctcatcattacgctgttctgcttttttatcgcctcggcctcagtagaattgctgtttccctggccctggctatttgcgattggcttaacgctctctaccagcggcttcattttgctcggcggtctgggtcaacgctatgcaacaattgccttcggtgcattgctgatcgccatttacactatgttgggaacatcactgtatgagcactggtatcagcagccgatgtatctgctggccggtgccgtctggtacaacgtcctgacacttattggtcatctgctgttcccggtccgcccgctgcaggacaacctggcgcgttgctatgaacaactggcgcgttatcttgagctcaagtcgcgcatgtttgatcctgatattgaagatcaaagccaggcaccgctgtacgatttggctctcgccaacggtctgctgatggcgacattgaatcagacgaaactctcgctgctgacccgcttacgtggcgatcgtggtcaacggggaacgcgtcgcacggggatcctctag

SEQ ID NO: 150998 - DNA, 2559 bp, Homo sapiens; identical to SEQ ID NO: 135687

SEQ ID NO: 150999 - DNA, 1632 bp, Homo sapiens
ttattggtactcacgcgttgcatcaaactccataacctggctgatgatgtgcggggtaatacgttgttgttttttcagctcacggttgagatcggcttcgctgaacagcccgttactctgtgcctgcaagcggctgaaatcgtattgcactactggcatatccagtcgttctggcggcgtcagatagccgtgtttaatcatataacgcagcggcagctcataaatgcagtcacggaaaagggctttctcatcgccgcgtaccatgccgtgataatgaaactggtagatccagcctttgcccaatcgaaaaggcgtggcagtcagccccagcaggcgtaagtggggattcacttttgtcaggtgagtgaggatttgctgatactggctctcttcatcgtcaccaatacggtgacattcatcgacaatcaacagcgaaaattcaccctgaaaggcatcaagattacgggcgacagactgcacgctgccaaataccactttaccgtggctctctttgcgctttagcccggcggcaaaaatatcggcttccagccccagcgcctgatactttgcatggttttgcgccaccagttctttaacgtgtgccagcaccagcacgcgaccacgagccagccgtgccagttccgctatcaccaggcttttacggtgaaaaggtaaactctcattacgatcaatcatcgggctgtcggtaatctcttccggcagctcgctgtatcctgcgctcgccatcaatacgacgtgctctcctatcgggtattttgccgtcaggctgacatagggcacccaggcatcctgcgcggaataacttgccagaccgctacgacgggactcactctctgaaatgccatagtaattttcactgaaattctcgtcataatagagaacgcccagcgcaggtgtcagcgacagacgacctatctgcattttgtggaataccgatagctcccccacccagccgttgctgttatccagaacgtccgcagctgcagaggctttcacggttccccaacgctcgtggtgataccaggcaacccccgccatagccgtactatcacgcttatcaagctgttgcatggcataatcgtcattatcggtagggtcaaattccagcggcatccaggatgcggtcaggctaagttcatttttttcactttgcgacagaataaacctaacgtggtctctggctccaccggcaggccgaaaggggtaatggtcgggcagacggctatcgtcaaccgcctgctttggatgcaaaatcattatccgcttacaggcgaagatgtcgttgcccaaaaaacgccgtgcagttttgatgtctcggtgtgggagtttttctggccgtttatcgcaggggcaaaactggtgatggctgaaccggaagcgcaccgcgacccgctcgctatgcagcaattctttgccgaatatggcgtaacgaccacgcactttgtgccgtcgatgctggcggcatttgttgcctcgctgacgccgcaaaccgctcgccagagttgcgcgacgttgaaacaggttttcggctgatttatgccgcgaatggcaacagttaactggcgcgccgttgcataatgggctctgcgtattcttgatgcgatgatgcat

SEQ ID NO: 151000 - DNA, 1405 bp, Homo sapiens
atgccctgtagagtcatgaaggacgaacaaataaacaaaagtgcctctgcctcacagagatgttatcctacacctgcaaaatctcaaggagcattctctgatgatgaaataaaatcaaatccacaaaaagtgccttcagctttacaaaacaaagctgggccacagtttatgaaaagccagtatccaggtatttcattaaaccaagttcttagcttaggatggcattttggagacattttgctgtccattgtaatgctcattcattacaaacgtgccctcacagtccagttttctgccagaaccagccgcacaccacctagctacaaacataaggggttgtcggaacaaagacattcctatattgacgatcctcaaaggggcaagggacggaaatgggtgccaccacacaatcaatggcggctgcgggtcaattttcgcctgcctcgcctggagaatgagcgggaagctaaccattttgatgccgcgccgcgccttgaattgttggatggcgatgcgacgccgattccggtaaagctggatattctcgccattacctcaacggcaaaaacgattgattatgaggtcgaggttgaacgctataacaaatccgcgaaacgcgcttcactaccgcaatttgccacgatgatggcagatgacagtacgctgctttcgggtgtttccgagctggatgctattccaccgcagtctcaggtgctcacagaacaacggctgaactggtgcgtctggcgaacggattggaacatttcggtcggcacccacgtgggaccggggaaattattaattcaatcggcgcattttaaaaataaatggcttgacgcgtgagcaaacctctggcgtgcagcaacaaatccgccaggctttgtcggcgttgccgttgccggttaaccgactggaagaattcgataactgccgtgaggcgtggcgtaaatgtcaggcctggttgaaagatattgaaagcgctcggttgcagcataaccaggcgtataccgaagccatgcttaccgagtatgcggattttttccgccaggtcgagtcttcaccgctgaatccggcgcaggcccgggcagtcgttaatggcgagcattctctgttagtgctggcaggtgcaggaagcggaaaaacgtcggtgctggtggcccgtgcaggctggttgctggcgcgtggtgaagcgtcccctgagcaaattttattgctggcgtttggtcgcaaagccgctgaagagatggacgagcggattcgcgaacggctacataccgaagacattaccgcacgcacgtttcatgcgctggcgctgcatattattcagcagggcagcaaaaaagttccgatagtcagcaaactggaaaatgataccgcttgccgtcatgaactctttattgcttga

SEQ ID NO: 151001 - DNA, 1643 bp, Homo sapiens
cgtcggcaaaggagccatggattctagcaactaacttacctgttgaaattcgaacacccaaacaacttgttaatatctattcgaagcgaatgcagattgaagaaaccttccgagacttgaaaagtcctgcctacggactaggcctacgccatagccgaacgagcagctcagagcgttttgatatcatgctgctaatcgccctgatgcttcaactaacatgttggcttgcgggcgttcatgctcagaaacaaggttgggacaagcacttccaggctaacacagtcagaaatcgaaacattttacccttactggctttccaccttggacccttccgatcattggccgacattccgcggaatcgggtttacgaggactttgacccgcactgcaggccgatgataattacaagtctttcaaacttaccctggcacagcatcaacagttgtcaacagcccttgggtgttgccatcacatgcacgtgcagcctcaacgtccacgattcacatttgcggtatgctgcgtccacatgcacctgcgtcttacccatgtctggagcacaaccgttgtccactcgagctgtagcccaactttactccccagacgcagatgccaagcgggctgctgtgccggcacgcagtaccgacaagccagagaaccacgcgcatccacattcgcacttcactcatcaatattacaagacacaatatcaccacctcaagaaaacgtttccgtggtggctgggtgatgtaaaactgacgattccgctaacgctggggatggtggcagcggcgctgaccgatctcgatgaccgactggcgggacgtttgcgtaacctcatcattacgctgttctgcttttttatcgcctcggcctcagtagaattgctgtttccctggccctggctatttgcgattggcttaacgctctctaccagcggcttcattttgctcggcgctctggttcaacgctatgcaaccattgccttcggtgcattgctgatcgccatttacactatgttgggaacatcactgtatgagcactggtatcagcagccgatgtatctgctggccggtgccgtctggtacaacgtcctgacacttattggtcatctgctgttcccggtccgcccgctgcaggacaacctggcgcgttgctatgaacaactggcgcgttatcttgagctcaagtcgcgcatgtttgatcctgatattgaagatcaaagccaggcaccgctgtacgatttggctctcgccaacggtctgctgatggcgacattgaatcagacgaaactctcgctgctgacccgcttacgtggcgatcgtggtcaacggggaacgcgtcgcacgctgcattattactttgtcgcacaggatattcacgagcgtgccagctcttctcatattcagtatcaaacattgcgtgaacattttcgccacagcgacgtgctgttccgttttcagcggctgatgtcgatgcagggccaggcgtgccagcaactgtcacgctgtattttgttgcgtcagccttatcaacatgactccgcattcttgagcgcgcttttacgcatattgatgctgcgctggagcggatgcgcgataacggcgcacccgccgatttactcaaaacactgggataatgcttga

SEQ ID NO: 151002 - DNA, 5272 bp, Homo sapiens
atgtccattttgctgacctcaatcgcgagacagtcgagagataagcgtacacgccttggacacaaacaacggattctggccggcctcgggtctaaccatccgatccgtcgtaatctgcaaggtctgcgtcgtttcgccctggtagaccggcagctcgtcgtccaaaatgtagtcacccgctggtgccggatggtgtaccagagtgctgcaaatgtgttcatccagcatcgaccaatttcccacgacgaacgagtacagcagcgcggcacagccatcacaatgatggttcaacaagcacaatgggccgaacgtggcaaatctgggctatctggtgtcgcaatcgggcctgccgttggataccagcgcattgcaggcgcagcttcgtgaaacattgccaccacatatggtaccggaggttctgctgcaacttccacagttaccacttaacgccaacggcaagctggatcgcaaagccttaccgttgcctgaactgaaggcacaagcgccagggcgtgcgccgaaagcgggcagtgaaacgattatcgccgcggcattctcgtcgttgctggggtgtgacgtgcaggatgccgatgctgatttcttcgcgcttggcggtcattcgctactggcaatgaaactggcagcgcagttaagtcggcaggttgcccgccaggtgacgccggggcaagtgatggtcgcgtcaactgtcgccaaactggcaacgattattgatgctgaagaagacagcacccggcgtatgggattcgaaaccattctgccgttgcgtgaaggtaatggcccgacgctgttttgtttccatcctgcgtccggttttgcctggcagttcagcgtgctctcgcgttatctcgatccacaatggtcgattatcggcattcagtcaccgcgccccaatggccccatgcagacggcggcaaacctggatgaagtctgcgaagcgcatctggcaacgttacttgaacaacaaccgcatggcccttattacctgctggggtattcccttggcggtacgctggcgcagggtattgcggcgcgactgcgtgcccgtggcgaacaggtggcatttcttggcttgctggatacctggccgccagaaacgcaaaactggcaggaaaaagaagctaatggtctggacccggaagtgctggcggagattaaccgcgaacgcgaggccttcctggcagcacagcagggaagtacttcaacggagttgtttaccaccattgaaggcaactacgctgatctgtcatcagctcggtcctgggcttccacatcgtttccacttaaccatgactttgggaccttagctggcgtttgcatcgggttgagtcacaacagagcaagtgatgcagaaactgtggtattggaaaactggcggcaggtacatgaacaatgtctcgcattacacagccagcagcagacgttacagcaacaggatgttctggcggcgcaaagtctgcaaaaagcccaggcgcagtttgacaccgcgctacaggccagcgtctttgacgatcagcaggcgttccttgcggcgctaatggatgaacaaacactaacgcagctggaacagctcaagcagaatctggaaaaccagcgccgtcaggcgcaaactctggtcactcagacagcagaaacgctggcacagcatcaacaacaccgacctgacgacgggttggctctcactgtgacggtggagcagattcagcaagagttagcgcaaactcaccaaaagttgcgtgaaaacaccacgagtcaaggcgagattcgccagcagctgaagcaggatgcagataaccgtcagcaacaacaaaccttaatgcagcaaattgctcaaatgacgcagcaggttgaggactggggatatctgaattcgctaataggttccaaagagggcgataaattccgcaagtttgcccaggggctgacgctggataatttagtccatctcgctaatcagcaacttacccggctgcacgggcgctatctgttacagcgcaaagccagcgaggcgctggaagtcgaggttgttgatacctggcaggcagatgcgaacgaaaaccaaacacacgcacaacacgagcaagcaccaacaacagggacgacacacggaacgacgatgacacacaacacggagcacacagaaagactaagcccgggatcgggtcaccgccgataccgacacaggtcgactgaccgaaaccgtcagtgtaccggaacgggaaacgatacccactttacccggtttgtgaatgtgaccaggctggataccgattttgcattcacccggagtgataacgcctgggcagttcgggccgatcatacgaacgcctgcttcatccagcttcactttcacggtcagcatatccagcgtcgggatgccttcagtgatggtgataatcagtttgatgcctgcgtcgatggcttccagaatggagtctttgcagaacggtgctggtacagtaacagaagcggtagcgccagtggcagcaacggcttcacgcacggtgttgaacaccggcaggccgaggccgctgtcagccagtttcttcgcgccgagttcggcgttgttaccttccagacgtaccacgaccggtacgttaacacccacttctgctaccgcgccgatgataccgtcagcgatcaggtcgcaacgaacgataccgccgaagatgttaaccagaacggctttcactttgtcgtcagagaggatgattttgaacgcttcggttacacgttctttggttgcgccgccgccaacgtcaaggaagttagccggttcgccgccgtgcagtttaacgatgtccatcgtacccatcgccagacctgcgccgttaaccatacaaccgatgttaccgtccagcgcaacttcccactgtgcagcctgtgcttcacgcggatcttcctgcgactggtcacgcatttcgcgcagatcaggctggcggaacagtgcgttgccgtcagcgcccagtttgccgtcgaggcaaatcagatcgccctgtttggtgatgaccagcgtaagcggatcaagcgcaactttatggataaggtccggagtttcttccgccactttttcgatttccacgccgccttcggtggaggcaataaagaccacacgacgggaactacggtcaacaacggcaccgagatacagctcttaagcgatatcggtcgctgcttcaaccagaatctggttaaccggttggccattggcatctgtttgatacgttaccagacgcttgcccagccagttttctgcaaaagcacggatgtcttctttgctgtttacaactttcacaccgccagcggactattccagtcatcgtccgcaaacgatgtgcgttatacactcacagccaccgaaatggtgattgcccctgcaggctttatggacgaagccatcagcgaaaacgtgctggcgggtaacatcatgagccgccgtgcgctctactcttacggtctgttactgccgcacaacgcgcaaggcaatgtgggtaatggccttggcgtgacgctggcaacgggcgacccgagcattattgcaccgacgaaaactatcgtcagaactggcgagaagatgattatcgacggcctggagtttgacttcctgatgaccccaggtagcgaagcgccagccgaaatgcacttctatattccggccctgaaagccctgtgtaccgccgagaacgccacgcataccctgcacaacttctacactctgcgcggcgcgaaaacccgcgacaccagcaagtggaccgagtatctgaacgaaacgctggatatgtggggtaacgacgcggaagtgctgtttatgccgcacacctggccggtctggggcaataagcatatcaatgattatattggtaaataccgcgataccatcaagtacattcacgaccagaccctgcacctggcgaaccaggtctacaccatgaatgaaatcggcgacatgattaagctgccgcctgcacttgccaataactgggccagccgcggctattacggttctgtcagccacaacgcccgcgcggtgtataacttctatcttggctattacgacgtgtacccggctaacctgcatccgtatggtcaggtggagatgggtaaacgttacgtgcaggcgctgggcggttctgcccgtgtcatcaacctggcgcaagaagcgaacaagcaaggtgattaccgctggtcggcagaactgctgaaacaggtgattgccgccaacccgggtgaccaggtcgcgaagaatctgcaagcgaataactttgaacagctgggctatcaggccgagtccgccacatggcgcggtttctacctgaccggcgcgaaagagctgcgcgaaggggtgcataagttcagccacggcaccaccggttccccggacaccattcgcgggatgtccgtcgaaatgctgttcgactttatggaccgccaggcttgtcatcaatacaatcgcacgcgggtagtcgatcaacttatcgagtttctccaagaccagcacgtcaatgcccatctggccgagatagttcgccatcatcagcccaaccgggccggcaccagcgatcgccaccttgaacgctatgaaatgtcaattaatatgcagaacaatgagcagacggaatacaaaaccgtgcgcggcttaacccgcggtctaatgttattaaatatgttaaataaacttgatggcggtgccagcgtcgggctgctggcggaactcagcggcctgcatcgcaccactgtgcggcgactgctggagacgctgcaggaagagggatatgtccgccgtagcccctccgatgatagttttcgactgaccatcaaagtgcggcaattaagcgaaggatttcgtgacgaacagtggatttctgcactggcggccccactgctgggcgatctgttgcgcgaagtggtatggccgacagatgtgtccacgctggatgttgatgcaatggtggtacgcgaaaccactcaccgtttcagccgcttatcctttcaccgggcaatggtcgggcgacgtttgccgcttctgaaaaccgcctcgggcctgacctggctggccttttgcccggaacaagaccgcaaggaattaatcgaaatgttagcctcccgccccggtgatgactatcaactggcacgggaaccgttaaagctggaagccattctggcgcgcgcgcgcaaagagggttacggacagaactaccgcggctgggatccaggaggagaagatcgcctctatcgccgtaccgctgcgcagtga

SEQ ID NO: 151003 - DNA, 2967 bp, Homo sapiens
atgaaacaagaagttatcctggtactcgactgtggcgcgaccaatgtcagggccatcgcggttaatcggcagggcaaaattgttgcccgcgcctcaacgcctaatgccagcgatatcgcgatggaaaacaacaaccaggcggtgttccctggaaagttgcagataccacgaaggcaaacgatgaccgaaatacaacgcctgctgaccgaaacgattgagtctctgaatacccgcgaaaaacgcgacaacaaaccccgctttagtatcagttttatccgtaaacatccggggctgtttatcgataataaaatgaacacttctattcccattaaaattgataacctgccaggtgagtatgcgcagctggcgcagctcaacgccactcaggttgagattccagaaaccacgcttagcgcgctggtggcagaacaagcggcaaaaacaccggatgctccggcgctggcagatgcgcgttacctgttcagctatcgggaaatgcgcgagcaggtggtggcgctggcgaatctgctgcgtgagcgcggcgttaaaccaggggacagcgtggcggtggcactaccgcgctcggtctttttgaccctggcactccatgcgatagttgaagctggagcggcctggctaccgctggataccggctatccggacgatcgcctgaaaatgatgctggaagatgcgcgtccgtcgctgttaattaccaccgacgatcaactgccgcgctttagcgatgttcccaatttaacaagcctttgctataacgccccgcttacaccgcagggcagtgcgccgctgcaactttcacaaccgcatcacacggcttatatcatctttacctctggctccaccggcaggccgaaaggggtaatggtcgggcagacggctatcgtcaaccgcctgctttggatgcaaaatcattatccgcttacaggcgaagatgtcgttgcccaaaaaacgccgtgcagttttgatgtctcggtgtgggagtttttctgcccgtttatcgcaggggcaaaactggtgatggctgaaccggaagcgcaccgcgacccgctcgctatgcagcaattctttgccgaatatggcgtaacgaccacgcactttgtgccgtcgatgctggcggcatttgttgcctcgctgacgccgcaaaccgctcgccagagttgcgcgacgttgaaacaggttttctgtagtggtgaggccttaccggctgatttatgccgcgaatggcaacagttaactggcgcgccgttgcataatctatatggcccgacggaagcggcggtagatgtcagctggtatccggcttttggcgaggaactggcacaggtgcgcggcagcagtgtgccgattggttatccggtatggaatacgggtctgcgtattcttgatgcgatgatgcatccggtgccgccgggtgtggcgggtgatctctatctcactggcattcaactggcgcagggctatctcggacgccccgatctgaccgccagccgctttattgccgatccttttgccccaggtgaacggatgtaccgtaccggagacgttgcccgctggctggataacggcgcggtggagtacctcgggcgcagtgatgatcagctaaaaattcgcgggcagcgtatcgaactgggcgaaatcgatcgcgtgatgcaggcgctgccggatgtcgaacaagccgttacccacgcctgtgtgattaaccaggcggctgccaccggtggtgatgcgcgtcaattggtgggctatctggtgtcgcaatcgggcctgccgttggataccagcgcattgcaggcgcagcttcgtgaaacattgccaccacatatggtaccggtggttctgctgcaacttccacagttaccacttagcgccaacggcaagctggatcgcaaagccttaccgttgcctgaactgaaggcacaagcgccagggcgtgcgccgaaagcgggcagtgaaacgattatcgccgcggcattctcgtcgttgctggggtgtgacgtgcaggatgccgatgctgatttcttcgcgcttggcggtcattcgctactggcaatgaaactggcagcgcagttaagtcggcaggttgcccgccaggtgacgccggggcaagtgatggtcgcgtcaactgtcgcccaactggcaacgattattgatgctgaagaagacagcacccggcgtatgggattcgaaaccattctgccgttgcgtgaaggtaatggcccgacgctgttttgtttccatcctgcgtccggttttgcctggcagttcagcgtgctctcgcgttatctcgatccacaatggtcgattatcggcattcagtcaccgcgccccaatggccccatgcagacggcggcaaacctggatgaagtctgcgaagcgcatctggcaacgttacttgaacaacaaccgcatggcccttattacctgctggggtattcccttggcggtacgtggcgcagggtggcatttcttggcttgctggatacctggccgccagaaacgcaaaactggcaggaaaaagaagctaatggtctggacccggaagtgctggcggagattaaccgcgaacgcgaggccttcctggcagcacagcagggaagtacttcaacggagttgtttaccaccattgaaagcgagtgtaacgtttacagcgatttagacctctatctcggtgttcagcgaatcaactggacagagatgtttaatcctggcgcgaccttcgctgtcactttcagtggtttgaatgacaccatccgcaacagtcagtacggcgcgatgaaagtgaaagacgcgatcgtcgatgctttcacgcggaaaaatctgccgcgtccaaatgttgatcgcgatgcgccggatatccgcgttaacgtctggctgcataaagaaaccgccagtatcgctcttgatctgagtggtgatggtttacatctgcgtggtatcgcgatcgtgctg

SEQ ID NO: 151004 - DNA, 3402 bp, Homo sapiens
tcaccacgcgccagcaacaagcctgcacgggccacaagccaccgacgtttttccgcatcttgcacttgcaagcattaacagagaatgctcgccattaacgactgcccgggcttgcgccggattcagcggtgaagactcgacctggcggaaaaaatccgcatactcggtaagcatggcttcggtatacgcctggttatgctgcaaccgagcgctttcaatatctttcaaccaggcctgacatttacgccacgcctcacggcagttatcgaattcttccagtcggttaaccggcaacggcaacgccgacaaagcctggcggatttgttgctgcacgccagaggtttgctcacgcgtcagccatttattttccccagtgcgcgtggcaatcaaatccagttgctggcgtaaaacaccagacgcaatttcgctcatctcgccactccaccgccgccagtgagcatcaagatgatggtaaaaacgctgcgtctcgccccattcggtgccgtgcagacgcaccactttttcgtccggcagtacaaattccagctcgccccataccagaccgcgcttacagtgaatcgccagtaattgattgaaaggaataaggtattcgtggcgatcgccggagactttaatcccggcattgaggatcaccgcccgatcgtaagggtgctgagccagacgttttccaagcgttgtcgctttcagttccatgactctgtagatccacacgaaattatttcttatcagtgtaaccgtcagagaaaacgtgctccagcccaaaaaaacgttacaattgccgcccattactgaaaaccacagtaaagcgaggttttatgcgtaccgttttgacacattctgaactttgtgcttggcggatttgccaccactctgggctggctgttggcgactctggtcagtattgtgctgatttttaccttaccgctgacacgatcctgctgggagatcactaaactgtctctggtgccttatggcaatgaagctattcatgtcgatgaactgaacccggctggcaaaaatgtgctgctgaatactggcggtacggtattgaatattttctggctgattttctttggctggtggttatgcctgatgcacattgcaacgggcatcgcacaatgtatttcaatcattggcattcctgtcggcattgcgaactttaaaattgccgctattgcactatggccggttggtcgtcgcgtggtatcggtagaaacagcgcaacgtgcgcgtgaagccaatgcacgtcgtcgttttgaataatccactaatatggcctttatgctaagtcctttgctcaaacgctatacctggaacagcgcctggctgtattacgcgcgtatttttattgggctttttggaacccacagggtttcgcgggggggtgggggggggaaaaacggactattccccttaaccctggggatggtggaaacggcgctcaccgatctcgatgaccgactggcgggacgtttgcgtaacctcatcattacgctgttctgcttttttatcgcctcggcctcagtagaattgctgtttccctggccctggctatttgcgattggcttaacgctctctaccagcggcttcattttgctcggcggtctgggtcaacgctatgcaacaattggccttcggtgccattgttgaacgccatttacactatgttgggaacatcactgtatgagcactggtatcagcagccgatgtatctgctggccggtgccgtctggtacaacgaaatgaatcgataccgctcttggtgcagcctcttattcggttatgactgggttgggattccgctggtttacacccaggttgtcactcttgctgtctataccttcttctttgcgtgcctgattggacgccagtttttggatcccaccaaaggctacgcagggcatgacttggatctttacattcccatcttcaccctcctacaattcttcttctatgcaggatggcttaagggcagtgcgccgctgcaactttcacaaccgcatcacacggcttatatcatctttacctctggctccaccggcaggccgaaaggggtaatggtcgggcagacggctatcgtcaaccgcctgctttggatgcaaaatcattatccgcttacaggcgaagatgtcgttgcccaaaaaacgccgtgcagttttgatgtctcgcaattctttgccgaatatggcgtaacgaccacgcactttgtgccgtcgatgctggcggcatttgttgcctcgctgacgccgcaaaccgctcgccagagttgcgcgacgttgaaacaggttttctgtagtggtgaggccttaccggctgatttatgccgcgtatggcaacagttaactggcgcaccgttgcataatctatatggcccgacggaagcggcggtagatgtcagctggtatccggcttttggcgaggaactggcacaggtgcgcgggcagcagtgtgccgattggttatccgggctatctcggacgccccgatctgacacgccagccgctttattgccgatccttttgccaccaggtgaacggatgtaccgtaccggagacgttgcccgctggctggataacggcgcggtggagtacctcgggcgcagtgatgatcagctaaaaattcgcgggcagcgtatcgaactgggcgaaatcgatcgcgtgatgcaggcgctgccggatgtcgaacaagccgttacccacgcctgtgtgattaaccaggcggctgccaccggtggtgatgcgcgtcaattggtgggctatctggtgtcgcaatcgggcctgccgttggataccagcgcattgcaggcgcagcttcgtgaaacattgccaccacatatggtaccggtggttctgctgcaacttccacagttaccacttagcgccaaggcggggtgccccgctgcccaagtgccccgggtggcccaggtccgcgtgtgcgcggttctggaggatctgggtgacatcagagaatcagagggagaaaggaaacaggaggcagacgctgtgctgggcactcaggacacaccccgagtgacctcacagcccaatggcctcctgttgaagatagagccccaggagaatgtgaagattgaggggcagcaccagggcctggtgtggctgtgtgtggccgcgtcgccggtcctcgtccgcgtgacaagggagaaagaagagaaaaagaaagaagagggcaataacatgaggtttacctcgttggtattgtctgttttggtaaatattgtgcgtgcacttgaaaagaaggtgttggatataatgttcaacaattgtcgtaccggggtccaggccattacgttatctcatcggcgtgctctagcaattgcaattgcattggctcgctatattaaatcggcgctatacgatggca

SEQ ID NO: 151005 - DNA, 470 bp, Homo sapiens
  misc_feature (1)...(470): n = a,t,c or g
ggcgctgtcgtgtacccttaacaggtatctgctcctcatggcgcaggagcatctggagttccgcctgccggtgagtccgtagcgccctccggaacttccgacggaagaggacgctggagtggagtggagtgggtggaggaaataaagtctttgcttttgctttttggaggtcagtttgccagcagtcaagaaacttatggaaagtcaccattttggattcttagcattccctctgaagatattgcaagaaatttgatgaaacggacagtgtgtgccaagtctatatttgaactatggggtcatggacaatctcctgaggagctgtacagttctcttaaaaactaccctgtggagaagatggttccatttctacattcggactctacatataaaataaagatttcacacttttaataagacattgacacaagnagggaaaattcaaggcgaattagatggcacttgaattt

SEQ ID NO: 151006 - DNA, 2151 bp, Homo sapiens
atggcggaggaacaggtgaaccgcagcgccggcctggcccccgactgtgaggcctcggcgactgcagaaactacggtttcctcagtggggacctgtgaagccgctggcaagtcaccagagcccaaggactacgacagcacctgcgtgttctgccggatcgcggggcggcaggacccgggcaccgaactcctgcactgcgaggtgggcggcgacgcgcggccggggaatgaggacctaatttgcttcaaagatatcaaaccagcagcaactcatcattatcttgtggtgccaaagaagcatattggaaactgcagaactctaaggaaagatcaagtagaactggttgagaacatggtaactgttggaaaaaccattcttgaaagaaataatttcactgacttcacgaatgtgaggatgggttttcatatgccaccattctgttccatttcccacttgcaccttcatgttctggcaccagtggatcagcttggcttcttatccaagttggtttatagagtcaattcctattggtttatcacaacaaacctacaaggaaatggtgaaatttccaaggaaatggtgaaatttcagtccaattttgaagaacaggttttgaagggctgtagagaaagctggaagcacactccaagtggaacgataacttggaaatatactgtcttattatcacaggctgctcctgaaagccacgcgtccccgctcaccagctaccagcgctgggagacccctaaccaccaggcattcacaggtgaggaagcccctcccacagcggccggagtttcggactcggagcgcgagaaacgtcgggatagcgcctgcctcgcagagcttccgcttccggcccttcaggctctgtctctgtggagactgggctttgggagggagaaagagggacctagcgcgggccgcgcaggcgcacggtgggcagctgcaatggcgctgtcgtgtacccttaacaggtatctgctcctcatggcgcaggagcatctggagttccgcctgccggaaataaagtctttgcttttgctttttggaggtcagtttgccagcagtcaagaaacttatggaaaggttccatttctacattcggactctacatataaaataaagattcacacttttaataagacattgacacaagaagagaaaatcaagcgaatagatgcacttgaatttctgccatttgaaggaaaagtgaatttaaagaaaccgcaacatgtattttctgttttggaggattatggtttagacccaaactgcatccctgagaatccacataatatttattttggtagatggattgcagatggacagagagagcttattgagtcatacagtgtcaaaaagagacactttattggaaatacaagtatggatgctggtttgtcattcattatggctaaccatggaaaagtgaaagaaaatgatattgtctttgatccatttgttggaacaggtggcctgctgatagcatgtgctcattttggtgcatatgtgtatgggacagacatagactacaacacagttcatggcttgggaaaggctactaggaaaaaccagaagtggagaggaccagatgaaaacattagggccaatcttcgtcaatatggtttagagaagtattaccttgatgtcctggtttcagatgcatctaaaccttcctggaggaagggcacatattttgatgcaatcattactgatcctccatatggtatcagagaatctacaagaagaacaggttcacagaaggagataccaaaggggatagaaaaatgggaaaaatgttcaggatttcagcagcagatctcaaacatttcactgattattttgtttgggtttctggatgtgatttgtggtacactggggggaaatctaaaagtattcaaggatgatttattttcagtttttctgtttaaaccatcttatttaaaatgtttcgaggttatatgggagctccccatccatcccgctgagagccacctctaccactcagttaaagccccgtattcaccatccttcaagtttgtgtgtgacctgattcttcctgcatgctggacaaggacccgggtatcaagagggcaaggtgtaaaaggctgtcaccctgactctccactgagctggtttaacacttag

SEQ ID NO: 151007 - DNA, 666 bp, Homo sapiens
ctggagtggattggagtgggtggaagtgtattgcagagccagaggaagctgggattcgggggtgttcactggtctgcgcgggtcacgcgtccccagtcctcgggcggggtgagcttggcggagggtgtgtgtgagagaagtccgagaccacacccctcggcctgcttaaacttttcattcttttgcccgtgtatcaagtaccggagttaggcaggaaataaagtctttgcttttgctttttggaggtcagtttgccagcatgtcaagaaacttatggaaagtcaccattttggattcttagcattccctttgaagatattgcaagaaatttgatgaaacggacagtgtgtgccaagtcgtatatttgaactatggggtcatggacaatctcctgaggagctgtacagttctcttaaaaactaccctgtggagaagatggttccatttctacattcggactctacatataaaataaagattcacacttttaataagacattgacacaagaagagaaaatcaagcgaatagatgcacttgaatttctgccatttgaaggaaaagtgaatttaaagaaaccgcaacatgtattttctgttttggaggattatggtttagacccaaactgcatccctgagaatccacataatatttattttggtagatgg

SEQ ID NO: 151008 - DNA, 1844 bp, Homo sapiens
ttttctggttaaaagcactttattgattacagtatcaattcacaacatttcataaagccactgtacaaatagaggaatgaatcactgtgtaagaaagatctaagaacagttaaatcatgatacaagtccatagtttatatggtttagagctttaagagccttaatctaacacgtttacccttcccataattagactactactgacattcatgttcagttgaccacgagtgtgtacaaatcattctaggtaaagacaaacactttcagaatgctttaacagaaaaataattttaatcaactttaaaaacacacttagatgtggatgcctttggataggaaaatagaaatgcaagtgttcagatgcttctttgaaaagaaaacaataggatagagcaccattgtgtaaaagacaaaaggcttgagatatctaccaagtatatcactgaagttctattaattaagaaataaatactgtatgatgtaagattttgttggaatacatttaacacccgttggaatatagctttttccccccccgtaatgctgcctttatccacaactgtattttacaaaatcagccaactgggatttaagaaagaagacatagggagattttatcaacatgcaaacatttgcctaaatacaagggggtaccatcaatgtgtgattaattaataagttactttttaaaataaaggtgctagcttagatattctactataaaccatttcattgagtacctattatgtaaccaatattttaaaatatacactgaatctgaggcaacccaaaatgaacaatggaaagaaaactagtaaatctgaaatgtacttcacattctacttaatctaatttaaaatataaattcattgtgcaacccataagaaagatggtccaacctgtgggtatttttaaaaattctaacaggagaaatcatttaaaattttgctttttcacaatggcaaaaaggaaagaatttgaacataatatttaatttttaaaaaaattcagcctgactccgaccctgaagatttcagaaagaacatccgtcactattaaaatggatggacagggcccaaatggggggattgtttaaccagttttcctaagttaaaccaagaataagccacaagtattcaattgtgttacaacttagatctgagacatttacatcaaagcatacttccctgaacatgttcacatttaaaatgcttaaggtcttattattaaatccaaaataccaaaagtattagaggagctagttatacaatattggcacagcatttttaagcaataataaaagtttcattttgtcaccttaagtcaagatccatttatctattaataggttaagtctgaaattctgtaacatattctagaagcacctacatccattatttccaggagactagtttactactatcatgcaatcgctgaggtcatatgagtctaaaatgaagggaattgctgaacaggcccttttgctgttgagatatgaagcccaaaatctttgcctctgaagacggaattcaatgtggtgtgtgtaatcacaagtaaaaacttgagctagggaggaaccttggatattcagtctacatctcaaaacagcatagctgccaaaaatgaggcctgtccattaaagtggaggagatatccttgctgatggcaaaaactgctttttctttttgggacggaatcttgctctgtcgctcgggttggagtgcagtggcgccatctcagctcaccaaaacctccacctcctgagttcaagcaactctctgcctcagcctcacgagtagctgacaggcgcccacctccacgcccggctaatttttgtattttta

SEQ ID NO: 151009 - DNA, 439 bp, Homo sapiens
ttcccgggtcgacgatttcgtgggactgcgcggcggcgactacagacgtgtcgggggtccggggcctgtcgcggttgccaagcgctcggcgcctggcgctggcgctggccaaggcggtagaaaattatggcatgccgtttagcagaactgaagatgggaagatttatcagcgtgcatttggcggacacagcctcaagtttggaaagggcgggcaggcccatcggtgctgctgtgtggctgatcggaccggccactcaatattgcacaccttatacgggaggtctctgcgatatgataccagctgttttgtggagtattttgccttggatctcctgatggagagtggggagtgccgtggtgtcttcgcactgtgcatacaggacgggtccatccatcgcataagagcaaagaatactattgttgccacagggctactggc

SEQ ID NO: 151010 - DNA, 691 bp, Homo sapiens
atggaccaggacagcgccagcactaagacgtgccctggaactcacaggaagagcggaccaagaagccgggaacagcacggggcactgggagctgcaaacgcccacgatactgtgagagacggagaaaggtatgacaggtggagcggaccaagaagacgggaacagcacggcgcactgggagctgcaaatgcccccgataccgtaagagatggagaaaggcgcagtctgcgcagggactggcgggactgcgcggaggcgactgcagacgtatcgggggtccggagcctgtcgcggctgctaagcgctcggcgcctggcgctggcgctggccaaggcttggccaacagtgttgcaaacaggaacccgaggtgttcacttcactgttgatgggaacaagagggcatctgctaaagtttcagattccatttctgctcagtatccagtagtggatccatgaatttgatgcagtggtggtaggcgctggaggggcaggctttgcgagctgcatttggcctttccgaggcagagtttgatacagcatgtgttaccaagctgtttcctaccaggtcacacactgttgcagcgcagctagaaaattatggcatgccgtttagcagaactgaagatgggaagatttatcagcgtgcatttggtggacagagcctcaagtttggaaagggcaggcaggccca

SEQ ID NO: 151011 - DNA, 458 bp, Homo sapiens
attgttgaggccattgtcagaggaaataatctaaaggttttgtgaattcctgtactcattctgggctgttctcctcaaggtcattcctgcattaacaggaggaagatgatagggagaagggagatctcagttcagtgatgtggcctttgtgaccaagccaagccacttaatcaggggggaaatggccttagtgcccacatcaatatttgctacccgtggaggctagttttcccacttagggcatgagaagaattggtgtagtcagtatcagagttgccaaacctgttttccaaaaataatggtaaatctatatttttcttttgaactgcatttttttaattattattattatttattttgagacggagtcttgctctgttgcccaggctggatggagtgcagtggcacgatctcggctcactgcaagctctgcctcctgggttcacaccattcttctg

SEQ ID NO: 151012 - DNA, 358 bp, Homo sapiens
ggcacgaggccccaggcacctgcttatgacaacaagctttgggtagagcttacttacacccttggtttctccagtccctgcctgcccatgcccctcaaagagtgaggtgtctgttccacaagagcacccgctcccctgcaggcctttgtttagggtttggagaaacaggcagagcaggggctgccctcagggagtagagcattatggagctggtgcctggggccttctccctccagtgtggaaatcctgcccaccagccaaaacctgctgcaaatggggactgccagcccaccctgtgggcgcagctgcctgcacagcggatggagcagctctgtgccttctgtgtggtgggagtgcg

SEQ ID NO: 151013 - DNA, 1667 bp, Homo sapiens
cctcgtgccatgttattttttttaaatgactttttagtttagaaagttctgatgagcaaataaatacatctatctacatgttggaagtccatctgccagcacacctgcttaaagtgaaatgaaagcacataaccaggctctgaatgggttatattttatcatggtgctcccagaatcctttgacctcactctgctttctagtctgcttgtgacactggacagtcctttcttacagagctattatatgttctaggctacgaagggttaaataatcccaaaaatgaggtatgtcatacccacacgtctttatctctagaagctgtgatgtatgtgaaacagcactgttattcttaacactagtgtgtaaaataaggattagtacagtacgtctcattactttttaattcagggcaccctgagtgaaaacaaatacaaaaaaaaatccctaactctgagctctatctctgattcctcttcctccttcccctcttcctcctcttcctctcctcctgttttgctacattctcctcagtggcaaaaagtttcactctacctctgacagcatgtatattgcaccagtagctaacaaaaactggtctagtcaaaccaaatgggcacaaaagaaccaggataccaaaagttaagctcatacagctgcaaaccatatcacttcttggtaacaatgcagacctcataaacctaaagaagagaaagaaaagaaaacttttgttactttccttttttgcttgtcacttatatacaggctatgtgagaatataatttgtaggtataacacattaagaaaaagttatcttcattggatagaattgaatggtggtcgctgataggaatagggcgtcctctagctcttatctctgtctcttactcttttctctttctctttttctctgtcatgagactgtgtgtgacagggccacctgtctttttttttttcttaaattttttttttttttttatgtgtaggtgcatgtcttggggatttaaaaatttcaaggctggttttaccttatgcaaagccatgcctacgtctggaatacttagggaaagaaagcgactccatgttgtccgaaattcctcaagggaccagaaaaaaaattggagactgttgaaaatgccagatttgaagtaatttttttaaaatattattttgggttctgcgacattgtgaaaaattaaagttgttgtgcaatacttaattcagacatgtacccacaagttaatggtagactaacactggggggtggggtcctaggcatcatgcttttgttcagcatactcttgagcttttaagtctactatgtctgaactgtgggtttcttgtttatccttttttccttagttggactgtaatgtatgggtctgtcaaccttgtgaatcttttaaagtatggatttcagggtattgttgtattctattactgtgtaataaaaaagttgaaaaaaatctggatcctctgtctccctcgtccccggtgtgccatggttgcccaccagtgaccccagcctgaggagtccatcctccatggtgctgaatcaaatctgtagagtttattcagctacaaagcgtggctctgtaacagggagttgggcttatccatgcgtgttgagtaggggaatgatgtcagaactttgcaaaagtcgagctca

SEQ ID NO: 151014 - DNA, 696 bp, Homo sapiens
agggatcccaccccttctctgtgttttcactctgaagctctacaaactttacacctgaatgaacgccaaacctctatggatatataaaggggagcttgaggaggaatttcacagttacagtgcagaagcagaggcaagaataattaaccggctcttcagaacggcaaatcctctactcaccatgcttcctcctgccattcatttctatctccttccccttgcatgcatactaatgaaaagctgcttggcttttaaaaatgatgccacagaaatcctttattcacatgtgattaaacctgttccagcacaccccagcaccaacagcacgtttgaatcaagccagaaatggaggcaggcatttcagtaacactgggactggatcggaacactcgggttcaagtgggttgccgggaactgcgttccaccaaatacatctctggatgggccagttgcaccagcattcagccctctggaagggagctgggtgtgtggtgggcgagtgctttgcccctgccagtggttccctaactggattggaggaggctatggaacaaagtactggagcaggaggagctcccagggagtgggcggtgtgttcaatggacaaaacccgttacccagaggattcccagttgcagtgccaagatggcagcacacgcacctacaaaatcacagttagttcattgcctgcaagtt

SEQ ID NO: 151015 - DNA, 382 bp, Homo sapiens
ctgccttcagtcttcctgctagtgagaggagtctggactcccacccagatttccagatcctaaaatgaatgttccttttgctacactgcagtttgcaatttccatcttccaaatccaggagtattttgggaaggttttgtttttctgacgtctgttccacaagagcagagctcatgaatggccatgatttaattccccaagtctctgctggagccttcccagctgtcatgaggttgagtatggctttatcatcatgaaacaagtcatcagagtctttgaatcctccggtatgcttggcagagtttgtgaagcggctccggtactgcgaatacctagggaagtatttctgtgactgctgccactcatatgcagagtcgtgcat

SEQ ID NO: 151016 - DNA, 1832 bp, Homo sapiens
ctacaggttaccccacagggcttcccggtcccatgctccagcacgcagactccttgagggaaggagcacaccctgcatactgttgatgttcagcacagctttctcatatttgcccaacttgccttcatagccactgtatgaagaagtagaagacccagactcttgctttatgttggtatcaaaagtcatttcagagtcaggctgatcactcccaagtaacccactgacttctttactccagctttctgtctgctgttgactcagaatgttacacttcattatctccattgctgatataatcatatctacaacataaaagtgggcattttccttttctacatcaacaggcagcacaaatacctctggtgagaaggaattcgaagaaatggttcttctactgacttgaacagcaccttcatcagcagcagatgtcagatgggaaggctcaaaaaaagcactgtcagtctcaggatatggggaggtggccaaaatcctagggcttgtgggcagagacacccgatgagagtatcctgggcggaccatgtgtacctctgttgaggacagagagaagctgctactcttttcactcgagccatggggagaagcgctgccaacggagtctgtggtatcctcagacaacgttgtctctgccagggagtccccgaggcacgaaggtgaagggcctgagggagaggcagcatctgtcacaaaatgggtcccactgttccctgctgctggcacctgagattgcaagtcctgcggctgttgctgcacatcctgggggttaatccagacagctttgtgcctcatgagcctgatgtctaattggcaaggaggatggtcagtgttcaggaagtctgggcgatccatcaataatgccagagtgatcgctgatcccttcccagggctccacaggagaatcctgcctgactgtagattgtggcaccatctttccaggcttgtggctggtgtgaatccattcaaaacagataggagttccctgattgctggtactacttgatttgggccctgaactcaccacatggccagctgggggtctggagagctattcaggagtatgaatttctcgaagaggcagattgacacagaggagaaagtaatgattggaagccatcaaagtccatgcagtagtgacaggaggtcaatatccccattttttattttatccagccaaacccgagcggtggaacgctgcgctgggtaaacgccgcgcgtcgggtcctccctcgcgcggctccgggcagcgttccgtggccaccgcgctcccggtaacagcagaaaggggagggaggagagctgccttcagtcttcctgctagtgagaggagtctggactcccacccagatttccagatcctaaaatgaatgttccttttgctacactgcagtttgcaatttccatcttccaaatccaggagtattttgggaaggttttgtttttctgacgtctgttccacaagagcagagctcatgaatggccatgatttaattccccaagtctctgctggagccttcccagctgtcatgaggttgagtatggctttatcatcatgaaacaagtcatcagagtctttgaatcttgcgtaggaattggaagtcggggtataccaggataggttttcagcaccaggtgtggcactcaccctccggtatgcttggcagagtttgtgaagcggctccggtactgcggaatacctagggaagtatttctgtgactgctgccactcatatgcagagtcgtgcatccctgcccgaatcctgatgatgtgggacttcaagaagtactacgtcagcaatttctccaaaacagct

SEQ ID NO: 151017 - DNA, 2559 bp, Homo sapiens
atgaaaaggtcaatgacactgacaatatttcactcagaaagaatcatccttagaaaccgtcaacctcctccaaaagaaagttgggaagatatagaggatttcggggaaacacatctcgatttcttgaagcaatatggtgattttgaaaatggtattcctgttcacgatactattgccagagttgtatcctgtatcagtcctgcaaaatttcacgagtgctttattaactggatgcgtgattgccattcatcaaatgataaagacgtcattgcaattgatggaaaaacgctccggcactcttatgacaagagtcgccgcaggggagcgattcatgtcattagtgcgttctcaacaatgcacagtctggtcatcgggcagatcaagacggataagaaatccaatgagatcacagctatccctgaacttcttaacatgctggatattaaaggaaaaatcatcacaactgatgcgatggtaaactgcatcgtcaaagtcacgggcgtcttcgccatcaatggtgaccagcgggtggcggagcctgactccggagcattgtgccaggtccggtatccgggcaaccatcggaatgaccagcgatacctgttccgtcatagcgatagcgagctcctgcactggatggtggctctggatgccgctgtcaagcgggtgaagtgcctctggatgtcgctccacaaggtatacagttgtattgaactgcctgaactaccgcagccggagagcgccgggcaactctggctcacagtacgcgtagtgcaaccgaacgcgaccgcatggtcagaagccgggcacatcagcgcctggcagcagtggcgtctggcggattacctcagtgtgacgctcccggccgcgtcccacgccatcccgcatctgaccaccagcgaaatggatttttgcatcgagctgggtaataagcgttggcaatttaaccgccagtcaggctttctttcacagatgtggattggcgataaaaaacaactgctgacgccgctgcgcgatcagttcacccgtgcaccgctggataacgacattggcgtaagtgaagcgacccgcattgaccctaacgcctgggtcgaacgctggaaggcggcgggccattaccaggccgaagcagcgttgttgcagtgcacggcagatacacttgctgatgcggtgctgattacgaccgctcacgcgtggcagcatcaggggaaaaccttatttatcagccggaaaacctaccggattgatggtagtggtcaaatggcgattaccgttgatgttgaagcccgattgcgacaccagatagcccaccaattgacgcgcatcaccaccggtggcagccgcctggttaatcacacaggcgtgggtaacggcttgttcgacatccggcagcgcctgcatcacgcgatcgatttcgcccagttcgataataccaacgaagcccgcgcactggtcggcattttccttaacgatcaatatgtaaaaggcaaagcgaagaaactcaccaaagacgttgaaaccccgaaacaggccgcggtgctgggtgcaggcattatggcaaatgcggaatacagtgtgacggatgccagcggaaagatgtttaccatcaactgcacgggaaatccggaccagaacggtatttaccagcactcggtttttctgatcctcgccggggataaaacggtcagctcgcatgatgacagtaccggcatcacagtggtgatggaccataagcaatatgccattccctcaacccttggctggcgtaacggagataatgcctggttcagcttcatcatggatatccgtaaggcccggcagttcgacgtctacgtcaatgaccagaaagttggatcgtttaaccctgatgttcggaatgcacaaaaggacaagggagggttacgcaatcgtgctcggtacccggtagcccgggagcaggcacgtgacgatttcggtgaaaccgtaggtgccatactcgatacgtggcccgcgctgtctgggatttcttcttctgagtgtttaattctgccctattattctccgagccctgtcgcaagtgcggcagggctttctttatttgttttacccatactgaggagtctgcttatgacccgtctggcttcgcgctttggcgctgcaaatcttattcgccgtgaccgtccgttaacccgtgaagagttatttcgcgtggtgcccagcgtattcagtgaggataaacacgaatcccgcagtgaacgctacacgtatatacccacaatttccctgctggacagcctgcagcgggaaggcttccagccattctttgcctgtcagacacgggtacgtgacccccgtcgtcgtgagcatactaagcatatgctgcgcctacgtcgggaggggcaaattaccggtaaacaggttccggaaattatcctgcttaactctcacgatggcaccagttcgtaccagatgctgccgggcatgttcagggcggtgtgccagaacggtctggtctgcggcgagtcgtatggcgagggtgcgggtagcacacaagggggatgtggtgagtcaggttattga

SEQ ID NO: 151018 - DNA, 486 bp, Homo sapiens
ccgcgtgtcctgttgcttccctgatcttctccgtgacctgtagctaaaccttccaccagcgcttgagaacttaatttgaaccggatcctttcccagacccctttcttcttctcctcctcctcctccacctcctccagggcgccctgaaaggaccaggacatgcggctgcgcttttggctcctcatttggctcctgctgggatttatcagccatcagcccacccctgttatcaatagtctggctgtctatcgtcatcgtgagactgactttggtgtaggagttcgagaccaccctgggccaacatggcaaaaccccatctccacaaaaattggataatttgataattatcattattggggttctgaggacggtacaacatttaacattctcttctgcaacaagttgcctttgtgtgagtatactaactttctgtagaggtatacttgtaatcacaaataagaataaattatataaaacaaaaaaaaa

SEQ ID NO: 151019 - DNA, 576 bp, Homo sapiens
tgtctcaaaaaaaaaaaaaaaaatttttttttttagatcatcagctattgttagtgttagtgtatgttatgtgtggctcaagacaactttgcttcttttaatataggcagggaagtcaaaagattggatatccctgctttataccaagaaagacaacaccccacatttgcaatgcctgaaaacactaccagccatctgaaaaacatgagacttctctaacttctgttcttttttgtagcagtggaatcccacggtgatatctgagggatgtggttaccttttggaggaggttgacggtttctaaggatgattctttctgagtgaaatattgtcagtgtcattgaccttttcattatttcaactattattattccaggttatcaatactctggctgaccatcatcatcgtgggactgactttggtggaagtccttggttacatgtcattattgcgtttccgacaagttataaagttgtcattaccctctggatagtttacctttgggtgagtatactaactttctgtagaggtatacttgtaatcgcaaataagaataaattatataaaacaattca

SEQ ID NO: 151020 - DNA, 602 bp, Homo sapiens
tagatcatcagctattgttagtgttagtgtatgttatgtgtggctcaagacaactttgtttcttttaatataggcagggaagtgaaaagattggatatccctgctttataccaagaaagacaacaccgcacatttgcaatgcctaaaaacactaccagccatctgaaaaacatgagacttctaacttctgttcttttttgtagcagtgggaatcccacggtgatatctgagggatgtggttaccttttgggaggaggttgacggtttctaaggattgattctttctgagtgaaatattgtcggtgtcattgacctttttcattatttccaactattattattcccaggttatcaatagtctggctgtctatcgtcatcgtgagactgactttggtgtaggagttcgagaccaccctggccaacatggcaaaaccccatctcccacgaaaaattggataatttgataattatcattattgggtttctgagacgttacacatttaacattctcttctgcacaagttgcctttgtgtgagtatactaactttctgtagaggtatacttgtaatcacaaataagaataaattatataaaacaaaaa

SEQ ID NO: 151021 - DNA, 1474 bp, Homo sapiens
tttcgtccgctgcctgctcctgaggaggaaaatttcgtttaacgcggccgagagcaccgaggtgaacagccccccctcccagcccccccagcccgtcgtccctgctaagcccgtgcaatggcgtccatcatgtgtccactcaacccagctgcccaggacggggcaagatgtccaagctgctgaacccagaggagatgacctcgagagattattacttcgactcctatgcccactttgggatccacgaggaaatgctgaaggatgaggtgcggactctcacttaccggaactccatgtaccacaacaagcacgtgttcaaggacaaagtggtacttggttgtggggagtggaactgggatcctttccatgttcgctgccaaggcaggggccaagaaggtgtttgggatcgaatgctccagtatttctgactactcagagaagatcattaaggccaaccacttggacaacatcatcaccatatttaagggtaaagtggaagaggtggagctgcctgtggagaaggtggacatcatcatcagcgagtggatgggctactgtctgttctatgagtccatgctcaacacggtgatctttgccagggacaagtggctgaaacctggggggcttatgtttccagaccgggcagctttgtacgtggtagcgattgaagacagacagtacaaggacttcaaaatccactggtgggagaatgtctatggctttgacatgacctgcatccgggacgtggccatgaaggagcctctagtggacatcgtggatccaaagcaagtggtgaccaatgcctgtttgataaaggtctggacactcatccggggtggacctgggtgtgctgggagccccgctgtgccaccctggagtccaggcaatgccggctcctgcacagcccccacctgggcaagggcgaaggtggtgagactgcgatatgagccagaagtgagattggaaggccatgctacactggtgacggagggaaccaagaaagaaagataccagggaccttggaaagagcctggagcctggctgattggccctgagaaggtgatggaaaagtcagtccttactcctaatgtcatccttgatgcctcctattgctgggaacttgcgtatcaaaaaattggggaaggagtagtctggttcatctacatcactggagggcctgataaaacacagattgctgttttggtccagcaggaggtggacatttacacagtgaagacggaagagctatcgttcacatctgcattctgcctgcagatacagcgcaacgactacgtccacgccctggtcacctattttaatattgaatttaccaagtgccacaagaaaatggggttttccacagccatggaggaaccatgcatccctatatttgtgctgtccaaggagaaggtaaataatgttgtggttgttacagcacaagttgagagtgtgttggatgagggagaggcaggag

SEQ ID NO: 151022 - DNA, 477 bp, Homo sapiens
  misc_feature (1)...(477): n = a,t,c or g
tttacatctaggtagcttctgagcggtaaaaattagcttagttccttggggaatataaggaaagtcttcccagataagaaagttggcctgctgtcttttgttttgtttggagatggggtcttgctctgtcacccaggctggagtgcagtggcgcgatcttggctcactgcaacctccacctccgggattcaagcgattgtcctgcctcagcctcctgagtagctgggatttaggcgcccaccaccacgcctggctgattgttttgtatttttagtagagacagggtttcaccatgttgtccaggctggtcctgaactcctgggcctcaggtgatccccccggcccccctgccgccttcgggcttcccaaagttgttgagatttacagggcgtgaaccacttgcgcccagccagccttgccgtatttttgaaagttgaacagggatttgccaagaagataantacaggataagatatt

SEQ ID NO: 151023 - DNA, 487 bp, Homo sapiens; identical to SEQ ID NO: 145003

SEQ ID NO: 151024 - DNA, 778 bp, Homo sapiens; identical to SEQ ID NO: 145004

SEQ ID NO: 151025 - DNA, 685 bp, Homo sapiens; identical to SEQ ID NO: 145040

SEQ ID NO: 151026 - DNA, 643 bp, Homo sapiens; identical to SEQ ID NO: 145067

SEQ ID NO: 151027 - DNA, 1396 bp, Homo sapiens
  misc_feature (1)...(1396): n = a,t,c or g
ggccccccctttgatttctattatcatctgantacgccaagcttggcacgaggtatggagggaggctannnaaaaagagggggagtagtagctggggtgcaagatcaaataaagagctcgagcttctgtggtctctggggagatgttcccgggaagcctgtctatagggcggagggcaactgttgagatggcgtggctccccggctcctgcgcccgcgtggctttcccggcgggcgctgcggcccggtattggacagcctggcagggcagcgcggggccgaatccggctgccgtggctgaggctcatggatcactcttttgtggtagggccacatttgccacagcctggagtctgctaatgccctgacccgaatccccgggcctcaatgtgggcgtttttacccgattatagctggattgcaaattcgtgaagaatcagcatcatgtttgggcagctgagtattgggagccagggagcctgccatgaaggtttttgagaaccagagtgctgttttagaagctgggcaagcagcattctcaggcccaagaagaaggttatattttccagaggatgttcagtcccaaggaccaagtagctgccattcagtttggattctgaaaactaacttggcatcaacactgggtgtaagaaacatgcttggcctttatgtatcagaggacatgctcagcagattccaagagatatatttggcaactttttctagaaaagggccccatggggtaccatccattacatttttgagtttttttggggttttttttttttttttttgagacagtccttgctgtattgccccaggctgggagtgtgggtgggcacaatcacagctccattgcatcctcaatcaccccaggcctaagcaatcctccccaccttgtagctggggactacaagctcacagcacaacctggctaaaatttttttttttgttggagactggattctcctatgtttgcccaggctgggtctcaggctccttggcttaaatggtcctcctgccccagctttccaaaggcacagggccaagttgtagcctttgtcccttgccatcatgcccaacaaaaaggttctataccttttaatgaattgactttcataaattgggttatgttgggtggggcaagttctttaagctgggaaattgttaaattccccctgaaaatgtttttttcatggcagtttaccctgaactaatactacaataaaggatgggtcctggggtgtcaattcttgaaaatgtgtatttgaagaaaaagtaaatttcgcctactgttgtcagatattagcagtccagatattcgctctagcttgtaaacttcccctgtgtcagcctaagctctttaacccctattctacagctttagactggaggca

SEQ ID NO: 151028 - DNA, 637 bp, Homo sapiens; identical to SEQ ID NO: 144817
  misc_feature (1)...(637): n = a,t,c or g

SEQ ID NO: 151029 - DNA, 775 bp, Homo sapiens
  misc_feature (1)...(775): n = a,t,c or g
gacactcgctttttggaacgtctgaggttatcaataagctccgtagtccagacgccatgggtcatttcacagaggaggacaagggtactatcacaagcctgtggggcaaaggtgaatgtggaagatgctggaggagaaaccctgggaaggctcctggttgtctacccatggacccagaaggttctttgacagctttggcaacctgtcctctgcctctgccatcatgggcaaccccaaagtcaaggcacatgggcaagaaggtgctgacttccttgggagatgccataaagcacctgggatgatctcaaggggcaccttttgcccaagcctgaagtgaactgcacttgtgacaaagctgcattgttggatcctgaggaactttcaagcttcctgggggaaatgttgctgggtgacccgtttttgggcaatcccattttcgggcaaaagaatttcacccctgaaggttgcaaggctttcctggggcagaaagatgggtgacttggagttggccaagtgcccttgttccttccagataccactgaagctcaattgcccatgaatgcagagcttttcaaggatatggctttattcttgcaagcaattacaaataataaatctatttctgctaagagatcaccaaannnnnatnntnnnnnnncccccggattttttatttagcgggccgcacctttttccccttttagggggggtaaatttatattgggccttgggccggggttttcaaaagcggggggannnnnnnnnnaaagagccc

SEQ ID NO: 151030 - DNA, 637 bp, Homo sapiens; identical to SEQ ID NO: 144817
  misc_feature (1)...(637): n = a,t,c or g

SEQ ID NO: 151031 - DNA, 757 bp, Homo sapiens
  misc_feature (1)...(757): n = a,t,c or g
gacactcgctttttggaacgtctgaggttatcaataagctcctagtccagacgcccatgggtcatttcacagaggaggacaaggctactatcacaagcctgtggggcaaggtgaatgtggaaagatgctggaggagaaaccctgggaaggctcctggttgtctacccatggacccagaggttctttgacagctttggcaacctgtcctctgcctctgccatccatgggcaacccccaaagtcaaggcacatggcaagaaggtgctgacttccttgggagatgccataaagcacctgggatgatctcaagggcacctttgcccaagctgacgtgaactgcacttgtgacaaagctgcatgtggattcctgagaacttcaagctcctgggaaaatgtgctggtgaccgttttgggcaatcccattttcggcaaagaattcacccctgaaggttgcaaggcttcctgggcagaaagatgggtgacttggagttggccagtgccctgttcctccaggataccactgaagcctctttgccccatnatgcagagcttttcaaggataaggcttttattcttgcaagcaattacaaataataaatctatttctgctaagagatcaccaaannnnnatnntnnnnnnncccccggattttttatttagcgggccgcacctttttccccttttagggggggtaaatttatattgggccttgggccggggttttcaaaagcggggggannnnnnnnnnaaagagccc

SEQ ID NO: 151032 - DNA, 350 bp, Homo sapiens
  misc_feature (1)...(350): n = a,t,c or g
ncctcagggaactggctatgagcactcagaggagtcattgagctcacacgtcataatcaaaaagctcatgccatgttattaaatgcgttctgaagctcaatcagggcctcaccgtagagaagtggttattagtcatcgctatggaaccagacctccaggtttcaaataccagctccaacactnnnnnnnnnnnnnnnnnnnnnnnnnnnnnnnnnnnnnnnnnnnnnnnnnnnnnnnnnnnnnnnnnnnnnnnnnnnnnnnnnnnnnnnnnnnnnnnnnncaaaaccatacgtgtgtgccctggcacgcatgtgcgtatgtatcatttaatagagtgccctgctcgtgcc

SEQ ID NO: 151033 - DNA, 454 bp, Homo sapiens
  misc_feature (1)...(454): n = a,t,c or g
agcaagaagtttcctcaggggactggctctgagcactcagagaagttattggactcacacatcataatcaaaaagctcatgccatgttattaaatgcgttctgaagctcaatcagggcctcaccgtagagaagtggttattagtcatcgctatggaaccagacctccaggtttcaaataccagctccaacactnnnnnnnnnnnnnnnnnnnnnnnnnnnnnnnnnnnnnnnnnnnnnnnnnnnnnnnnnnnnnnnnnnnnnnnnnnnnnnnnnnnnnnnnnnnnnnnnnnnnaaaccagacgtgtgtgtgctggcacgcatgtgcgtatgtatcatctaatagagtgccctggtctataggaagtgctatacgaagtgtttgctgctatccactaccattccctgccctgtgcgctccatgtctctgaatttccaccgcactggactagtgat

SEQ ID NO: 151034 - DNA, 451 bp, Homo sapiens
  misc_feature (1)...(451): n = a,t,c or g
caggggtgtcttagtgaagcaagcagtttcctcatgggctaggctcggactctcatagaagttattggactctcacatcataatcaaaaagctcatgccatgttactaaatgcgttctgaagctcaatcagggcctcaccgtagagaagtggttattagtcatcgctatggaaccagacctccaggtttcaaataccagctccaacactnnnnnnnnnnnnnnnnnnnnnnnnnnnnnnnnnnnnnnnnnnnnnnnnnnnnnnnnnnnnnnnnnnnnnnnnnnnnnnnnnnnnnnnnnnnnnnnnnnnnaaaccagacgtgtgtgtgctggcacgcatgtgcgtacgcatcatttaatagaccgccctggtctataggaagaacttccgaagtgataaatgctatccactaccattccctgccctggcactccatgctctagggaggcgcc

SEQ ID NO: 151035 - DNA, 1271 bp, Homo sapiens
gtagagattggatctccctatgtagcccaggctggtcttaaacttgcaggctcaagcgatcctcctaccttggcctcccaaagtgctgagttgttttgttttgtttttgagacatagtcttgctctgtcgcccaggctgaagggcagtggcgcaatcttggctcactgcaacctccgcctcctgggttcaagcgattctcctgcttagcctcccgagcagctgggactacaggcctgcaccaccacgcccagctaatttttgtatttttagtggagacggggtttcaccatattggccaggctggtcttgaactcctgaccttgtgatctacccacctcggcctcccaaagtgctgggattacaggcttgagccaccatgcccagccggacaggggtttcttagttaagcaagaagtttcctcaggggactggctgtgagcactcacagaagttattggactccacacattcataatcaaaaagctcactgccatgttattaaaatgcgttctgaagctcaatcagggcctcaccgtagagaagtggttattagtcatcgctatggaaccagacctccaggtttcaaataccagctccaacacttagctgtgtgactgggacaaactacttaaactctctgtctcaatgtccttatctataaaatgaggctgataatactgcctacctcataatgttattgtgaaaaccagacgtgtgtgtgctggcacgcatgtgcgtatgtatcatttaatagagtgccctggtctataggaagtgcttccgaagtgtttgctgctatccactaccattccctgccctgtgcactccatgctcttgctcacccccactcacccgggccccagtgtgcatgaatcccagacacatggggtatggggcagtcacaagaggtgagggtccagggcccttgtgtgtggcattggaggaggactcggggtcccagattggggcagggctgggccacggttcacctggagctggatggggagtttgccggggccaagtgtgaagctggcagagaagagcacagcgcacttctcctctgtgacagactcagtgcccttccgctcacaccgcttgatcttcttgagaagcaggttcttgaacagggcagagcagcagttcccaggaatgctgttctccaagggcacagtgttgttgatgatttctccagtgctttctctgccaggggaggtcagagtgtgaacgagctcatctcactgtcgtcaggtgtggcgagtgcatgggtgag

SEQ ID NO: 151036 - DNA, 363 bp, Homo sapiens
  misc_feature (1)...(363): n = a,t,c or g
ggcacgagtagggctcnnnnnnnnnnnnnnnnnnnnnnnnnnnnnnnnnnnnnnnnnnnnnnnnnnnnnnnnnnnnnnnnnnnnnnnnnnnnnnnnnnnnnnnnnnnnnnnnnnnnnnnnnnnnnnnnnnnnnnnnnnnnnnnnnnnnnnnnnnnnnnnnnnnnnnnnnnnnnnnnnnnnnnnnncatgcccttgcgcctgcctatccaggacgtctactaaatcggcggtataggtactgcacttgttggccgagtggaatctggtgcagtcaactacggactggtgggatcctcagtccattaagctgtacagtcggtcgcactagactttcgattcaattcatggatgctttacagtcag

SEQ ID NO: 151037 - DNA, 792 bp, Homo sapiens; identical to SEQ ID NO: 146288

SEQ ID NO: 151038 - DNA, 1335 bp, Homo sapiens
  misc_feature (1)...(1335): n = a,t,c or g
atatttatggggtagaaggacccaaagttcattaaacacaatgcccgccccacggtntgggtctttttttcgctcattatattccgcaggtgcccaacacagtttattcggtctccctaaaggaaaaaaacccattttaaaaagccatccagcagaatgccacatccctagaaagatccacttcctggcccttcagctgcttctgtttctcttcacctacaaaaataaaattacgagtatacaataacccttttaaaatacagcatcattaagtgggaaactgaaagcctgccattgttgttgccgtttaacagctgatacaggtttctgggtgatgctactgttgcctagctaccctgaccacattattttttcactgtatcagtgggngtgtcatattttttttttttgccatccttgttcctatggcgagttatgtcatattttttactgttaagtacttatgcatgaataagtataagaaaataactgcttattggtagcatatacattcagtcaggaatggaatggtgacatcaaccaaccacaaattacccaaatgagtggctggaaataatgacacctttgctttctgatggttcaaggtatgcaaacttggtctcaatgcacaaaattattaaaaataatgttatataaagttaccttcaagctatgtgcataaggtatatatgaaacaagtgaatttgtgtttaaacttgggtcccatctccaagatatcttattgtgtgtatgcaggtattccaaaatttggaaaaacatcccaaatccaagatgcttctactannnnnnnnnnnnnnnnnnnnnnnnnnnnnnnnnnatatagcaaaatcactgaatctaagagatgggtatacaaagatcactactttcagttttcctttttgtttgaaaatgtacatgacaaacatatccatacagttcattgtaacattacaattcccaaatcctttgggaaaaatccacctacacacacagtctctctttatctaagtggattcaagatgctcctttttacaaaacttaaaaagattttgcagtggtggcactccagcctcaagtgagtagcatagtcctgcctatttaaaaacatcttagtattccatttcactcttaagttttgtgttccttccattccattagggaatagaactttgcatctgatgacaaattcagtttaccatgagactacaccacatttaaagtaaactggccaggtgcggtggctcacgcttgaaatccaagcaatttgggaggccaaggcgggcagatcacttgaggccaggagtttgagaccagcctagccaacatggcaaa

SEQ ID NO: 151039 - DNA, 637 bp, Homo sapiens; identical to SEQ ID NO: 144817
  misc_feature (1)...(637): n = a,t,c or g

SEQ ID NO: 151040 - DNA, 784 bp, Homo sapiens
  misc_feature (1)...(784): n = a,t,c or g
gacactcgctttttggaacgtctgaggttatcaataagctccgtagtccagacgccatgggtcatcttacncagaggaggacaaggctactatcacaagcctgtggggcaaggtgaatgtggaagatgctggaggagaaaccctgggaaggctcctggttgtctacccatggacccagaaggttctttgacagctttggcaacctgtcctctgcctctgccatcatgggcaaccccaaagtcaaggcacatggcaagaaggtgctgacttccttggggagatgccataaaagcacctgggatgatctcaaagggcaccttttgcccaagcctgaagtgaactgcactgtggacaagcttgcatgtgggatcctgaggaactttcaagcttcctggggaaatgttgctgggtgacccgtttttgggcaatcccattttcggcaaaagaatttcacccctggaggttgcaaggctttcctggcaaaagcagaagatggcagaagatggtgactggagttggccagtgcccttgttccttccagataccactgaagctcaattgcccatgaatgcagagcttttcaaggatatggctttattcttgcaagcaattacaaataataaatctatttctgctaagagatcaccaaannnnnatnntnnnnnnncccccggattttttatttagcgggccgcacctttttccccttttagggggggtaaatttatattgggccttgggccggggttttcaaaagcggggggannnnnnnnnnaaagagccc

SEQ ID NO: 151041 - DNA, 488 bp, Homo sapiens
  misc_feature (1)...(488): n = a,t,c or g
gtttcttttttgttgttgttgagacagaggtttgctcttgntgcccaggctggagtacaatggcacgatctcggctcactgcaacctccgcctccccggttcaagtgattctcctgcctcagcctccgtcaccgtgcccagctaatttttgttatttttagtagagatggcggtttccttatgttggccaggctggtctcgaactcccgacctcaagtgatctgcccgtctcagcactttgggaggctgaggtgggtggatcacaaggtcaggagatcgagaccatcctggctaacacggtgaaaccctgtctactaaaaaaaattagccgggcgtggtggtgggcgcctgaagtcccagctactcgggaggctgagacaggagaatggcatgaactccggaggcagagcttgcagtgagccaagatcacaccactgcactccagcctgggtgacagagagactccttctcaaaaaaaaaaaaaaaaa

SEQ ID NO: 151042 - DNA, 6474 bp, Homo sapiens
tcaaacccttgatccagttgcagtcacagacaactgggcaccagggttcttggctccagctgtgcctgtgaagcctccacctctgacaggtggtggctcaagtctccactccaaggcccgtgaggacaggccacctgggtgggagcaaggtttctctaagttttccttaaaatgccttccgtgtatctgttcttcatcttcctgagagcacagtgtatcagacttgaaggggtggcctgcccctccacacctgtgggcgtttctcatcaggtgggacaagagaaggaggggtttgctggagatcatggggatgagaaccactgtgctttcttcatcagttaggccagcacaggctacatcgagagcaaagcaggtgagctgatcctccaatgagtacaacgtgctgttgtaaggttgctggcagtcagacaggtcatgggggagtgaaggagtcaagtaaacttcatccagggagtcctgtgggacgtcctgttcctccacctctggcagatccgggctcagcctggggcattgtgggtcttggtcttcttcttcttcttgatttttttcaatgtctgcaacaaagtcagacagggacagacacattaagtctattcccctattcatgcaacaatccactgtccaatctgtccccatcaagagccaagccaacatgctgttcctccaatgagtaaaagtacttctgtagggctggcatgagtcaggcagttcaagataactggtaggagtcgaataatatctatccagtgagtcctgcaagacttcaggctcttccacttccaacagctccctgctgagcttgaagaagtaggaaaaactgggacatgttgcctctcgatcgtcctttttcacttgatcacactgaggtccagcaagatgatggacagatgagctaaaacaagccaacttagaagacacagaaaatggagataaattcagtgaaacctgggtcacatcttccactgagaggtagacaagggtgacactggcctgggatgctaactggagctttatcaccttcacaatggagtactcactacctatgtcaagagccaagccaacttgctgttcctctaatgagtgaaaggtgctcctgtaagacctcctttcctctggtctcggttgagacactgcaaagggcatcgtcctggagcatttctcctctccccaaggcccctcgaaggaaggatgggcggacggaagcttcaccccgaagtggtcaagcgcgcagagctccagcttccgcaggagcatttcccggtgtctctcatgggtaagagtgggtcctgcaggataatgcctcccgttccctgaggagcagtgctggagatgcccatgtggccagctcctaggccacgcgacccaggccctccaggaggagcgaggagtcctgggccctgaaccagccccctggacccggggctgggggccttgctgtcccaaggacagctggggagaaagaggaagccggctgagatgtgtaaagcagctcttgctaccgcgggaagggagagggcgcgcgggacccaggagccactgtgcgaagccaggcctcaggagcagccgccttgttcctagaaggggtgcctccatccatctggtgtccaaagactgcagggagaccttctcgtccggtgggaaagcgaggtctcccatgctttcccaccacgcaggccttgtgtcctttctcctgctagtgtctgcccgccagcgggcgggagctgcggctgcggcggttccacactctgtggacgctgcccgccagcgagccaagagccgcgcttggaggcgggagtcggggagtcgtgtgcaggtcggaaggagacccaagctctgggtcagggcttttttgccaatagccaaattcagcgtgtaaaagacagagagctcacatctgtctgttcgagagcggccacagttttccatttgtgcctgctccacgtgctgtctttgttgggtcagcaaacatcgcctccctttaccgctcagtcccacttccaacctcgcgggcatcgcctccagtcgcttcttctgaaggcctaagaagcacgttacccgcgaacggaggtgaggaggctccactgaccgtcccctgtcagctgataatttgtggcacgcacaaacgccacgacttgccttggcctctctcttagttattcgcagctcagcccgatcggcgcctccgggacggcagaggcggcaaagacggtgggcttcttgggtgcagttccaggagggctggcatctagcgggcgtaaaggaagattcctgcgggaaggcagtcagtgcaaaacaattccctgactggtaatccaacccgagctgcggcggtgaaagcgctaaattcaaggacacaagtcccggagccagttgcagcgtccgggcagaacctgaccaccgacctagagatgcgcctttgtgaagcggcagcgcatggagagacagtagcgggtcaccgggccagagccgcgcactgccattttcccatcttaggctatactgcaacgccacccttccgtatgctctgggcaaagctccaagggttcccgctgacgtttgagttttttcctcagggccaagatcgaactggtcaccaattcgtgatttcccatcggccaagtgcgtgggcattgatctacacgcgagtttctccacctccgcggaatgggtattacggggtgggggaggggcccttcggtggattgtaaggtgtttagccgcatccctcgcctccgctgacttaggatttgaggcttttaacatctcgacatcatgagtttctacctttaggtctttccttctgttctgtcctccaaatcggcctcttctgagcctgttgaccagggccagccaggtagaaggctgggttcgctcaccgaggatcctctcgcccctccatgaagtcgacctcacctcctctgaaggtcctcccggtcctccagtggctggagaaggtgagtcgagtccctgtctccagtttgcaaagtggacaaagcctacgacaatgggccccgaatcagctactaggcatccctgtctttccagttggtggtactcgagcttccctacccaggatttctgtggattccaagggtacaactgaacaccttttgtcgttccaactgctcttatttgaattaagggctgatcctgacgcgcctggttgcggggagcaaaacggatcagctgactacccagacgagcaactttgccgtgactcggattcgaaccgaggttgctgcggccacaacgcagagtactaaccactatacgatcacggcgggccacaaggcaagcggtgatgcttgaccttgctcgaccgaagccgagttgagctaggggagcccaagcggcgtagaaagtcgggtgaaggcggagccaagaacggaaagagccatcactagagtccacggggcgttctgcttcctttgggaagtcgcggacccgggcgtttcccgggacgctggctctgacgctttttgatggggttgtttttttcttgtaaatttgtttgagttcattgtagattctggatattagccctttgtcagatgagtagtttgcaaaaattttctcccattctgtaggtttcctgttcactctgatggtagtttcttttgctgtgcagaagctctttagcttaattaaatcccatttgtcaattttggcttttgttgccatggcttttggtgttttagacatgaagtccttgcccatgcctatgtcctgaatggtattgcctaggttttcttctaggttttttatggttttaggtctaacatgtaagtctttaatccatcttgagttaacttttgtataaggtgtaaggaagggatccagtttcagctttgtacatatggctagccagttttcccagcaccatttattaaatagggaatcctttccccatttcttgtttttctcaggtttgtcaaagatcagatggttgtagatgtgtggtgtttatttccgaggcctctgttctgttccattggtctatatatctgttttggtaccaataccatgctgttttggttactgtagccttgtagtttagtttgaagtcaggtagcatgatgcctccagctttgttatttttgcttaagattgtcttggctatgcaggctcttttttggttccctatgaagtttgaagtagttttttccaattctgtgaagaaagccattggtagcttgatggggatgacattgaatctataaattaccttgggcagtatggccattttcacgatattgattcttcctacccatgagcatggaatgttcttccatttgtttgtatcctcttttatttccttgagcaatggtttgtagttctccttgaagaggtccttcacatcccttgtaagttggattcctaggtattttattctctttgaagcaattgtgaatgggagttcactcatgatttgggtctctgtttgtctgttattggtgtataagaatgcttgtgatttttgtacattgattttgtatcctaagactttgctgaagttgcttatcagcttaaggagattttgggctgagacaatggggttttctagatatacaatcatgtcatgtgcaaacagggacaatttgacttcctcttttcctaattgaataccctttatttccttctcctgcctaattgccctggccagaacttccaacactatgttgaatagcagtggtgagagaggacatccctgtcttgtgccagttttcaaagggaatacttccagtttttgcccattcagtatgatattggctgtgggtttgtcatagatagctcttattattttgagatacgtcccatcaatacctaatttattgagagtttttagcatgaagggttgttgaattttgtcaaaggctttttctgcatctattgagataatcatgtggtttttgtctttggctctgtttatatgcagttcctccttgtacctctggtagaattcggctgtgaatccatctggtcctggactttttttggttggtaagctattgattattgccacaatttcagatcctgttattggtctattcagagattcaacttcttcctggtttagtcttgggagggtgtatgtgttgaggaatttatccatttcttctagattttctagtttatttgcatagaggtgtttgtagtattctctgatggtagtttgtatttctgtgggattggtggtgatatcccctttatcattttttattgcatctatttgattcctctctcttttcttctttactagtcttgctagcagtctatcgattttgttgatcttttcaaaaaaccagctcctggattcattaattttttgaagggttttttgtgtctcaatttccttcagttctgctctgattttagttatttcttgccttctgctagcttttgaatgtgtttgctcttgcttttctagttcttttaattgtgatgttagggtgtcaattttggatctttcctgctttctcttgtgggcatttagtgctataaatttccctctacacactgctttgaatgtgtcccagagattctggtatgttgtgtctttgttctcgttggtttcaaagaacatctttatttctgccttcattttgttaagtacccagtagtcattcaggagcaggttgttcagtttccatgtagttgagcggttttgagtgggtttcttaatcctcttaatcagtggaatcttggtgctccaattgttgaaggacccagagatgaagacctccttgcctccttcagaccagcggataacagtgggccgggcctgctgtgtgggctttacggagtcctccaaatcctgctgccatgatacaaactctttgtccccagggagagagtgaaaacaagttgttctcttcctgaaagtccttggaattgagagcaaggtcttcagggcagctgtgggttgtcgtttttttagccacgcaacattttgaagtactactgaggagtaaacaagtcgtggaatcattggctcttccaccttggagtcagggaggctgaacacgctggggtcgtccgtactccccaccatgatcttgtgctccttccccggggcatggccgcctgcgccctcggagcgtgcagccttggcgccgtggcgctccccggacacccggtcgctggtggtgtttcccatggctgcagctcgtcggggaccacctaccgcggggaacgacaccgggttgggaggatgaggcagaagaatcgcttgaacccgggaggcggaggttgcggtgagccgagatcgcgccactacactccagcctgggcaacaagagcaaaactctgtctcaaaacaaaacaaaacaaaacaaaacaaaaaacaccggctggttcattggaacagaaagaaatggatttatctgctcttcgcgttgaagaagtacaaaatgtcattaatgctatgcagaaaatcttagagtgtcccatctg

SEQ ID NO: 151043 - DNA, 345 bp, Homo sapiens
catcgacgaacacagaagacagaggtaagatacaggcgaacgcgtgcgatataagaacaacagagggagcaattagaatcaaggacgctgaagtcgactgaaaaaagtcatgaaaccggattcgctacgacacacgcaccacctttaccgcatactatgtaagtcatttagcttattaggggctctctttccatatgttaaaaaaaaaggtttataagtatatgtgcatatacatgtatatatgcacacatacacacacgcatctcatatgaatgtatataaacagaccaagtctatatgattatcaattccttttctattatttgagtcaactagactcgtgcc

SEQ ID NO: 151044 - DNA, 338 bp, Homo sapiens
cgaaggtgtcacataggacagatacgaccagacatcatatcgcaggagatgacgaccggaaggagaccaccgcgtagcggcataatgaagcagtaggacctcgaccgcgccacatggaatcaaaccacgcaccacctttaccgcttactatgtaagtcatttagcttcttaggggctctctttccatatcttaaaaaaaaaggtttataagtatatgtgcatatacatgtatatatgcacacatacacacacgcatctcatatgaatgtatataaacagaccaagtctatatgattatcaattccttttctattatttgagtcaactagactcgtgcc

SEQ ID NO: 151045 - DNA, 412 bp, Homo sapiens
  misc_feature (1)...(412): n = a,t,c or g
ctaaaatatttactacctgcccttttacaggaaaagtttgtttacctgatcaaaagggataggacatcgagcaaaagttttcctgttatggnnnnnnnnnnnnnnnnnnnnnnnnnnnnnnnnnnnnnnnnnnnnnnnnnnnnnnnnnnnnnnnnnnnnnnnnnnnnnnnnnnnnnnnnnnnnnnnnnnnnnnnnnnnnnnnnnnnnnnnnnnnnnnnnnnnnnnnnnnnnnnnnnnnnnnnnnnnnnnnnnnnnnnnnnnnnnnnnnnnnnnnnnnnnnnnnnnnnnnnnnnnnnnnnnnnnnnnnnnnnnnggccctattttttaaagtacagtatttaaaaagaattttattcctttagtttttggcccaccatgtgcatgggggactgtgctgtgtgccacaaagggt

SEQ ID NO: 151046 - DNA, 980 bp, Homo sapiens
tactttttaaaaggttgaattttatggtacataattacatctcaataaagctattattttaaaagtattctatatgtaagtgtatatacatgtataaatatgcaaacacacattttatgctaattcagagattgacatagttttatatctacttaaattttttttaggattctaaaatattaacatgcaagaacatactgggaatatcacaagaactagtttgatagaactgatatagtctatcaaacctgaaagactttaaaacctgaaagctccgttgaaatcagcaacttttaaatcctagaaaacagtggccaatctccctctctcctgagtgagcttaactcctaatttcaatgtccatatttgtatggaatcaagaaagcctccaaattagctggtgcatctccaaccacacgaatagtgggagccgcatcttttccaccctcatcacctttgtggcacacagcacagtcccccatgcacatcgtggaccaaaaactaaaggaataaaattctttttaaatactgtactttaaaaaatagggccacagcccgggcaacatagcaagactctgtctctataaacaataaaaaaaaaattggccaggtgtggtggcacgtgtctgtggtcccagctacttgggaggctgagatgggaggattgcttgagtgcaggtagttgaggctgcggtgagctgtgatcataccactgcactccagcctgggtgacagagcgagaccttgtctcaaaaacacaaaaaaatagggccataacaggaaaacttttgctcgatgttctatcccttttgatcaggtaaacaaacttttcctgtaaaagggcaggtagtaaatattttaggcttcatggacaaaactgtttctgacacaactacttaactctgttcccataacacaaggcagtcatagacaatatataaacaaatggacgtaaaacaaatgatctgctgagaacctca

SEQ ID NO: 151047 - DNA, 364 bp, Homo sapiens
cttgcttaccacaactgatagtggggaggcagtttgaggcctagcatcacttacacttcctccaaaggcacaagagccagatgagaacgatgaatacgggactttttgaaatactgaccatgctgctgacaaccatgaatctagtggacattttccatgagaaggctgacgtggtagacatggcatataatgcatttgacgatgaatacctgaactgtacggacaggatggacattaaatacgttgtccaactgctaaaggaggaacaagcaagccatcatcactgagatactgagtgcgaaaatgcatgagccagatgggcagcccgaatgactcatatctttctccctatggattataatgg

SEQ ID NO: 151048 - DNA, 328 bp, Homo sapiens
cgcgtctacgtcaaggatggggttctgactctattcaacatgtgctacaagttctggccactttaacaaggcaaggaacataaaaagacaaacacactggaaaggaaataaaactccctaattgcaggctacatacttgtctatgtaaaaaccccaaggactcaaaaagaaaagtccttcttaaaggtattaagcacatatatcaaagttgcaaaatacaaggtctaaatcctaaaatccattacatttctatttactaccaaggaatattcaaaaatcaacattaaaatgccatttacaacgccatttacgactccaaattaaatgt

SEQ ID NO: 151049 - DNA, 424 bp, Homo sapiens
gccagggtgagccccgcgtcccggcgccactcggcccgcgcctctccgcgccgccccgcgctccgcaccgcgccctctccgcgtccccgcccgcgcggccggaccgggcagccagaaaaatcatttttcttctctgggaaggtgaacatttgtagcattgatttcccggatctggtaacatggcaaaagatgccggtctaattgaagccaacggagaactcaaggtcttcatagaccagaaccttagtcccgggaaaggcgtggtgtccctcgtggccgttcacccctccaccgtcaacccgctcgggaagcagctcttgccaaaaacctttggacagtccaatgtcaacattgcccagcaagtggtaattggtacgcctcagagaccggcagcgtcaaacaccctgggtgggtaggaagccca

SEQ ID NO: 151050 - DNA, 460 bp, Homo sapiens
ttgcggtgctgcaacaccctccacctcaatttaattaaggcgtttatttaaaattatcaattaacacagtcggtaaagataaggaaaaagtcagaaggcaccaccccatcaccacccaactgcagtgtggtatccaaggccacaacttgtgggtggtgaccgcagcttcagagatcagatccttccatctttcaccttcatcccgcttcagacgctttaaaagtatcttttgccatgttaccagatccgggaaatcaatgctacaaatgttcaccttcccagagaagaaaaatgatttttctggctgcccggtccggccgcgcgggcggggacgcggagagggcgcggtgcggagcgcggggcggcgcggataggcccgggctggggccgggccgggcggtcccggccgtggcggggtccctgccctgggccgagtggcgccgggcctcgtgccgaattc

SEQ ID NO: 151051 - DNA, 320 bp, Homo sapiens
  misc_feature (1)...(320): n = a,t,c or g
nnnnnnnnnnnnnnnnnnnnnnnnnnnnnnnnnnnnnnnnnnnnnnnnnnnnnnnnnnnnnnnnnnnnnnnnnnnnnnnnnnnnnnnnnnnnnnnnnnnnnnnnnnnnnnnnnnnnnnnnnnnnnnnnnnnnnnnnggggtttttccaaggggcccaaaaaaaaagggttcacccaaaaggtccccccgggaaatcccggttttaaaaattttttcgggcgggcccggggggttcaatttggaatccccaccatttgggaggcccaggggggccaaattgttggcccccgggatttcaaacccccccaaacaacccgggt

SEQ ID NO: 151052 - DNA, 637 bp, Homo sapiens; identical to SEQ ID NO: 144817
  misc_feature (1)...(637): n = a,t,c or g

SEQ ID NO: 151053 - DNA, 780 bp, Homo sapiens
  misc_feature (1)...(780): n = a,t,c or g
gctcagcccatatatatatatacacactcgctttttggaacgtctgaggttatcaataagctcctagtccagacgccatgggtcatttcacagaggaggacaaggctactatcacaagcctgtggggcaaggtgaatgtggaagatgctggaggagaaaccctgggaaggctcctggttgtctacccatggacccagaggttctttgacagctttggcaacctgtcctctgcctctgccatcatgggcaaccccaaagtcaaggcacatggcaagaaggtgctgacttccttggggagatgccataaaagcacctgggatgatctcaagggcacctttgcccaagctgagtgaacttgcactgtggacaagcttgcatgtgggatcctgagaactttcaagctcctggggaaatgtgctggtgaccgttttgggcaatcccattttcgggcaaagaatttcacccctggaggttggcaggctttcctgggcagaaagatgggtgacttggagttggccagtgcccttgttccttccagataccattgagctcactggcccatgatgcagagcttttcaaggataaggcttttattcttgcaagcaattacaaataataaatctatttctgctaagagatcaccaaannnnnatnntnnnnnnncccccggattttttatttagcgggccgcacctttttccccttttagggggggtaaatttatattgggccttgggccggggttttcaaaagcggggggannnnnnnnnnaaagagccc

SEQ ID NO: 151054 - DNA, 637 bp, Homo sapiens; identical to SEQ ID NO: 144817
  misc_feature (1)...(637): n = a,t,c or g

SEQ ID NO: 151055 - DNA, 697 bp, Homo sapiens
gacactcgctttctggaacgtctgaggttatcaataagctcctagtccagacggccatgggtcatttcacagaggaggacaaggctactatcacaagcctgtggggcaaggtgaatgtggaagatgctggaggagaaaccctgggaaggcttctggttgtctacccatggacccagaggttctttgaccagctttggcaacctgtcctctgcctctgccatcatgggcaaccccaaagtcaaggcacatggcaagaaggtgctgacttccttgggagatgccataaagcacctggatgatctcaagggcacctttgcccagctgacgtgaactgcacttgtgacaagctgcatgtggatcctgagaacttcaagctcctggggaaatgttgctggtgaccgttttgggcaatcccattttcggcaaagaatttcacccctggaggttgcagggcttcctggcaaaagcagaagatggcagaagatggtgactgcagttggccagtgccctgttcctccagattaccactgagctcactggcccatgatggcagagtttttcaaggataaggcttttattcttgcaagcaattacaaataataaatctatttctgctaagagatcacacatgattttcttcagctcttttttttacatctttttaaatatatgagccacaaagggtttatattgagaa

SEQ ID NO: 151056 - DNA, 547 bp, Homo sapiens
ggcacgagaactctggtttggattgtcaggtagcagtgtctaggtactggagagaagttaaagcggagtttatttttcctttgtacaaaggttaaaaactctcactcaacatcttattttgatatttgggtttttaccataggagtatccaacccttacaaccttcttcgaaggagaaataatcagcaaaaaacaccctttcttaactcgcaagtgggatgcagatgaagatgttgatcggaaacactgggtgagtaaatctgatctgtgctgggtcatctaggggctgctagagaattgaagaaatgctgggagccagagaccttgtcccttattgaggattactggggctttgcaaccaagtaaaaggttgcactgcacacagacctcagttgttccatcttccttatgaggacagtttaaatacgatctgacctgctgcttaaatagcaaatggttgtctgatgatagcaaccccagagttccagccaaaactctgctcagctatcacaatcttatcagggtccccccatccttcccacctggt

SEQ ID NO: 151057 - DNA, 401 bp, Homo sapiens
acccttacaaccttcttcgaaggagaaataatcagcaaaaaacaccctttcttaactcgcaagtgggatgcatatgaagatgttgatcggaaacactggggcaagtttctggctttttatcagtatgcaaaatcatttaactcagatgactttgattatgaagagctgaagaatggagactacgtcttcatgaggtggaaggaacagtttctggtcccagatcacacgatcaaagacatcagtggtgcttcttttgccgggttctactacatctgctttcagaagtcagcagcctccatagagggctactactaccataggagttcagaatggtatcagtccctcaatctaacccatgttcctgaacacagtgcacccatctatgaattccggtgacaacg

SEQ ID NO: 151058 - DNA, 365 bp, Homo sapiens
  misc_feature (1)...(365): n = a,t,c or g
ggcacgaggtctgaggttatctataagctcctactccagacgccatgggtcatttgacatatgaggactaggctactattacaagcctgtggtgcaaggtgaatgtggatgattctggatgatannnnnnnnnnnnnnnnnnnnnnnnnnnnnnnnnnnnnnnnnnnnnnnnnnnnnnnnnnnnnnnnnnnnnnnnnnnnnnnnnnnnnnnnnnnnnnnnnnnnnnnnnnnnnnnnnnnnnnnnnnnnnnnnnnnnnnnnnnnnnnnnnnnnnnnatcctgtgtgatctgtggttttcttcttcatctgaacgatatgcctgcgtcaaagtgccgtggagtcttaaagctttaattcctttatcg

SEQ ID NO: 151059 - DNA, 379 bp, Homo sapiens
ggcacgagcttatgtgtgtctccacactggaacccccaagacaagagactggaggcagagttgatttccaagcccagagtgctgggcagcctttgggttttatgtctgcttgcttggagctcagtgatttaattctaggccttctttgaggattggactgttctgcataacctgctctctctgggattgcttctggtgctgctggatccatgcatccttatatagtgtgattaggtctctactttcctttggtaccttggtttgtttttccctgttttgtgttgccttcttatctttctcgttctgagtagttttgttcttttttctgctctttatctcttctggttttttttcttttgttttcttggtctttctcttt

SEQ ID NO: 151060 - DNA, 371 bp, Homo sapiens
cgccagggtccccagggtgggagagcggctccgcggccaccgatgcccggaccccctctgtcttctgctagacatgctcttcctctcggctcttgggaaagctggtgctgctgctgcctgattcccgccgacagaccttgggaccggggccaacactggcagctggagatggcggacacgagatccgtgcacgagactatgatgcaggcgagccgcaaggagatccagagtttgccgaaaaatggatcattcccatccaccaatgagatgaggctcagatattatagctcctataaccaggcatctgaatgaccctgaaaactttcaaggcctggattatgggatcctattggaagagctaaatgggatgc

SEQ ID NO: 151061 - DNA, 585 bp, Homo sapiens
aaagataggccattgtcagggaactgcagacttaggccgtggaggcagctggtgaagcaccagaaagcggtactgcacgttagctgagacaccaagccctaggcacatgctctattattctcttgtactacttcactgataaaacacaaaattaaagatagaattagactttcaagacagcaacagcagaaaattaaaccccaagtatgggaccctccttagcacagtgccgtatgcaactgcactggtcacacaacttgaagctggctctgcctttagattacaagaaatttgggcagggtgtggcagttcatgcctgtaatcccagcactttgggaggacaaagccagaggatagcttgaggccaggaatttgagaccagactggtcaacctagagagactctgtttctacaaaatctaaaaaaaaaattagctgggcatggtggtgcatgcctgcagtctcagctacttgggaggctgaggtgggaggatcgcttgatctcaggagtttgaggctgcagtgacacgtgattgtaccactgcactccagcctgggtgacagagcaagatcctgtctcagaaaa

SEQ ID NO: 151062 - DNA, 402 bp, Homo sapiens
  misc_feature (1)...(402): n = a,t,c or g
tttcgtggcgcggtcagggctggccttggcttcagctgcggttttggggtcccggactctgggatcggcggcgctatgagttctttcgaggggcagatggccgagtatccaactatctccatagaccgcttcgatagggagaacctgagggcccgcgcctacttcctgtcccactgccacaaagatcacatgaaaggattaagaccccctaccttgaaaagaaggttggagtgnnnnnnnnnnnnnnnnnnnnnnnnnnnnnnnnnnnnnnnnnnnnnnnnnnnnnnnnnnnnnnnnnnnnnnnnnnnnnnnnncagccagcttgaaggtttatctatactgttcacctgtgactaaggagttgttgttaacgagcccgaaatacagattttggaagaaacg

SEQ ID NO: 151063 - DNA, 686 bp, Homo sapiens
gccagggctggccttggcttcagctgcggatttggggtcccggactctgggatcggcggcgctatgagttctttcgaggggcagatggccgagtatccaactatctccatagaccgcttcgatagggagaacctgagggcccgcgcctacttcctgtcccactgccacaaagatcacatgaaaggattaagagcccctaccttgaaaagaaggctggagtgcagcttgaaggtttatctatactgatcacctgtgactaaggaggtgttgttaacgagcccgaaatacagattttggaagaaacgaattatatctattgaaatcgagactcctacccagatatctttagtggatgaagcatcaggagagaaggaagagattgttgtgactctcttaccagctggtcactgtccgggatcagttatgtttttatttcagggcaataatggaactgtcctgtacacaggagacttcagattggcgcaaggagaagctgctagaatggagcttctgcactccgggggcagagtcaaagacatccaaagtgtatatttggatactacgttctgtgatccaagattttaccaaattccaagtcgggaggagtgtttaagtggagtcttagagctggtcccgaagctggatcactcggagcccgtaccatgttgtgtggctgaactgcaaag

SEQ ID NO: 151064 - DNA, 381 bp, Homo sapiens
gcactcggcggtcgaaaggggagttcaaggagacgggggcgacgcggctgagggcttctcgtcggggtcggggctgcagccgtcatgccggggatagtggagctgcccactctagaggagctgaaagtagatgaggtgaacattagttctgctgcgcttaaagatgcctgccatgactatggagatgaatgggacaagccaaacgtggacattatgctatagtgattggaacagttacatccgagcatgggacaaggagctttgtaaccttttggcattggtgctgtcctggtctttagggataggagaccatacgtgtgatcaactgtctctcaattagcgacttcatgtgtataatgtggcatgaatcactatcctacc

SEQ ID NO: 151065 - DNA, 380 bp, Homo sapiens
aaacattctgtctgtggtagagctcgggccagctgtagttcattcgccagtgtgcttttcttaatatctaagatggtgcgtgagcagtacactacagccacagaaggcatctgcatagagaggccagagaatcagtatgtctacaaaattggcatttatggctggagaaagcgctgtctctacttggttggtcttcttttactcatgatcctcgttgtgaatataactcttacaatatggattcttaatgtgacgtgggtttcttcaaccagtactgcccctcatagggtgtaacactagaattcactgtgcgcggagacgcagttgcaactgcgattgccgaagcgtggcaggcatgtcaattttgaggtgccttatcg

SEQ ID NO: 151066 - DNA, 362 bp, Homo sapiens
caaagctcagctttctgtttagttgtgtcaatcgcaggccactctgctgagcatcttctcccaggagtaccagaaacacattaaaagaacacatgccaaacatcatacttcggaagcaattgaaagttattaccagaggtacctgaatggagtggtgaaaaatggagctgccccagtgctcctggacctggccaatgaggtggactatgcgccctcattaatggctcggcttatactggagaggtttctacaggaacacgaggaaacttcacccttcaagggtattataaatatgatgctacggtacccttctcagattccagatggagctctagcatattaggtctatcatggcaagtaag

SEQ ID NO: 151067 - DNA, 395 bp, Homo sapiens
gagtcatattacaaaaccgagggcgatgaagaagcagaggaagaacaagaagagaaccttgaagcaagtggtaagtgacttcagcatgtagtgccattcggtgtgtggaagaaagaccttccctgcctatctctgctggatggactttgctgtttgatggcctgcccttctcctcccagataattctgaaattcttttcttcctttgaacttcgcagagctaccctaggctcttatatgcagatcttactctagtgtgccctaagttttttttggacactggtagtttgacatcttttggtccctgataaatggccatgaccataggtattttttgtcatcttaagtggttcaagtgagacccttctcatccagggaagtagtggtaccatttct

SEQ ID NO: 151068 - DNA, 421 bp, Homo sapiens
gtccaagttggtcgcttccctgcgccaaagtgagcagtagccaacatgtcagggtgggagtcatattacaaaaccgagggcgatgaagaagcagaggaagaacaagaagagaaccttgaagcaagtggagactataaatattcaggaagagatagtttgatttttttggttgatgcctacaaggctatgtttgaatctcagagtgaagatgagttgacaccttttgacatgagcatccagtgtatccaaagtgtgtacatcagtaagatcataagcagtgatcgagatctcttggcttgggtgttctatggtaccgagaaagacaaaaattcagtgaattttaaaaatatttacgtcttacaggagctggataatccaaggtgcaaacgaattctaaagctttgccaagttaaagggccgg

SEQ ID NO: 151069 - DNA, 345 bp, Homo sapiens
ctgacgcgtgggcgtggccgttgaatagaggctttttcaggatgatgatggatattggggctgcaggtgttatgcaggggggggactctgtggaactgttggatatcccaatactgaagctccctgatggctcggacatcccgctccctcctattctgctcggcaggctgggcttccacccactgaagaacaccgtgtgcatttacgggcacctggatgtgcagcctgcagccctggaggacggctgggacagcgagcccttcaccctggtggagcgagacggcactctgcatgggagaggctcgactgatgattaggtcccgctggccggctggataaacgccg

SEQ ID NO: 151070 - DNA, 1257 bp, Homo sapiens; identical to SEQ ID NO: 125428

SEQ ID NO: 151071 - DNA, 895 bp, Homo sapiens; identical to SEQ ID NO: 150525
  misc_feature (1)...(895): n = a,t,c or g

SEQ ID NO: 151072 - DNA, 695 bp, Homo sapiens
gcaagggttttgccgccagaacacaggtgttgtgaaaactacccttaaaagccaaaatgggaaaggaaaagactcatatcaacattgtcgtcattggacacgtagattcgggcaagtccaccactactggccatctgatctataaatgcggtggcatcgacaaaagaaccattgaaaaatttgagaaggaggctgctgagatgggaaagggctccttcaagtatgcctgggtcttggataaactgaaagctgagcgtgaacgtggtatcaccattgatatctccttgtggaaatttgagaccagcaagtactatgtgactatcattgatgccccaggacacagagactttatcaaaaacatgattacagggacatctcaggctgactgtgctgtcctgattgttgctgctggtgttggtgaatttgaagctggtatctccaagaatgggcagacccgagagcatgcccttctggcttacacactgggtgtgaaacaactaattgtcggtgttaacaaaatggattccactggcattgccatccttacgggtgactttccatcccttgaaccaaggcatgttagcacttggctccagcatgttgtcaccattccaaccagaaattggcacaaatgctactgtgtcggggttgtagccaattttcttaatgtaagtgctgacttccttaacaatttc

SEQ ID NO: 151073 - DNA, 1841 bp, Homo sapiens
  misc_feature (1)...(1841): n = a,t,c or g
gcttttttttttttttcgcaacgggtttgccgccagaacacaggatgacgtgaaaaactaacccctaaaagccaaaatgggaaaggaaaagactcatattcaacattgtcgtcattggacacgtagataacgggcaagtccaccactacttggccatgctgatctataaatgcggtggcatcagacaaaagaaccattgaaaaatttgagaaaggaggctgctgagatgggaaagggctccttcaagtatgcctgagtcttggataaactgaaaagctgagcgtgaacgtggtatcaccattggatatctccttgtgggaaatttgaagaccagcaagtacttatgtggactatcattgattgccccagggacacagagacttttattcaaaaacatgatttacaggggacatctcaaggcttgacntggtttggggggccccctttttgggggggttntcccctgattgtttgctgctggtgtttggtggaatttgaaagctggtattcttccaagnattggggcagaccccgagagcatgcccttcttggctttacacactggggtgtggaaacaaactaaattgttcggtgttaacaaaaattggatttccacttgaggccaccctacagcccagaagaagatattgaaggaaattgttaagggaaagtcagcacttacattaaggaaaattggctacaaccccgacacaagtagcattttgtgcccaatttctggtttaaatggtgaccacatgcctggagcccaaatgcctaacttgccttnggttcaaggaatggaaaagtcacccgtaaggatggcaatgccagtggaaccacgctgcttgaggctctggactgcatcctaccaccaactcgtccaactgacaagcccttgggcctgcctctccaggatgtctacaaaattggtggtattggtactgttcctgttggccgagtggagactggtgttctcaaacccggtatggtggtcacctttggtccagtcaacgttacaacggaagtaaaatctgtcgaaatgcaccatgaagctttgggtgaagctcttcctggggacaatgtgggcttcaatgtcaagaatgtgtctgtcaaggatgttcgtcgtggcaacgttgctggtgacagcaaaaatgacccaccaatggaagcagctggcttccctgctcaggtgattatcctgaaccatccaggccaaataagcgccggctatgcccctgtattggattgccacacggctcacattgcatgcaagtttgctgagctgaaggaaaagattgatcgccgttctggtaaaaagctggaagatggccctaaattcttgaagtctggtgatgctgccattgttgatatggttcctggcaagcccatgtgtgttgagagcttctcagactatccacctttgggctgctttgctgttcgtgatatgagacagacagttgcggtgggtgtcatcaaagcagtggacaagaaggctgctggagctggcaaggtcaccaagtctgcccagaaagctcagaaggctaaatgaatattatccctaatacctgccacccaactcttaatcagtggtggaagaacggtctcagaactgtttgtttcaattggccatttaagtttagtagtaaaagactggttaatgataacaatgcatcgtaaaaccttcagaaggaaaggagaatgttttgtggaccactttggttttcttttttgcgtgtggcagttttaagttattagtttttaaaatcagtactttttaatggaaacaacttgaccaaaaatttgtcacagaattttgagacccattaaaaaagttaaatgag

SEQ ID NO: 151074 - DNA, 2446 bp, Homo sapiens
tggggcccagcaaaccaagaaagacaaggataagaaaaatgcaagcttcacataaagcctggcaagccaaggatgttcccgcattcacctgcttttgcagtaatatcgtatctctgccatgtgtgttctttagttttattttattttattttatttttttacccttcctcaaacaccaggaactaataattaactcgttttgctgaatgttgttgggtggtagaaaatgataggaacaaggggaataacccgcggaatgcttcttgtggcagctgggactctgtttccggaaagtaaatgatttgctttttatgcctgttctgaatggcagcacgaagccaggcctgttacttgtatgtcgctttggacagaggaaagttggggtaaaatgctacctgtacggtctgacatgaaaacttctcaccgcctcagcagctggaactaaaaacctggaatagccatggacaagagtttggcattttcttggatggatttcatcttccatggagtggcacaatccctggaacttcactgtcttttctccacacttgtcctaagccaaggtaggatttgtacgtggacaggactgggtgagcaagccttatattttattttttacccttgcatggacattttccattttaatcaataacattatttggcctgagcttgtgggtctggttcagactgtctcctctcaagggtttgaaactgcatctgaatgcctcccctccaaccctggccaagtaagaagaagactggtatgaagaaaactatgattaagttcacatttactggtgcatccttgatcctctcacaagatagaggtcttaaaggttggatcatgtaacattggcttagttagaagaatcttcttctaaggatgatggggcctttctaccagccctgcttaccacctaacagtaaggaatcctttccataaaaccaccacctccagtttgttccccagtgggccttagaggggaggaccctgatgactgattcccaggatacttgtacttctaataacatttttcatgaatcatgagaaaatttccacagatacttccccttaggaaaatttggttataaactcttgtatcattgggtagcacaaattttgggcgaggccttgtcaaattttaagggtgggaaataggaaggaccacaacatgacccgtaagtcaagaaggtagacatttcatatccagcttccttgcttagtctcctttcagtatttggcaataaaagaaagaagaaatagaacagctgaagtctcaaatcattgtctggaattttcctcaccttggctagctccacctgctctttgtctaaggcccttgcctcatcagggattagaactggcccatatgccagaacctgtactaaatgcctaatttgtatggaagagtgcatatttaatctcttttctatactgctcctttctgatgcttatcctttcatctgtgtgattgttttttcccctctactaacaagatcctcccagctttctctctacatgtagaaaggataacatttctcatgaacccactgcccctctgcattttcctcactggttaggagattaagtaaatagggataggaatatggctgcgtctcccctggacacacactttcttttttggaatgaggcaagtctccattttggatttcaggcaaaggatttttttctcctttttctttgtccctcaaccatacttagaggaaagaaggaatggtcttccatgaactgattatgcttaattaagcaaagtaaggaaattacttccatggaagcctaaacaaagctggaatagaaactacacactagacacagcagtagtcatagtcttcacaggtttaggagcctactggaccaacattcttgcttttgcttttggttttttaaataattctagcctgcagctaattgtgcagcaaccaaatatcagctggcttgctgctttcaaaccatggggctgaatttgctccaaggctgtgcatcagaccaaaagctttgaatatttgtgttgtatgcttgttccaaccaccgcttgtgtgagcatttttgtgggcttgtacaggaaagtacacttttaaattggtctcttgcatcactaaaaattttttaaaatgaggcataacaacggaaagggcatccagctggactttttgattcccaggattattgattggggttgacttttttgcattaaatttttcccagcaaaataaatcatatggcgagtcagggaataaaaagtcaaaagaaacaaatagaagcttttttttttaaaaaatgtattgcttctgaacttttttctgccactgctccctagccctgttttagtttgttattgctgcttttcttttttctttctgtatctatgcctttttttcacagtagtccttggctctgcacggaataaatgataccctcaaatct

SEQ ID NO: 151075 - DNA, 371 bp, Homo sapiens
caacaataacagcaacaacgaaccttggggattctgatttctgaggtgccacattatatgatttaaaatatccaggtgaatacaaaatgctataaggcatacaacaaaacacggatgtagactcatgcacagtggaaaaaagcaatcaattacaactatcacctgatgaaatgcagatgctagatttactactcagagatgacatactgactatatacctaatggtcctagaactaatgaacctacggctcatgaattgataggataacactgatgaccatctcacttccgaacctgagtagagcaatataacattaatgcagatctgaagtcttaatatcagcatagtatggaccgtatgttatctggaa

SEQ ID NO: 151076 - DNA, 355 bp, Homo sapiens
tccagagatagctgttctccagcctttctggagggatgcagagcctttccttaggacaaacaggcatttcagaaggtttgaactagctaaccagtatggcaccaggaaacctctggcatatgagaaataactttctctttggttcaagatgttggatgactcgattttcagcagaaaacatcttcaaatcagtttcatttaggctttttggtgtgaagtgtcataatacagacagtgagcctttgaaaaatgaggacctactgaaaaacttacttactatgggagtagatattgacatggcaaggaaacgacagcctggagtttttcataggatgattaccaatgagcaggacct

SEQ ID NO: 151077 - DNA, 2588 bp, Homo sapiens
agaggtagttttctatataacatctttaatgagtggcttcctgtgctaagaatggtccaggtgtgaactgctgctccctgctcctcccttcctccttcacactcctagtttaggattgatgtgtccgagctcatagggaagaaagagctgcagctggagcctgaccctcccttgaacacggagaggctggcccgtgtcactgcctctgtcacccagctatcctcgcactcaaagccatccaacctcagcaggccttctcgggccctgccacctgaataggtctgaccccagtccccactccctttcaggctgggccacagggagttgctggctggccacttgacaccctccccctgggagctgatgtctgtgactacagggagattagcacttcgtctagtgaaactcctttcatctctgtcctatgggccccaccccaccattccctctagggcccagaccatcatcatggccctggccattgatgtgtatgggctttctttccctcatgcagccccttcttccccaggctggatgttgtgggtagggaggggtgtgtgtgtgtgtatttggtttgctgtccttttttaaaggattccaagccatgtgaaacttcccttctggatgtgattctgggtcgcaagtccttatttatatgtgaggctggggaatgggctgggggtattggcagtccttttgcaaggcagtgtgtgtggtggggtgacaccgctgtggcttatcccaagacactcccagaggaaaacactgcagaaggaactggtttgcagactgtggaaggatctgcagttttgtttttgaccaaaaaaaataataataagttagctctgaagggcagagggaatacccaagcccctgatgcctatgagaagtccctggacttcaaccctcctgttgtttggccttagcccagagggagctgctcacctgagcaccctttggggtgggcagagaggcagggtgggattttagagttagtgtctgtgcgggggcagccctgagcctggagttgagactttggggtctcttagtttggaggtgttgagtgcatttgtgcccctgcctggttgagagcttcttggtacctcttgccaccccttcttcacttgccctgacccaaccccactgggaccttgatgcttgcgaggaagtggtgtcctgacggacttcagtcactcccgcctgatgtattgggatcatagggagagcacttgctctcctgcctctgccaggagagggcttgttcctccaactctaggaggccaaggcaagcatggacaggaagccaagggagcagggtcattaactttttcttctttgcaaaagtgggcacttgccatcagggtcccaatcaccagaaagcaccaaaagcccctggcaccccacccactccatcctacccagggaccccaagtaggcaactgttatggcagtgggtccagcccaggccagcactgccagcctcctctccctgcagtaggcaccagctctacctcccccggcaggcaatgtcctggcttctcagcccagcaccatctgttcccctagacttctcaggggccagcccagtctgggccaccctttgtttccctcatcctcggctcccacacaggtgacagacccagcagatagcttctctctgggaaaggttggatgctgccttacatccccttctagccctcctcccatccacacacacaggcacccacccacaccaggtcggcttgtttctccacatgtagggagagaggggagaccaacccctttgtgtcttttgaaatacgaagaaaaatgtgtgttccaggagcatgactccagtgctgcgctcttgggcctagttcagtctgtcttgtctcaaatctaggcatttttgcttcaattttattttttttaagaatacaaaaacagaaattctgcactaatttacctggtttcgtaggaaaacttttttttattttttacattttttggtgtccgtttgtattgaataatttgctacatttgtaaaatgtaagaggtatataatatatgtatatttctaacgtaaaaaacataatttttttccttttacaagattttttccttaaaaagatgagagaaacatattttttcaggaaaaacaaactttaaaaaaaaaagaggggaaataaaaccttttctcccctttccccatcctctatctatccctctttcccaggaccaaatcaaaaggtggattatcttctgaagaatggaaactgttagtccagaatgatgtctttttctcaatgcagtgagttatagattctctagttttctccctagggatgggaagggggcattgaggcaagcctggagaggagcccggggagcagggtcatgaacttttttctttagtgaaggaggaatacaatcaagggttttgtattcagaatgttgtgcaatattttggaatgggacattggtgtgtttagagattttagtttaaaaacaaaacaaaaagattgatcaaatctgtacagtttctattgttccagatttttttaagtttgtattaaaagcatgatacataataaaaaaaaaaaaaaaaa

SEQ ID NO: 151078 - DNA, 370 bp, Homo sapiens
cagcgtctggcagaaatgtcaaatgctatagagagaaaacacgccacgaaaatgacataccagcctaccaatgggactctgacctctggctatgtggctgacagacgtgtaaagcaccacagcggaggagaagaacctttccaagctcaaaagcaagagcctcatcctggaacttcacgacagtgacaaaccagagtcaacctccattctctgcctgaccctgaaatgcatgagcagacttacttcagagggatgtatagaaaactgggaggatggaaagcaggtcccgagggcacgttttacgatatacccaggtatgtaactgcttatacttttgctcatacacgacctgctgatatcagagctatga

SEQ ID NO: 151079 - DNA, 480 bp, Homo sapiens
  misc_feature (1)...(480): n = a,t,c or g
catctccttctcggcatcatggccgccctcagaccccttgtgaagcccaagatcgtcaaaaagagaaccaagaagttcatccggcaccagtcagaccgatatgtcaaaattaagcgtaactggcggaaacccagaggcattgacaacagggttcgtagaagattcaagggccagtgcgcagtgaagaaaatgagtaggcagctcatgtgcacgttttctgtttaaataaatgtaaaaactgccccnnnnnnnnnnnnnnnnnnnnnnnnnnnnnnnnnnnnnnnnnnnnnnnnnnnnnnnnnnnnnnnnncctttttaaaaatttcttgggggggcccaatttttccggggggggaaaaaaaannnnnnnnnnnnnnnggggggggttttaaaaacccccggggggttttttgaaaaaaaccctttttttnnnnnnnnnncttttgggnnnnnnnnnnnnnaaaaaatttaacggtttgg

SEQ ID NO: 151080 - DNA, 1076 bp, Homo sapiens
  misc_feature (1)...(1076): n = a,t,c or g
cgctgcctacggaggtggcagccatctccttctcgctggcgattggaaaacactctgcgacagtgttcagtccctgggcaggaaagcctccttccaggattcttcctcacctggggccacttcttccccaaaaggcatcatggccgcccttgagaccccttgtgaagcccaagttcgtcaaaaagagacccaagaagttcatccggcaccagtcagaccgatatgtcaaaattaagcgtaactggcggaaacccagaggcattgacaacagggttcgtagaagattcaagggccagatcttgatgcccaacattggttatggaagcaacaaaaaaaacaaagcacatgctgcccagtggcttccggaagttcctggtccacaacgtcaaggagcaaggagctggaagtgctgctgatgtgcaacaaatcttactgtgccgagatcgctcacaatgtttcctccaagaaccgcaaagccatcgtggaaagagcttgcccaactggccatcagagtcaccaaccccaatgccaggctgcgcagtgaagaaaatgagtaggcagctcatgtgcacgttttctgtttaaataaatgtaaaaactgcatgaaanaaaaaaggaacaaatgaaatattctgggggggtcgacggctgcgagaagacgacagaaggggttcctggtccacaacgtcaaggagctggaagtgctgctgatgtgcaacaaatcttactgtgccgagatcgctcacaatgtttcctccaagaaccgcaaagccatcgtggaaagagctgcccaactggccatcagagtcaccaaccccaatgccaggctgcgcagtgaagaaaatgagtaggcagctcatgtgcacgttttctgtttaaataaatgtaaaaactgcnnnnnnnnnnnnnggggggggccttttaagagccccaggttttactcccgggggggggcaggtttaaatttttttaagggggccccaaaatcaaattccggggccgggtttttaaaaggggggggagggaaaaacccggggggtccccaatttaaagcccttggggaaaaaaccctggcg

SEQ ID NO: 151081 - DNA, 395 bp, Homo sapiens
cccacgcgtccgggcagagcacagcatagtcgggaccagactcgtgtcaggccagttgcagccttctcagccaagcgccgaccatggaaaactcactaccatgagaattgcagggatttgcttttgcctcctaggcatcacctgtgccataccagataaacaggctgattctggaagttctgaggaaaagcacaatgctgagtcctctgaagaaaccaatgactttatacaagagacccttccaagtaagtccaacgaaagccatgaccacatggatgatatggatgatgaagatgatgatgaccatgtggacagccaggactccattgactcgaacgactctgatgatgtagatgacactgatgatgctcaccagtctgatgaggctcaccatg

SEQ ID NO: 151082 - DNA, 1491 bp, Homo sapiens
actgattgccgggtcgacccacgcgtgcgcccacgcgtccgggtagagcacagcatcgtcgggaccagactcgtctcatgccagttgcagccttctcagccaaacgccgaccaaggaaaactcactaccatgagaattgcagtgatttgcttttgcctcctaggcatcacctgtgccataccagttaaacaggctgaatcctggaagttctgaagaaaagcagctttacaacaaatacccagatgcttgtggccacatggctaaaccctgacccatctcagtaaggcagaatctcctaggccccacaggaccctttccaagtaaggtccaacggaaaggccatggaccacatgggatgatatgggatggatggaaggttgatgatgacccatgtgggacagccaggactccattggactcggaacgactctggatgatgtagatgacactgatggattctcaccagtctgatgagtctcaccattctgatgaatctgatgaactggtccctggattttcccacggacctgccagcaaccgaagttttcactccagttgtccccacagtagacacatatgatggccgaggtgatagtgtggtttatggactgaggtcaaaatctaagaagtttcgcagacctgacatccagtaccctgatgctacagacgaggacatcacctcacacatggaaagcgaggagttgaatggtgcatacaaggccatccccgttgcccaggacctgaacgcgccttctgattgggacagccgtgggaaggacagttatgaaacgagtcagctggatgaccagagtgctgaaacccacagccacaagcagtccagattatataagcggaaagccaatgatgagagcaatgagcattccgatgtgattgatagtcaggaactttccaaagtcagccgtgaattccacagccatgaatttcacagccatgaagatatgctggttgtagaccccaaaagtaaggaagaagataaacacctgaaatttcgtatttctcatgaattagatagtgcatcttctgaggtcaattaaaaggagaaaaaatacaatttctcactttgcatttagtcaaaagaaaaaatgctttatagcaaaatgaaagagaacatgaaatgcttctttctcagtttattggttgaatgtgtatctatttgagtctggaaataactaatgtgtttgataattagtttagtttgtggcttcatggaaactccctgtaaactaaaagcttcagggttatgtctatgttcattctatagaagaaatgcaaactatcactgtattttaatatttgttattctctcatgaatagaaatttatgtagaagcaaacaaaatacttttacccacttaaaaagagaatataacattttatgtcactataatcttttgttttttaagttagtgtatattttgttgtgattatctttttgtggtgtgaataaatcttttatcttgaatgtaataag

SEQ ID NO: 151083 - DNA, 1539 bp, Homo sapiens
cccgggccgacccacgcgtccgcccacgcgtccgggaggaggcagagcacagcatcggctgtaccagactctgtctcaggccagttgcagccttctcagccaaacgccgaccagaggaaaactcactaccatgagaattgcagtgatttgcttttgcctcctaggcatcacctgtgccataccatttaaacaggctgattctggaagttctgaggaaaagcattttttacaacaaatacccagatgctgtggccacatggctaaaaccctgacccatcttcagaaggcagaatctcctaggccccacagaatggctgtgtcctctgaaggaaaccaatggactttaaacaaggaggaccctttccaagttaaggtccaacggaaaggccatggaccacatgggatgatatgggatgatggaaggtggatggatggaccatgtgggacagccaggactccattgactccgaaccgactctgatgatgtagatgacactggatgattctcaccagtctgatgagtctcaccattctggatgaatctgatgaactggtcactggattttccacggacctgccagcaaccgaagttttcactccagttgtccccacagtagacacatatgatggccgaggtgatagtgtggtttatggactgaggtcaaaatctaaggaagtttcgcagacctgacatcaagtaccctgatgctacagacgaggacatcacctcacacatggaaagcgaggagttgaatggtgcatacaaggccatccccgttgcccaggacctgaacgcgccttctgattgggacagccgtgggaaggacagttatgaaacgagtcagctggatgaccagagtgctgaaacccacagccacaagcagtccagattatataagcggaaagccaatgatgagagcaatgagcattccgatgtgattgatagtcaggaactttccaaagtcagccgtgaattccacagccatgaatttcacagccatgaagatatgctggttgtagaccccaaaagtaaggaagaagataaacacctgaaatttcgtatttctcatgaattagatagtgcatcttctgaggtcaattaaaaggagaaaaaatacaatttctcactttgcatttagtcaaaagaaaaaatgctttatagcaaaatgaaagagaacatgaaatgcttctttctcagtttattggttgaatgtgtatctatttgagtctggaaataactaatgtgtttgataattagtttagtttgtggcttcatggaaactccctgtaaactaaaagcttcagggttatgtctatgttcattctatagaagaaatgcaaactatcactgtattttaatatttgttattctctcatgaatagaaatttatgtagaagcaaacaaaatacttttacccacttaaaaagagaatataacattttatgtcactataatcttttgttttttaagttagtgtatattttgttgtgattatctttttgtggtgtgaataaatcttttatcttgaatgtaataag

SEQ ID NO: 151084 - DNA, 382 bp, Homo sapiens
  misc_feature (1)...(382): n = a,t,c or g
cgaccataaatcccaaactcttgaaaaaccacgccaggggcaccccagaagtcccgaatcaaaaacaccactggtctcccaaacaaaaaccccttttaactaaaaaccccaaaaataacttacccaggtggcctgtgcccataatccccccttttccagaggaaaaaccccgaaaatttccttaaaccccgaaaaggagaatcccctaaaccaaaattgggcccctgccctccaacccggggtaccccaccaaacccccttttnnnnnnnnnnnnnnnnnnnnnnnnnnnnnnnnnnnnnnnnnnnnnnnnnnnnnnnnnnnnnnnnnnnnnnnnnnnnnnnnnnnnnnnnnnnnnnnnnnnnnnnnnnnnnnntatgaata

SEQ ID NO: 151085 - DNA, 466 bp, Homo sapiens
  misc_feature (1)...(466): n = a,t,c or g
gagtgtagnnnaaatcgatatcgttgacaatgcggnggaannctgagaaactggcaagggaaangaccgnntgcagaggcactatgtgatgtattatgaaatgtcatatggattaaacattgaaatgcacaaacagactgaaatcgccaagagattgaatacgatttgtgcacaagtcatcccatttctgtctcaggaacagcagcagttgcaagctcagcatctttctcatggccacggacccccagttccccttacgcctcacccttcgggacttcagcctcctggaatcccgcccctcgggggcagtgccggccttcttgcgctgtctagtgctctgagtgggcagtctcacttggcaataaaagatgacaagaagcaccacgatgcagagcaccacagaggtgagaggccgggcaagccagattaggactttgtcctcatactcttacagtgctgcaaagtc

SEQ ID NO: 151086 - DNA, 651 bp, Homo sapiens
tctgtccagagtgctggaattcgaggaattccagttcctgcaggcgcagtatcacagccttaaattggaatgtgagatactggctagtgaaaagacagaaatgcacaggcactatgtgatgtattatgaaatgtcatatggattaaacattgaaatgcacaaacagactgaaatcgccaagagattgaatacgatttgtgcacaagtcatcccatttctgtctcaggaacatcaacaacaggtggcccaggctgttgaacgtgccatacaggtgaccatggcagagttgaatgccatcatcggggtacgtggcctaccaggtctacctcctacacagcagcagttgcaagctcagcatctttctcatggccacggacccccagttccccttacgccttacccttcgggacttcagcctcctgggaatcccgcccctcgggggcaagtgccggccttcttgcgctgaccaagtgctcttgatgggcaatctcacttggcaattaaagatgacaagaagcaccacgatgcatagcaccacagaggtgataggccgggcaagccagattaggactttgtcctcatactcttacagtgctgcaaagttgtgtgcatcgctaaagagagccccaacctatacagagagcaaacaat

SEQ ID NO: 151087 - DNA, 1566 bp, Homo sapiens
tgggaattgcaatacttcctcacagtactgagatggattgatggaataagggggcataagtgcctgggtggtgcatgagacacccacccagattactgggtcttcctttccaaattctattccttagtgatagtattttggttttgtctcatcatactactgtggtaagtcaatgcaagggtgtagggtgaaatggagttacctggtgacaggttgagagtatggctactatattgtgggatgcatccccacccccattttaatccctctgaaaacagcgtgagtctgaaaatctgtggcatcttagattgagtgacatgctggatctcatccctggaggcgcataaagacagaactagctcatgtttacttactgatgtagccagccttgcttaataataaacagctcccctctcggagtgagtgataccagaaagtgacagtgtagatgtgaggattatattttgggaaggtgggagaggtaattgagcaggtgaaagcttttgatgaactgaaagcactaatcgcattttttcccctttcctccctctctttcttggctccttttgtgtgtttgttgaacctcctgttctgtttccgccttcccctcctgtcatgtctgttttcccctggatgccgcctccatcgccatcactgtcaccactacctcctcctcctcctcctttttctctctcaccaccaccaccaacagcagcagcagttgcaagctcagcatctttctcatggccacggacccccagttccccttacgcctcacccttcgggacttcagcctcctggaatcccgcccctcgggggcagtgccggccttcttgcgctgtctagtgctctgagtgggcagtctcacttggcaataaaagatgacaagaagcaccacgatgcagagcaccacagaggtgagaggccgggcaagccagattaggactttgtcctcatactcttacagtgctgcaaagttgtgtgcatcgctaaagagagccccaacctatacagagagcaaacaatgagataagaggaactgtcgcaaagctttccactgaaacacaggtcaccctgggaagtttgcagggtttgctgtgggccatctgtagatttctcgatctcgttagattgcaggcatcctgacatcttgggcaactgcctagttaatgccagtggcctgtaccatattatgggaaaactgttaactgcttaattggggtaatttttccaaagaaagtaatgttgttaaatgggggcgaattaaggagtttaattttggaaagtggatgtgtttccaattgaaaggtttgataattgcatctgttactacttagtttcataggctttaattctagtatgcattaaatattgggcaaaattgcacttgactaattttttgaagaaaagtaatttattctgtcaagaaataaaaaaataggctttgtgtatggttaaactgtaaatcttatgtttacaaaatactgtaattttcaggaaatcactgtattaggaatgtgcaatgacttatataaataaaagccatttttaaaactgaaaaaaaaa

SEQ ID NO: 151088 - DNA, 425 bp, Homo sapiens
  misc_feature (1)...(425): n = a,t,c or g
tttcgcgcgaaataaaaataataataaagaaaaaagaagaacatctaaataaatagggctcaggagagtactcaggtatgaaaagaggaaacatgttatatcagtcatataaaattccagaaaattgacattaatctactgttaagcaaatattgtaattcagtgattgtctggagcatggagaggccagagagaaagatagnnnnnnnnnnnnnnnnnnnnnnnnnnnnnnnnnnnnnnnnnnnnnnnnnnnnnnnnnnnnnnnnnnnnnnnnnnnnnnnnnnnnnnnnnnnnnnnnnnnnnnnnnnnnnnnnnnnnnnnnnnnnnnnntcttattacagctttaaaaatttaatttgaaagaactatcttgatttaaccattatttttgacaaataggttatgtgaatttacattgactctcc

SEQ ID NO: 151089 - DNA, 800 bp, Homo sapiens
  misc_feature (1)...(800): n = a,t,c or g
aatgatcttcctgctcataagtatttggtatcacancaggctattgccccccttagggcgtgatgagagttaggagagtcaatgtaaaatcacataacctatttgtcaaaaataatgttaaatccagatagttctttcaaattaaatttttaaagctgtaataagactgggcatggtgactcatgcctgttatccccaacactttgggagtccagggtggggagtattgcttgaggtaagaagtttgagactagcctgggtcccatagtaagaccctgtctcttaaaaaataaatactatctttctctctggcctctccatccctccagacaatcactgaattacaatatttgcttaacagtagattaatgtcaattttctggaattttatatgactgatataacatgtttcctcttttcatacctgagtactctcatgagccctatttatttagatgttcttcttttatctttactattatttttatttcacatagcaggaatgcatattttgacattcatcaatcatgatatatgagtagttcattctttttatcttagaatatgacatgctatggaaatcactgtatacgaattcatatgtttacggatacgttatccattcaaagccagtaagatcttctcaatgtataacgctacagtacttttccacatttagtgcgacaggtaattgggatcctgaattggtatcctcgagagatctgttggggtatgttctgttatggtatgtatagtcatatacatacgatacgttatatcatcgtccgtcgatgcgccac

SEQ ID NO: 151090 - DNA, 258 bp, Homo sapiens; identical to SEQ ID NO: 130220
  misc_feature (1)...(258): n = a,t,c or g

SEQ ID NO: 151091 - DNA, 431 bp, Homo sapiens; identical to SEQ ID NO: 130221

SEQ ID NO: 151092 - DNA, 838 bp, Homo sapiens
  misc_feature (1)...(838): n = a,t,c or g
aatccctcaataagtgccagatatttccttcaaaacctgtctcaagagaagaccaatgttcatataaatggtggcagaaataccagaagagaaagtttcattgtgcaaatctaacttcatggcctcgctggctgtattccttatatgatgctgagaccttaatggacagaatcaagaaacagctacgtgaatgggatgaaaatctaaaagatgattctcttccttcaaaatccaatagatttttcttacagagtagctgcttgtcttcctattgatgatgtattgagaattcagctccttaaaattggcagtgctatccagcgacttcgctgtgaattagacattatgaataaatgtacttccctttgctgtaaacaaatgtcaagaaacagaaataacaacccaaaaatggaaatattcagttttatcccttatgtggggccgatgggaggcttatgtggaatcctcatggatatgtgcatgagacacttactgtgtataaggcttgccaacttgaatctgataggccggccttctacagaacacagctggtttcctgggtatgcctggactgttgcccagtgtaagatctgtgcaagcccatattgggatgggaagtttacggccaccaaaaaagacatgtcacctcaaaaattttggggcttaacgcgatctgctctggtgcccacgatcccagacactgaagatgaaataagtccagacaaagtaatactttggcctggaaacagatgtgatagagataaggtagttanctacaaatgggtanatccaagatctgccttgggaattatgccccggaacaaccnaagtaacatac

SEQ ID NO: 151093 - DNA, 3462 bp, Homo sapiens; identical to SEQ ID NO: 130223

SEQ ID NO: 151094 - DNA, 1159 bp, Homo sapiens; identical to SEQ ID NO: 130224

SEQ ID NO: 151095 - DNA, 905 bp, Homo sapiens
ggcacgagaccagaactgggttctgacaggtgggagccagcagctcctgaaggctgggggcagagggttttgaggggacccaggttagtggggcattggcctagccctgggccgtgggtatcactcagtgtcttgcagtaggtgttgatactttcgaagccacattgtttcttgggttcttacacatgtttatatcacgttggtataccgatcaccctttccaatgaccatatttattgccaattttttcttttaaatattttcaattttcaaagtgtgtagtgcgtgcattgttttaaaaagtttggtagtactttttggccgtttggatatttaactccgtttctttttttttgaagacggagtcttgctttgtcgcccagtccggagtgcagtgacgtgatctcagctcactgcaagctctgcctccctgggttcacaccattctcttgcctcagcctcctgagtagctgggactacaggtgcccgccaccacgcctggctaattttttttttgtatttttagtagagacggggtttcaccgtgttagccaggatggtcttgatctcctcacctcatgatctgcccgcctcagcctcccaaagtgctgggattacaggtgtgagccaccgcgcccggcctagaggaaggttattagccccatcttatatttgcagaaacagagggttagagggttgaggttactcagctaaaaaaatgatggagccaggtttccaacatccagagcctgtgttcttattttttatttttattgaaaagataatacagtacaaaagagtacatattaaaaggtaaggctctgttctactccagactcctagctgtttcccttctcagaggacatcattcatatgaagacattttctaagtgtttacaagcaca

SEQ ID NO: 151096 - DNA, 324 bp, Homo sapiens
  misc_feature (1)...(324): n = a,t,c or g
cggacgcgtgggactagttctagatcgcgagcggccacccnnnnnnnnnnnnncccttttaaaaaaggggggttttttaatggaaacctcccaaccacctttggaaaacttgggaacaaaaaatttccattaaaccttttcccgggggggccccctttgccccatgggggccttaaaaaaggcccgggggcccctcaggttccccccctttttttaaaaaaaccccaaacttcacccccttagggcctaagggagggcccccccccgctcaaaaaattttaccttttttaaaaaccctcttgggaaacccagggaaaaggtttg

SEQ ID NO: 151097 - DNA, 385 bp, Homo sapiens
ggcacgaggagaacccaccatggagctgtctcatgccgacacgaccaacgtcaaggccgcctggggttgggtcggtgcgcacgctggcgagtaaggcgcggatgtcctggttaggatggttctgtgcttgcctaccatctggacctacttcccgtacttcgacctgagccacggctgtgcccaggttaacggccacggcaagaaggtggccgacgcgctgaccaacgccgtggtgcacgtggacgacatgcccaactcgctgatcggcctgagcgagctgcatgcgcactaacttctggtggacccggtcaacttcaagctcctaaaccactgcctgcttgggaccctggccgaccacctgcttgacgagttcacacctgcggtg

SEQ ID NO: 151098 - DNA, 896 bp, Homo sapiens
ccctttgttttgggcacattgtctcacctgttttcactttgttacaaaaggaaacaaaacccaaacctccggctccagagtggtccatagtgaagaacactgaagatttgccataatgtttttcctactttccccatcccatcctagaccctgaaatcctaaataaatatttcagttaaaactttttttcccatttgcatgaagtctgggtcactatatctcctaccctgaatgggggaagatgggacagctatatctcatactgaagcggtggcagctaaaacctggcaactgctgccagtgtccccaatgtgtcttgcttattattttttaaaatgtgacaaagacaaaagctacagctggaaactcacacaatttagaaatatgttgaaaacttttattatagtccttaggatttccaagtaaatgctcccaaatcaagtattacaaagctgctaattaattagcaactgaaaattagccattcaaattatattggaaatatttgctgaattgtttttatgaaagcttcctcttggattctgtaaggatcagagtatctgaatccacaaaccagctagtttcaagaaagaattcttttgactaaaaacttaccttaaaaccaattttcccaactcttttccttttcccaaatagtccaacgttttgaggagaaatatatgaggcaggttgttttacacggcactgtaccctttaggaaacctaacatttcagtgaactgggaaacttcacaacataaactctatgtatttatagatattatgactgctgtataatatatactgtggggaaaaaaaaagagaagaaagaaaagactagcctgggcaacatggcgaaaccccatctctacaaaaaatacaaaaattagctgggta

SEQ ID NO: 151099 - DNA, 786 bp, Homo sapiens
tccgcccacgcgtccgcccacgcgtccggaaaggaatccgattggttctgtgtctgtctcttttggtattctcagaattatgtagtcattcatatagaaagatgattaggaaaataggacaagaatagcagaaatctacataaaaatgtaggaaattaaaattagttaccagcatacaaaaagcttctgtatgttataattacatactataactcacccctccttggcaaatattctctctcttttgacttcaaaatcatggcttatatgtactttctctatttcccagatgcaaatataattaattgactttatttatctaggaaatgttactcatatcttaattgtagtcattggcttgagtgacgggttttggtaattcaactactattacttgaaagtagtagatttcataagatactgttataaaatctttttaacctcttttctgatttcaagagtaattagtaattgtggtttactggaaaattcaatgaatagcgtgttaaaagaagcaattcgttaataatatatctaatctattgggagactgaggcgggtgggtcacctgagatcaggagttcgagaccagcctggccagcatggcggaactccgtctctactaaaaatacaaaaattcgccgggcatggtggtgcattcctgtattcccaggtactcggaaggctgaggcaggagaatcgcctgaactccagaggtggaggttgcagtgagtcaggatcgcagcactacactccagcctgggtgacagagtgagactccatctc

SEQ ID NO: 151100 - DNA, 637 bp, Homo sapiens; identical to SEQ ID NO: 144817
  misc_feature (1)...(637): n = a,t,c or g

SEQ ID NO: 151101 - DNA, 769 bp, Homo sapiens
  misc_feature (1)...(769): n = a,t,c or g
gggctctttnnnnnnnnnntccccccgcttttgaaaaccccggcccaaggcccaatataaatttaccccccctaaaaggggaaaaaggtgcggcccgctaaataaaaaatccgggggnnnnnnnannatnnnnntttggtgatctcttagcagaaatagatttattatttgtaattgcttgcaagaataaagccatatccttgaaaagctctgcattcatgggcaattgagcttcagtggtatcctggaggaccagggcaatggcccactcccagtcacccatctttctgccccaggaagcctgcaaccttcaggggtgaattcttttgccgaaaatgggattgccaaaaacgggtcaccagcaacatttcccccaggagcttgaaagttcctccaggatcccacatgcaggcttgtcacaggtgcaggttcacttcaggcttgggcaaaggtgccccttgagatcatcccaggtgcttttatggcatctcccaaggaaagtcagcaccttcttgccatgtgccttgactttgggggttgcccatggatggcagaggcagaggacaggttgccaaagctgtcaaagaacctctgggtccatgggtagacaaccaggagccttcccagggtttctcctccagcatctttccacattcaccttgccccacaggctttgtgatagtagccttgtcctcctctgtgaaatgacccatgggcgtctggactaggagcttattgataacctcagacgttccaaaaagcgagtgtc

SEQ ID NO: 151102 - DNA, 1257 bp, Homo sapiens; identical to SEQ ID NO: 125428

SEQ ID NO: 151103 - DNA, 924 bp, Homo sapiens; identical to SEQ ID NO: 133213

SEQ ID NO: 151104 - DNA, 1895 bp, Homo sapiens
tcatttagccttctgagctttctgggcagacttggtgaccttgccagctccagcagccttctgatccactgccttgatgacacccacagcaactgtctgtctcatatcacaaacaccaaagtgacccagaggaggatagtctgagaagctctcaatacacatgaggttgccaggaaccatatcaatgatggcagcatcaccggacttcaagaatttagagccatcttccagcttcttaccagaacggtgatcaatcttttccttcagtacagcaaacttgcatgcagtgtgagccatgtggcaatccagtacaggagtatagccagcactgatttggcctggatggttcaggatgatcacctgagcagtgatgccggctgctttcattggtgggccatttttgctgtcaccagcaatgttgccacaacgaacatccttgacagacacattcttgatattgaagccctcattgttcccaggaataaagtttatttcagttgtaacatcgactgcagcaaaggagaccaccataccgggtttgagaacaccagtcttcacttgaccaccaagtacagtaccaatgccaccaattttgtggacatcctggagaggcaggcgcaagggcttgtcagttggaccagatggtggtaggatgtagtccagagcctcaagcagcgtggttccactggcattgccatctttacaggtgactttccatcccttgaacgaaggcacgttagcagttgcctccagcatgttgtcatcattccaaccagaaattggcacaaatgctactgtgttggggttgtagccaattttcttaatgtaagtgctgacttccttaacgatttcctcatatctcttctggctgcagggtggctcagtggaaccacgctgcttgaggctctggactgcatcctaccaccaactcgtccaactgacaagcccttgggcctgcctctccaggatgtctacaaaattggtggtattggtactgttcctgttggccgagtggagactggtgttctcaaacccggtatggtggtcacctttggtccagtcaacgttacaacggaagtaaaatctgtcgaaatgcaccatgaagctttgggtgaagctcttcctggggacaatgtgggcttcaatgtcaagaatgtgtctgtcaaggatgttcgtcgtggcaacgttgctggtgacagcaaaaatgacccaccaatggaagcagctggcttccctgctcaggtgattatcctgaaccatccaggccaaataagcgccggctatgcccctgtattggattgccacacggctcacattgcatgcaagtttgctgagctgaaggaaaagattgatcgccgttctggtaaaaagctggaagatggccctaaattcttgaagtctggtgatgctgccattgttgatatggttcctggcaagcccatgtgtgttgagagcttctcagactatccacctttgggctgctttgctgttcgtgatatgagacagacagttgcggtgggtgtcatcaaagcagtggacaagaaggctgctggagctggcaaggtcaccaagtctgcccagaaagctcagaaggctaaatgaatattatccctaatacctgccaccccactcttaatcagtggtggaagaacggtctcagaactgtttgtttcaattggccatttaagtttagtagtaaaagactggttaatgataacaatgcatcgtaaaacctttcagaaggaaaggagaatgttttgtggaccactttggttttcttttttgcgtgtggcagttttaagttattagtttttaaaatcagtactttttaatggaaacaacttgacccccaaatttgtcacagaattttgggacccattaaaaggttaactggg

SEQ ID NO: 151105 - DNA, 1338 bp, Homo sapiens
atgtctgctgaagtcatccatcaggttgaagaagcacttgatacagatgagaaggagatgctgctctttttgtgccgggatgttgctatagatgtggttccacctaatgtcagggaccttctggatattttacgggaaagaggtaagctgtctgtcggggacttggctgaactgctctacagagtgaggcgatttgacctgctcaaacgtatcttgaagatggacagaaaagctgtggagacccacctgctcaggaaccctcaccttgtttcggactatagagtgctgatggcagagattggtgaggatttggataaatctgatgtgtcctcattaattttcctcatgaaggattacatgggccgaggcaagataagcaaggagaagagtttcttggaccttgtggttgagttggagaaactaaatctggttgccccagatcaactggatttattagaaaaatgcctaaagaacatccacagaatagacctgaagacaaaaatccagaagtacaagcagtctgttcaaggagcagggacaagttacaggaatgttctccaagcagcaatccaaaagagtctcaaggatccttcaaataacttcaggagcatacctgaagagagatacaagatgaagagcaagcccctaggaatctgcctgataatcgattgcattggcaatgagacagagcttcttcgagacaccttcacttccctgggctatgaagtccagaaattcttgcatctcagtatgcatggtatatcccagattcttggccaatttgcctgtatgcccgagcaccgagactacgacagctttgtgtgtgtcctggtgagccgaggaggctcccagagtgtgtatggtgtggatcagactcactcagggctccccctgcatcacatcaggaggatgttcatgggagattcatgcccttatctagcagggaagccaaagatgttttttattcagaactatgtggtgtcagagggccagctggaggacagcagcctcttggaggtggatgggccagcgatgaagaatgtggaattcaaggctcagaagcgagggctgtgcacagttcaccgagaagctgacttcttctggagcctgtgtactgcggacatgtccctgctggagcagtctcacagctcaccgtccctgtacctgcagtgcctctcccagaaactgagacaagaaagaaaacgcccactcctggatcttcacattgaactcaatggctacatgtatgattggaacagcagagtttctgccaaggagaaatattatgtttggctgcagcacactctgagaaagaaacttatcctctcctacacataa

SEQ ID NO: 151106 - DNA, 1057 bp, Homo sapiens
atgtctgctgaagtcatccatcaggttgaagaagcacttgatacagatgagaaggagatgctgctctttttgtgccgggatgttgctatagatgtggttccacctaatgtcagggaccttctggatattttacgggaaagaggtaagctgtctgtcggggacttggctgaactgctctacagagtgaggcgatttgacctgctcaaacgtatcttgaagatggacagaaaagctgtggagacccacctgctcaggaaccctcaccttgtttcggactatagagtgctgatggcagagattggtgaggatttggataaatctgatgtgtcctcattaattttcctcatgaaggattacatgggccgaggcaagataagcaaggagaagagtttcttggaccttgtggttgagttggagaaactaaatctggttgccccagatcaactggatttattagaaaaatgcctaaagaacatccacagaatagacctgaagacaaaaatccagaagtacaagcagtctgttcaaggagcagggacaagttacaggaatgttctccaagcagcaatccaaaagagtctcaaggatccttcaaataacttcaggagcatacctgaagagagatacaagatgaagagcaagcccctaggaatctgcctgataatcgattgcattggcaatgagacagaactatgtggtgtcagagggccagctggaggacagcagcctcttggaggtggatgggccagcgatgaagaatgtggaattcaaggctcagaagcgagggctgtgcacagttcaccgagaagctgacttcttctggagcctgtgtactgcggacatgtccctgctggagcagtctcacagctcaccgtccctgtacctgcagtgcctctcccagaaactgagacaagaaagaaaacgcccactcctggatcttcacattgaactcaatggctacatgtatgattggaacagcagagtttctgccaaggagaaatattatgtttggctgcagcacactctgagaaagaaacttatcctctcctacacataa

SEQ ID NO: 151107 - DNA, 1124 bp, Homo sapiens
ttaagcaatactgcccttggacccaggcactgggggtcctgttgtgggccctgatttagaagggccttgctccggctcttcttgggctgtgcccttccacagtgagtgccggctattggacttttgtccagtgacagctgagacaacaaggaccacgggaggaggtgtaggagagaagcgccggacacagcgatcgcccagcaccaagtccgcttccaggctttcggtttctttgcctccatcttgggtgcgccttcccggcgtctgactcagttttgtaggttccttatctcggttgtttaccgcgggctttgcggaatgcccccgcttccgtttccgcccggctccgaacccccgaaccccttctacccgcaactccgccccggattcccagaaaggggcgacctgggccacagcggtacaagctgcaccccgatggacctgagagaccggaagtaacccttggccaactctggccgccccctgcagccgcagccccagaggcccacccgcgagcttcagtggcgggccctcagcgtcgtgtaaactttgcttaaaatgatcttgagagttcaattcttggggtgaactgttgagaagatctggcatttttcctttcgaaagttgttgggaacgtggactttcccaacaattgtgtatgcgctcgatctcactcagtgggagccgccgccctgttgatgcttttgactttctgtccttgttcctcgtcccatctggagcatttccaattctggttttgcggagcagcaggtctgagcttgtccggcgagggtgggagttggtcccggcggagatccagtgggaagagccggcggctgcccgggcgtgagtagaccgagaatcctgcccgatccccgcccctgggctggtgtcgccctgggctcctgggacgtcggggcactgtcccccgatactggcagaaaaggattgagtcctcgcttttggccctaggtctccttgagcctccagaggactcacaacactccggggcatgttgctctttcaaataccaggaatggactctggggaatggggcacccttgaagtctgattatttcttccctgtagagccccaggggctaattaaactcgtgtttatggaa

SEQ ID NO: 151108 - DNA, 1197 bp, Homo sapiens
tttacattctgatgaattctgaaaaagaatgtggggtttccttgcagatgagttcatctgttggttcatttcctttacaatgtaggttttcttctctgtctttttggattagtctgtttttggttctgtctaccaaggatccctttctttagacttctatagatccctttctatagaacttaatctacttaagtcagggagaccacccagaaggaaagagcccatactttcaatcttaggcataagttagcttgataagattttcagaaaaattcccttttaaccacagaactcccccactggaaaggattctgaaagaaatgaagtcagccctcaaaaatgaagttgactgcctgctggctttctgttgactggcccggagctgtactgcaagacccttgtgagcttccctagtctaagagtaggatgtctgctgaagtcatccatcaggttgaagaagcacttgatacagatgagaaggagatgctgctcttttttgtgccgggatgtttgctatagatgtggttccacctaatgtcagggaccttctggatattttaacggaaagaggtaagctgtctgtcggggacttggctgaactgctctacagagtgaggcgatttgacctgctcaaacgtatcttgaagatggacagaaaagctgtggagacccacctgctcaggaaccctcaccttgtttcggactatagagtgctgatggcagagattggtgaggatttggataaatctgatgtgtcctcattaattttcctcatgaaggattacatgggccgaggcaagataagcaaggagaagagtttcttggaccttgtggttgagttggagaaactaaatctggttgccccagatcaactggatttattagaaaaatgcctaaagaacatccacagaatagacctgaagacaaaaatccagaagtacaagcagtctgttcaaggagcagggacaagttacaggaatgttctccaagcagcaatccaaaagagtctcaaggatccttcaaataacttcaggatgataacaccctatgcccattgtcctgatctgaaaattcttggaaattgttccatgtgattaacatggaactgcctctacttaatcattctgaatgattaaatcgtttcattttctaaatgtgtaaaaaaaaaaaaaaaaaaaaaaactcgagggggggccc

SEQ ID NO: 151109 - DNA, 2009 bp, Homo sapiens
gcagcggctgtccccactcagtcctggtggggtcgcacgtaactgtcctgagctatgcataagccgtttgaccacgcatggagaattttaccacccagagacacgcgagtggccctgtgcaagtttcaactgcgcggggggcggggaattccgcagacaggattctagaatttatgtcttgtgtgctaacatttcagccggtgggtggcggggattaggcgtgaagcggttcagcaggcagaggttctcggacgccctccggcgaagccacctgttgatgcttttgactttctgtccttgttcctcgtcccatctggagcatttccaattctggttttgcggagcagcaggtctgagcttgtccggcgagggtgggagttggtcccggcggagatccagtgggaagagccggcggctgcccgggcaactcccccactggaaaggattctgaaagaaatgaagtcagccctcagaaatgaagttgactgcctgctggctttctgttgactggcccggagctgtactgcaagacccttgtgagcttccctagtctaagagtaggatgtctgctgaagtcatccatcaggttgaagaagcacttgatacagatgagaaggagatgctgctctttttgtgccgggatgttgctatagatgtggttccacctaatgtcagggaccttctggatatttttacggtgaaagaggtgtgctgtctgtcggggacttggctgaactgctctacagagtgaggcgatttgacctgctcaaacgtatcttgaagatggacagaaaagctgtggagacccacctgctcaggaaccctcaccttgtttcggactatagagtgctgatggcagagattggtgaggatttggataaatctgatgtgtcctcattaattttcctcatgaaggattacatgggccgaggcaagataagcaaggagaagagtttcttggaccttgtggttgagttggagaaactaaatctggttgccccagatcaactggatttattagaaaaatgcctaaagaacatccacagaatagacctgaagacaaaaatccagaagtacaagcagtctgttcaaggagcagggacaagttacaggaatgttctccaagcagcaatccaaaagagtctcaaggatccttcaaataacttcaggctccataatgggagaagtaaagaacaaagacttaaggaacagcttggcgctcaacaagaaccagtgaagaaatccattcaggaatcagaagcttttttgcctcagagcatacctgaagagagatacaagatgaagagcaagcccctaggaatctgcctgataatcgattgcattggcaatgagacagagcttcttcgagacaccttcacttccctgggctatgaagtccagaaattcttgcatctcagtatgcatggtatatcccagattcttggccaatttgcctgtatgcccgagcaccgagactacgacagctttgtgtgtgtcctggtgagccgaggaggctcccagagtgtgtatggtgtggatcagactcactcagggctccccctgcatcacatcaggaggatgttcatgggagattcatgcccttatctagcagggaagccaaagatgttttttattcagaactatgtggtgtcagagggcccagctggagaacagcagcctcttggagggtggatgggccagcgatgaagaatgtggaattcaaggctcagaagcgagggctgtgcacagttcaccgagaagctgacttcttctggagcctgtgtactgcggacatgtccctgctggagcagtctcacagctcaccgtccctgtacctgcagtgcctctcccagaaactgagacaagaaagaaaacgcccactcctggatcttcacattgaactcaatggctacatgtatgattggaacagcagagtttctgccaaggagaaatattatgtctggctgcagcacactctgagaaagaaacttatcctctcctacacataa

SEQ ID NO: 151110 - DNA, 383 bp, Homo sapiens; identical to SEQ ID NO: 144967

SEQ ID NO: 151111 - DNA, 2316 bp, Homo sapiens; identical to SEQ ID NO: 123560

SEQ ID NO: 151112 - DNA, 1750 bp, Homo sapiens; identical to SEQ ID NO: 144969

SEQ ID NO: 151113 - DNA, 437 bp, Homo sapiens
tttgattttgaaaaatacatgcatttaatattttctgattacaaaagtatatgtgttcattagaaaaaatttaagtacagaatgaataagtaaaattctagaaagtcttagttcacaatacagagataatttaactgccttaaaataattgtgttcacctctatttaatttttatgcacacgtattacaaacaagcttccttttgacacagctgggaccatccttatatagttagttttaaaaatcttgctttttctgtttaatcagatgttatgattctctccctttgcccttattgttgaacaatttttttttcttgggaacggaatcttgctctgtcgcccaggctggagtgcggtggcttaatctcagctcaagtgcaacctctggcctcccgggttcaatcaattctcctgcctcagcctcctgagcagctg

SEQ ID NO: 151114 - DNA, 1257 bp, Homo sapiens; identical to SEQ ID NO: 125428

SEQ ID NO: 151115 - DNA, 1617 bp, Homo sapiens
  misc_feature (1)...(1617): n = a,t,c or g
gagaagccgctgattacgccaaggttggcacgaggggtttgccgccagaacacaggtgtcgtgaaaaactaacccctaaaagccaaaatgggaaaggaaaagactcatattcaacattgtcgtcattggacacagtagattcgggcaagtccaccactactggccatcatgatctataaatgccggtggcatcagacaaaagaaccattgaaaaatttgagaaggaggctgctgagatgggaaagggctccttcaagtatgcctgggtcttggataaactgaaagctgagcgttgaacgtggtatcaccattgatatctccttgtggaaatttgagacccagcaagtactatgtgacttatccatttgatgcccccaggacaccagagacttttatccaaaaacatggattacaggggacatcttcaggcttgactggtttggggggccccctttttgggggggttntcccctgattgttgctgctgggtgttggtgaatttgaagctgggtatctcccaagaaatggggcagaccccgagaggcatgccccttctggcttacacactggggtgtgaaacaactaaattgtccggtgttaacaaaaatgggattccactggagcccacccctacagcccagaagaagatattgaaggaaattgttaagggaaagtcagcacttacattaaggaaaattggctacaaccccgacacaagtagcattttgtgcccaatttctggttgggaatggtgacaacatgcctggagccaagtgcctaacatgccttggtttcaaggggatggaaaagtcacccgtaaggatggcaatgccagtggaaccacgctgcttgaggctctggactgcatcctaccaccaactcgtccaactgacaagcccttgggcctgcctctccaggatgtctacaaaattggtggtattggtactgttcctgttggccgagtggagactggtgttctcaaacccggtatggtggtcacctttggtccagtcaacgttacaacggaagtaaaatctgtcgaaatgcaccatgaagctttgggtgaagctcttcctggggacaatgtgggcttcaatgtcaagaatgtgtctgtcaaggatgttcgtcgtggcaacgttgctggtgacagcaaaaatgacccaccaatggaagcagctggcttccctgctcaggtgattatcctgaaccatccaggccaaataagcgccggctatgcccctgtattggattgccacacggctcacattgcatgcaagtttgctgagctgaaggaaaagattgatcgccgttctggtaaaaagctggaagatggccctaaattcttgaagtctggtgatgctgccattgttgatatggttcctggcaagcccatgtgtgttgagagcttctcagactatccacctttgggctgctttgctgttcgtgatatgagacagacagttgcggtgggtgtcatcaaagcagtggacaagaaggctgctggagctggcaaggtcaccaagtctgcccagaaagctcagaaggctaaatgaatattatccctaatacctgccacccaactcttaatcagtggtggaagaacggtctcagaactgt

SEQ ID NO: 151116 - DNA, 408 bp, Homo sapiens
  misc_feature (1)...(408): n = a,t,c or g
cccacgcgtccgcccacgcgtccggactagttctagatcgcgagcggcgcccnnnnnnnnnnnnnnaaggcggcgggaaaaaggggggactttaaaacggagggggcttaccaaaggcagcggaccatttttaaaaacaaaaaaagggcccggcgggaaaaaacgggcagggaaaacctccgggggaattacaaaaacatgggccggggtttaaaaacccccaggggggctttggggggcccctacttggacaaaaaaggccctttaaggggaaaggggccctttcaggggggaacccttttnnnnnnnnnncccaaaataaaaatccaggggaccttgtgaatccgccgaaactattggccttacatccgaaggtacaaccgtttcaaaaagcgccaaaaaaacatg

SEQ ID NO: 151117 - DNA, 386 bp, Homo sapiens
  misc_feature (1)...(386): n = a,t,c or g
tgctcctgagctggtgccgccgcgataggagagccaatggcctaacggggtgagggacacccaccctggagcgtggatgagcgggcggactccaccaacgtcaacaactggcactgtacggagagagatgcttcacattggtccacggataagctgaaaacactgttcctggcaatgcatgttcagaatgaagaacgcaacggtgaggcgactgaagtgagtaagcttgatggagaggcatccattaacaatcgcatagggaaacttatgttcttttatgaatggggcgtcanactggactggacaggtgcttcttagtctggtgtaccatacaaaggacatgtggagatcccctatttggctgatgaaaactgcgtggatgaagg

SEQ ID NO: 151118 - DNA, 323 bp, Homo sapiens
gcgcgagatggacctgcaggtgcacaatgcaatggatcaacttgaacaaagagtcagcgaattctttatgaatgcaaagaaaaatatacctgagtggagggaagagcaaatggcatccatcaaaaaagactactataaagctttggaagatgcagatgagaaggttcagttggcagaccagatatatgacttggatctttggaattagacactccttcacagccagtgaacaatcaccatgctcattcacatactccagcggaaaaaaggaaatataatccaacttctcaccatacgacaacagatcatattcctgaaaagaa

SEQ ID NO: 151119 - DNA, 495 bp, Homo sapiens
tgcaaagaaaaataaacctgagtggagggaagagcaaatggcatccatcaaaaaagactactataaagctttggaagatgcacgatgagaaggttctgttgtcaaaccagatatatgacttggtagatcgaggcgggagaaagctggatcaggaactggctaagtttaaaatggagctggaagctgataatgctggaattacagaaatattagagaggcgatctttggaattagacactccttcacagccagtgaacaatcaccatgctcattcacatactccagtggaaaaaaggaaatataatccaacttctcaccatacgacaacagatcatattcctgaaaagaaatttaaatctgaagctcttctatccacccttacggtcagatgcctcttaagggaaaatacactaggttgtcggaaataataattccacagcctcttctaacaatgcctacaatgtgaattcctcccaacctctgggatcctataac

SEQ ID NO: 151120 - DNA, 391 bp, Homo sapiens
taaccaaacagctcatgcttctctgaagacttgcagcaaggcttgctgaggctcacagaagatagccccagtgttttggagtggttttgaatgtgattctgagatcagactgactgatctggaatcctggctttatatcttaccagctacacaaccttggagtcttacatatttttactttcagttctcttttatactaacttttcttcgttatgacaaactgttctttttttttaccctttatctttatttaaatctatacttttttttgtatgtatttctttttattgtataaatttgtatcttttgttatatttatctagtttttatattcaagtgtgttgtatgattttttatcttcttttttgtttgttttatgttattttttctt

SEQ ID NO: 151121 - DNA, 546 bp, Homo sapiens
tgccagcccctccaggaagggtttttgcagcatggccaggcagcgaagaggccagagtgctggtagtcctcaagggctgtgcctgtagggccggcttatttaagatgtatccgttgctgccgatgacagaagtctgcacaaagtcgtcgacagtgacgtggttttgcttcgccgcttatgagtctctttttgaaaccccattttccgctatcggagttagtgtgttggtgccatcctgggggttgacccttgcgctgtcctgagtgtgctttgcagcatttgcatgactgctggcatcgctgttttcacaagacccattggtctcaccgtccgcagccatgtgggcctctcctgcctgtttctgtgctgagccttcatcggcagccataggtgtctcttctcccagcagctcggttttcacacagcaatcctgatgaggctcccccctcgccggaagtgcctcggcatcggcgaagaacatggcccgggcacgcagcgtggccccgccacgaaatggtcggcccggtaacaccaatgcggatagtc

SEQ ID NO: 151122 - DNA, 389 bp, Homo sapiens
cggacgcgtgggtcgacccacgcttccggcttatattcttgaagaccctgactggcaagaccatggctgtcgacttggagccgaatgacaccattgctaatgccaaggcatagatccaagacaaggaaggcattcctcctgaccagcagaggttgatctttgctgggaaacagctggaaaatggacgcaccctgcctgactacatcatccataaagagtccaccctgctcctggtgctccgccttaaaggggggatgcagatcttcgtgaagaccctgactgcgtaaaccatttctcttcaagcggagccgagcgacaccatccacaatgtgtaggaaaagattcaagacaaggaaagcattcctcctgaccaacacacggtgatcttg

SEQ ID NO: 151123 - DNA, 435 bp, Homo sapiens
ccaagggctatggtcccagatgcacgccaacatccttcagcgataagccttcggtaacgccggatttaaatgaatatccagtatattcaacatgaaagtgtttaccagaatgttcgcccctcacagagagagagtacaggccggtggtctcattgctgtccctcacaaggtaggtcccgtcgcatccctttcacagtagaagagattcagcagcatggcgtgtgagcttgccctgattccgccccaagtcgtggagcagctcagcctctccatcggatctgctccacagatctgagggatcctgggtgctcatcttcccttctagaagttctgctctgcccattcgcgcccttcacagaggtagagagagacccacaactgggctgctcctgacaccttctcgctctgtgagacagcagcctgcccacgcgtccg

SEQ ID NO: 151124 - DNA, 396 bp, Homo sapiens
  misc_feature (1)...(396): n = a,t,c or g
nnnnnnnnnnnnnnnnnnnnnnnnnnnnnnnnnnnnnnnnnnnnnnnnnnnnnnnnnnnnnnnnnnnnnnnnnnnnnnnnnnnnnnnnnnnnnnnnnnnnnnnnnnnnnnnnnnnnnnnnnnnnnnnnnnnnnnnnnnnnnnnnnnnnnnnnnnnnnnnnnnnnnnnnnnnnnnnnnnnnnnnnnnnnnnnnnnnnnnnnnnnnnnnnnnnnnnnnnnnnnnnnnnnnnnnnnnnnnnnnnnnnnntttagttttttggcnnnnnnnnnnnnnnaggaagccccttgacacccagactttatcaaaaacatgattactgggacatcttaggctgactgtgctggcctgattgttgctgctggcggtggtgtatttaaaagctgggatctacagaag

SEQ ID NO: 151125 - DNA, 707 bp, Homo sapiens
ttctatttgatccccaacatcctctaaaggttgtcctgacagatgtgtcccatagacagccatggttctcggcttattatgaccccacagtgcactaaggaaacctccactaactaaaacccaggagtttaagtgccatcttatttgtctatagttttagactgtattattttgggtcaaaaaaagctcaaaatcacaggaagaaccataaaactgtagcaaattataatttaccgagatctatgaggatcttatttgtaaacatgaattggtcaccatcagttttccaatagcaagagacacaaatcctagaaaaacttatttcaatttccagccttcaggatttccaaattttcccgatacatttcagactagaagaaaaattaactatttcaaacccactttgacatacagaaaagccctggcatactgaaatttcagattgctggacccccatctcgagattttgattcatcacattctggatgtaacaataatttggatcaagattaaggagccatggccgggcgcagtggctcacactataatcccagaacttttggaggccgatgtgggcagatcacttgaggttaggagttagagaccagcatggccaacatggtgaaaccccatctctactgaaaatacaaaaattagctgggcatggtggtgggcgcctgtaatcccagttagtcaggaagctgagg

SEQ ID NO: 151126 - DNA, 417 bp, Homo sapiens
acgcccacgcgtccggccacgcgtccgggatatgaggtgcctttaacaactttatttacatgttaggaaattttaacatgagcttttcaagaaatggaactgaaacgtccacaggaagaggatgtggcagcactgcctgaaggtatgagaccacattctaatctttatggtttttcatgggaataggtgatatgtgcagctgttgttggactttttgctgctctcttttttttgtggagaagttttagaacggttaggatacggattcatgtgggacgagagagaaagcttgctctaatgctttctggattaaatcaataaaaaagtgaactacttggacactgtatccttgctcagaacgagtatgacggctatgaattagatgaatagtttgtggacctgcgcgttgacaaagag

SEQ ID NO: 151127 - DNA, 1063 bp, Homo sapiens
aacggcctctctttggggtgaccggaggcaaagagctgttgggagtgttttgtggggtctcttcttccttccttgtggctacatgaagcctgagtctcagcctctggtttcttggtttctttccactgccctgggcaaaccagcttcgactgaacgtcagccagtccagagagtaattaaaagagttaagtctcaaaagtaaatctccgggaagagccctcagtggtttcagacccccaggcacttgtcctcgtgccctccctgaggcgtcctgtcctactggacatgctggagcctgcccgtgtccttgtggaccatggaatttgcccggggttggggggcaggggtggagagaaataaaacttcctgtgatctatgtatcggcccagtacatagatcctggatagaggcgattgagctaagcatgggaccaagcatttctgtgcagtgcctgcagaattgagtttccttctggctatgggagattcttctgagctgtctcagttgtctgacatctggcatctgccatgggccaggacgtctggggcaggggcagaagaggacaggaggagactgccctagaggattctgggaaaacgggaaaacagcaaaacagagctaccccacccaatctcaggctgatgcattattaataaaaagtgactgttgactgaagtttgtagacataaatattgtttgaggtacttggccctaggtaagcaccatacaagtgctattatttctaaatgattttatcaagataaaagacaccagccaggcatagtggctgccgcctgtaatccctttgggaggtcgaggcaggaggatctcttgagatcgtaagttggagaccaacctgggcaacatagcgagtccccatctatgcaaaaaatttagaaattagctgggcatggtggtgcacacgtgtagtcctagctcctcaggaggccaaggcaggacaatcccttgagtccgggaggtcaaggctgcagtgtgctgtgatcacaccactgcactccagcctgggcgacccaaggagaccctggatctaagagtaaaaatg

SEQ ID NO: 151128 - DNA, 423 bp, Homo sapiens
  misc_feature (1)...(423): n = a,t,c or g
acattttgcaaaggtaaacacaagtgattctctttattcatggcagttatgtgctataaaatcacagcaaacactgaatttctgaatactaaacattcctcctaggagaaatatggggttaggttcctgtgagcctctggtcccaacattttcgttaacccattaatccataaccttgtttcatgtgtgtttctttttaagggcaacttacttaatatgtattgttgattcattaacatttaacttatggccaacagcactataactcatgcccaacagcactataactcatgcctgactgaagattatctaacatacatannnnnnnnnnnnnnnnnnnnnnnnnnnnnnnnnnnnnnnnnnnnnnnnnnnnnnnnnnnnnnnnnnnnnnnnnnnnnnnnnnnnnnnnnnnnnnnnnnnnnn

SEQ ID NO: 151129 - DNA, 450 bp, Homo sapiens
atgaccttgaaggaactaagatgtttcaagtcagaaatgcctgggcaatggagtgggacaagaaagaaagaaggaaagaaagaaagaaagaaagaaagaaagaaagaaagaaagaaagaaagaaagaaagaaagaaagaaagaaagaaagaaaggactgaaggaaggaaagaaagagagaaagagagagagagacagagaaaaagaaagaaagagagagagagagaaagggaaagggaaaggcaaagggaaggaaagggaagggaagggaaggaaaggaaaggaggaaggaaggaaaagaaggaaagaaagaaagaaagaaaaaagaaaagaaaagaaacgaaggaaggaaagaaagaaggaaagaaggaaggaaggaaaagaaagagagaaagaaagaactctaaagaatgtcaaagtagctatagacttttcagagtgtgactattaa

SEQ ID NO: 151130 - DNA, 1377 bp, Homo sapiens
atgaaccaggaggaaggccctcagcaggaaattgatcatactggcaccctgatctcagacttccagcttccagagctactctgggcagcagctgtgaaacagaaggaagctcatgaagagagcagcaatttgacctcatcccctgatggtatgttaaaaaagaaagaaagaaagaaagaaagcaagaaagaaagaaagaaagaaagaaagaaagaaagaaagaaagaaagaaaagaaagagagaaagaaagaaagagaggtaaagagaaagagagagggaaggaaggaaggaaggaaggaaggaaggaaggaaggaaggaaggaaggaaggaaggaaggagggaaggaagaaaggaaggagggaaggaagagaaaaagaaagagagagaaagaaagaaagagaggaaatttctagagaatatgactcagaaaaatgagagactaaatcaagacagaggaaaatatcagatccagtacataacagaagaactgacaactgacactgaggaaagggaacccaccactcttctctgtcccctcatcgttctcagagcacctattacaacaggacatctcctcttctattatgtgggacttgacatgaaatggtggtttctttacctctgggtccctgtggtcagtgaagtgcttgggtttattgagaatatgtttttcgtctcagccaatccctgggtgagtttcaccagttttgatttaaacgtggccaatatggacaacttcttcgcccccgttttcaccatgggcaaatattatacgcaaggcgacaaggtgctgatgccgctggcgattcaggttcatcatgccgtttgtgatggcttccatgtcggcagaatgcttaatgaattacaacagtactgcgatgagtggcagggcggggccaaagtaagcatagatggaacataccttaaggtaataaaagccatgtatgacatgtatgccatctatgacaaacccacagccaattttacactgaacagggaaaagttgaaagtattccccttgagaattggaacaagacaaggatgcccactttcaccacttctattcaatgtattactggaagtcctagccagagcaatcagacaacagaaagaaatcaagggcatccaaattggtaaaaaggaagtcaaactctcactgtttgctaataatatgatcacttacttagaaaaccctaaagattcatccaaaaagctcctagaactagtaaatgaattcagaaaagtctcaggatacaaacctaatgtagacaaatcagtagcactgccatacaccaacaatgaccaagctgagaatcaagtaaagaactcaatccattccagaatagctgcaagaaaaactacaaagcactgctga

SEQ ID NO: 151131 - DNA, 637 bp, Homo sapiens
taaggcagtagcttgctgatgctcccagctgaataagtcccttctttctacaactcggtgtcttgagttttgtctgcagctcctcctgttacatttcttggctccctgactgggaagcaacgtgactgacagacagctgaggcagccccttaagcaacttaagcctgccttgtggagtgcccctgtgggggactccagccagcctgagtgacatgatccaaagagccctcctgggtaggaaattgccccggtggaatccctcaccagagaagcaggtagcaggccctcgcagaggattaacacagtggcttaacacccaggaaggaactggcacttgggagtccaagacatcttaaaatttggcctcttcatcagaaacatccaatcaatcacagaatccatcgttaacagaaccacctccactccactgatggctctaaacaagtatcaacccgtaccaaacagagaagaactgacttgtaatgaggaattaaatgatagtgatgccttctattgaattccatttacaggaggcatcaaaggggaagatgagatgggaaagaaagaaagaaagacagaaagaaagaaagaaagaaagaaagaaagaaagaaagaaagaaagaaagaaagaaagaaa

SEQ ID NO: 151132 - DNA, 476 bp, Homo sapiens
ttgacatactagaatctaatactagaggcagcatgacattattatgggggaggaggttgagaagcactaacctcgaagttagaatttctggtttgtcatcccagtctgctaattagctttctgatttaagacaaaatactttttctgtgccttctgggggtcaaattcgatttttaagattctgtcagttggaagaaatctaactaaaaatatacttaacataattctttggtagtatattattttgaaatttggtccagaatcctatttgtttattcctgtagtatacatacatctgtagttacccactagtctttgttgtctttgggccatctaaagtatatttgggctgggcatggtgtctcacacctgtaatttcaacactttggaaggccaaggtgggaaaatcacttgaggccaggactttgagaccagcctgggcaacacagcgagaccccatctctcctaaaaaaaaa

SEQ ID NO: 151133 - DNA, 554 bp, Homo sapiens
gatttgattttaaatcatttatttttctgttttgtaatacgtcagcagttttcattcttattcttttttccttctttttttcattttttcattgcaatgttaacacaccagagttatgtgatttttctgtctgtatacacagtgataattcatttagatttctacatctctttatttttaacatatgacattatgtatttctgaactaagataaacacttaagcaaagttgttactcatatacgaaaatatgttaatagttttatagtgttcagctttcctttctaactatactgtactaatagtgcaaatcatagcaagccttatccatagctctacaaaatgaatttctcagtgtgccaatatcataaaaatatgaattatattacactaactatagagttcagtagaaataaattcttatctgtaacttttctgttatttagtatattcagccataattttggaattagtgcttcaatctcaattttcatattacatgtatatattaagaataatccaattggattttttaaatgaggaaatgcacatatc

SEQ ID NO: 151134 - DNA, 1560 bp, Homo sapiens
ctgtgacaggctctgcctcttctagtctttttccattcaacgcttgtttgtgatgccactcgaccacctcaaagaagctgcctctctcctcctaagaactcatctaacttcttctccacttggcccgggcgggagtaagcagggccagtgggtactcctgaatacaggcaggcctgcatcttttaggatcccatccctccctgagcctcacgcgcagacccccagaggactcaggctatacacacacccacgtccactggagactgcagcctctgggtatcaggccctgccggggactcctttgaaattatcacataggaaagcaacgcagcgccttgattcactaagggatcttggggccgctaagctagaccaagggcagcgtgaggtccacagagctccctgcttcccttccactggagggaaataacattctgttcatggacttcgacaggcaacacagagaggtcgggggccacagtcagagctgcaatcctactctgcagggattgctcgcccaatttagctctggaaaagtatgccagtgacaaaggcacaggctgctggggacgggggtagcaccagagagctgtgggactgactacagggcacctctccagagagctgctctggtcgtcatcctccaccccggcacccagaggtgctgctgggctggggactgagctttagggcccaccttggataagggcaggaaaaacctcaggaagacaatgttatagagagctcattttcacgagcctggagctgtgcccatctctgtctttggtgccagcaccatggaggtaccccctctttgctgggtgaccgtcaggaccctctggagcatgtccgagggctcaaaatacaagaggctcctccagtgatgaaccagcgccagcatatccaggtgctgcccaagatgaggtagaaacaacacatctgcccatcaggaaatagcacagtctttagttctggatcccgcttacctgaggatcccacttacctacttacatatctgcccattaggaaacagcataatctttagtcctggatctcacaggcctcccacgtcccacaagtcccagtcacgagagaggcctagactccagttcatctggtccagggctctccactggtccctgagaatgcagtcctgaccccaaccccatgtgtcctaaggtacttccaggccctgaccagagatgttggaatagccacagcacggcccctattgcattcccagaacctgtgagatccaggtaatcagggtcatggacacctgttcctgccacaggagccaccttgaaccccagatgccagcgtggccttgccattcctaactccttagtgagctctccatgaggtcctgctggatggagagaactgccctcatctcagcaggctcatcctcatcccaaacgttgaggggctttgcgatcagagaacaggcaagaaggccccgatcagggttgtggcaactgctttgtgaaatatggcggacgcgtcggtcgcgtcgggtattccggaccagtccggacagggtgttcaagggcgtcaaat

SEQ ID NO: 151135 - DNA, 930 bp, Homo sapiens
cagtgagctgggatcgcgccattgcactccagcctggctgacagagcgagactgtctctaaaaaaaaaaagactcaagtggaccctacaatgaagcctacacatcccaatagaagccccttcttatgctgagggaagcagccctcagaacatgatagcttgtatcacagcagagtggcacgtgctggtacacataacaaaagcaccctggccctggatgcctgcaacctaagaagagtgcagctcccagagggaggcacccatccatgtgggatgggcctaagcatggaatcctaactcctgattccgtctcctatttcttgcttggctacgccagttcccaaatctggtagatgtccatgcccatgtgctcctgctgggactcaattcaggctatgtatgactatgaagtcaggcctcatctgcttactggctgtgtgaactttatgtatcttggttttcttcatccatgaaatccaagtaatactacctaattgttactgtggagattaagttcaaatgcaatgtatagtaatattaagcaatttcttagttattattctagccagtaatgggacttcagaatcttttattacacaatataagaatatgtatgtaaagacattttggaatttcctggatgagaaggaagtcatgggctgggcgtggtggctcacgcctgtaaccctagcactttgggaaatcgatgcggagtggatcacttaagctcaggagttcaaggccagcctgggcaacatggcaaaaccccatttctacaaaaaatacaaaaattagctgggcatggtggcacccgcctgtagtccagctacttgaggctgagatgggaggatgagggaggtcggggctgcagtgagccaagatcacgccactgcactccagcaccctgggcgacagagtgagaccctgtctc

SEQ ID NO: 151136 - DNA, 398 bp, Homo sapiens
  misc_feature (1)...(398): n = a,t,c or g
gcgggatttttccgcggatcaagtgcagaacaggataatcggttcagcgacaaacagaagaaactactgaagcagctgaaatttgcagaatgcctagaaaaaaaggtggacatgagcaaagtaaatttggaggttataaaggcttggataacaaaaagagtaacggaaatccttgggtttgaagatgatggtgcgactgagttatattcaaccagctggaagtgaagaatccagactccaaaatgatgcanatcaacctgactggatttttgaatggaaaaaatgctcgagaatttatgggagaactgtggcccctgctgctaagttgccaagaaaacatcgcgggaatcccttctgctttcctagaactgangagagaagaaataaaaccaagaccg

SEQ ID NO: 151137 - DNA, 521 bp, Homo sapiens
tctgcaagatggacgcgggattttttccgcggaacaagtgcagaacaggataatcgggtcagcaacaaacagaaggaaactactgaagcagctgaaatttgcagaatgcctagaaaaaaaggtggacatgagcaaagtaaatttggaggttataaagccttcggataacaaaaagagtaacggaaatccttgggtttgaagatgatgttgtgattgagtttatattcaaccagctggaagtgaaggcctgaaccaaaatggaagttattccttgcgtctgaagtatagcaccatcaccttattaggtcacagcagagtgagtgtcccaatgtcgctctgacccaactcccttgatgatgcagtgtgtgtttggagaatccagactccaaaatgatgcaaatcaacctgactggatttttgaatggaaaaaatgctcgagaatttatgggagaactgtggcccctgctgctaagtgcacaagaaaacatcgcgggaatcccttctgctttcctagaactgaa

SEQ ID NO: 151138 - DNA, 983 bp, Homo sapiens
ttttttttttttttttttaatgaaaagatgtttgatgtttatttccaccttgcactcaggtctgagccacaagtacattaagacattgaatggtatcacccagggaatacgtaaccagacaacacacaagactgagatgccacaagtggtggtggtggtaattcacgacagaaggaaccagacagtaaaaacaaaaattgccccaacacacccaaatggatccaaatcccgcccacctcctaggataggccaaacttgattgctgggttaaagaaccctagaggtctgtttaaggtgggcagagaaggggggttttctcagcttagaattgtcctggacatctaactgccagcaaggcactgttacatattaatttccctgaggaaaccaagtcctttagttggggaaggggttttccctttggacccagatctttatggcttaaaattgggtcagggtttgcaaaaccttcaaagcctccataaccaaagctacgggagaggctctatactgctacaacgcagtacctcctcactgcaggtagtctgcgccttaaccctctgcagggagactgactgtagcaccaagtaccctggcttttaagactctacataggaatccaccaataattaagatgtataaccttgacctacagcctaaagcccaatatgcctccctcaagaacatcaacagtgttcaagcttagctttgttacagaaaatgaggtagggtgcggtggctcacatctgtaaatctcagcagtttgggaggccaaggcaggcgcatcagctgaggtcaagagtttgagaccagcctggtcaaaatgatgaaaccccatctatactaaaaatacaaaaattagctgggcatggtggcacacgcccgttatcccagctactcaggaggctgaggcactagaatcacttgaacccaggaggcggaggctgcagtgagctgagatcacgccactgcattccagggga

SEQ ID NO: 151139 - DNA, 418 bp, Homo sapiens
  misc_feature (1)...(418): n = a,t,c or g
tcagatgtttagcagaatgcccctaatgtggatttgtctgattatttcctcatggttagattcagattaaacnnnnnnnnnnnnnnnacaaaagcccacttgcatgaggctgggggggccttttaattgcaaggcctccatttaaaaggggaaaaagttcggggccggtggggcatttaaagcctaggggggtaggggggaggaggggatagaatgttaatttatgccccaaatcctcaaatccccaaggggggttgggggaaaggcccagggagctgagggataaagccacagtttcagccctggcaaatttcactgccaggaagggctgctgactgcggggccctgagggggggcagccagggccgaggggcaaactttttccaaaaggagttccaggggttcaggggcagccatt

SEQ ID NO: 151140 - DNA, 396 bp, Homo sapiens
  misc_feature (1)...(396): n = a,t,c or g
nnnnnnnnnnnnnnnnnnnnnnnnnnnnnnnnnnnnnnnnnnnnnnnnnnnnnnnnnnnnnnnnnnnnnnnnnnnnnnnnnnnnnnnnnnnnnnnnnngggcccaaaatttgcccggcctggggggtccccccctgtaaccctgccctttgggggggttgaaacgggttaatcccctgaaataaggatttaaaaacccccctgcccagggggggaaaccccctttttttttaaaaatacaaaattaacccacccttggggggggcccccttaatccccatttcctaaggaggttggggggggaaaatttttgaacctcggagggcaaaggttttggggacccaaatttggccctttgttctccgccaaaacaaaaaaagggacttcttttttaaaa

SEQ ID NO: 151141 - DNA, 440 bp, Homo sapiens; identical to SEQ ID NO: 145869

SEQ ID NO: 151142 - DNA, 598 bp, Homo sapiens
ccgttgagcccttcggtaccgatcgagaacccctgggtcgacccacgcgtccgctgaaaagccatctttgcattgttcctcatccgcctccttgctcgccgcagtttttctccgttttgcgcctcctccgccgtcgcggactccgggagctttatcgccagagaccctgaactctcgctttctttttaatcccctgcatcggatcaccggcgtgccccaccatgtcagacgcagccgtagacaccagctccgaaatcaccaccaagggacttaaaaggagaagaaggaagttgtgggaagaggcagaaaatgggaagagacgcccctgcttaacggggaatgctgagaatgagggaaaatgggggagcagggaggcttgacaatgaggtacaccaaaaagaggaataatgtggggaggaacaggaggaggaagaagaaggtgatggtgaggaagaggatggagatgaagatgacgagaccttgtcagctacggtcacgcgcgctactgaagatgaggatgatgacgctgtcgctcccaccaagcagacgactcgccttgatgaatagacacgtaataacggagccgctaaagctaaat

SEQ ID NO: 151143 - DNA, 1500 bp, Homo sapiens
atgtctctggcagatgagctcttagctgatctcgaagaggcagcagaagaggaggaaggaggaagctatggggaggaagaagaggagccagcgatcgaggatgtgcaggaggagacacagctggatctttccggggattcagtcaagaccatcgccaagctatgggatagtaagatgtttgctgagattatgatgaagattgaggagtatatcagcaagcaagccaaagcttcagaagtgatgggaccagtggaggccgcgcctgaataccgcgtcatcgtggatgccaacaacctgaccgtggagatcgaaaacgagctgaacatcatccataagttcatccgggataagtactcaaagagattccctgaactggagtccttggtccccaatgcactggattacatccgcacggtcaaggagctgggcaacagcctggacaagtgcaagaacaatgagaacctgcagcagatcctcaccaatgccaccatcatggtcgtcagcgtcaccgcctccaccacccaggggcagcagctgtcggaggaggagctggagcggctggaggaggcctgcgacatggcgctggagctgaacgcctccaagcaccgcatctacgagtatgtggagtcccggatgtccttcatcgcacccaacctgtccatcattatcggggcatccacggccgccaagatcatgggtgtggccggcggcctgaccaacctctccaaggtgcccgcctgcaacatcatgctgctcggggcccagcgcaagacgctgtcgggcttctcgtctacctcagtgctgccccacaccggctacatctaccacagtgacatcgtgcagtccctgccaccggatctgcggcggaaagcggcccggctggtggccgccaagtgcacactggcagcccgtgtggacagtttccacgagagcacagaagggaaggtgggctacgaactgaaggatgagatcgagcgcaaattcgacaagtggcaggagccgccgcctgtgaagcaggtgaagccgctgcctgcgcccctggatggacagcggaagaagcgaggcggccgcaggtaccgcaagatgaaggagcggctggggctgacggagatccggaagcaggccaaccgtatgagcttcggagagatcgaggaggacgcctaccaggaggacctgggattcagcctgggccacctgggcaagtcgggcagtgggcgtgtgcggcagacacaggtaaacgaggccaccaaggccaggatctccaagacgctgcagcggaccctgcagaagcagagcgtcgtatatggcgggaagtccaccatccgcgaccgctcctcgggcacggcctccagcgtggccttcaccccactccagggcctggagattgtgaacccacaggcggcagagaagaaggtggctgaggccaaccagaagtatttctccagcatggctgagttcctcaaggtcaagggcgagaagagtggccttatgtccacctga

SEQ ID NO: 151144 - DNA, 3731 bp, Homo sapiens
  misc_feature (1)...(3731): n = a,t,c or g
ctttgttgacctcactaggccagngcggnggaattccgagaggagaggcctcgggatgtctctggcagatgagctcttagctgatctcgaagaggcagcagaagaggaggaaggaggaagctatggggaggaagaagaggagccagcgatcgaggatgtgcaggaggagacacagctggatctttccggggattcagtcaagaccatcgccaagctatgggatagtaagatgtttgctgagattatgatgaagattgaggagtatatcagcaagcaagccaaagcttcagaagtgatcgggaccagtggaggccgcgcctgaataccgcgtcatcgtggatgccaacaacctgaccgtggagatcgaaaacgagctgaacatcatccataagttcatccgggataagtactcaaagagattccctgaactggaagtccttggtccccaatgcacttggattacatcccgcacggtcaaggtgagcgcagagaaggagctgggcaacagcttggacaaagttgcaagaacnattgaagaaccttggcagcagattctcaccaatgccaccatcatgggtcgtcagcgtcaacggcttcaacaccccaggggcagcaagctgtcggaggaggagctggagcggctggaggaggcctgcgacatggcgctggagctgaacgcctccaagcaccgcatctacgagtatgtggagtcccggatgtccttcatcgcacccaacctgtccatcattatcggggcatccacggccgccaagatcatgggccagctgccctccctctctgagcctcctttgcatctgccccttgcggaatgggccaggtcgcccgcctggcagggccatcgaggaatccaaccagaacttcatgtaaaggtgcccagcacacgtcgagcccccaggcagatttactcaccccactctctgctttcttctgaccgcccccttcctccctccctcccacgcaggtgtggcggcggcctgaccaacctctccaagatgcccgcctgcaacatcatgctgctcggggcccagcgcaagacgctgtcgggcttctcgtctacctcagtgctgccccacaccggctacatctaccacagtgacatcgtgcagtccctgccaccggatctgcggcggaaagcggcccggctggtggccgccaagtgcacactggcagcccgtgtggacagtttccacgagagcacagaagggaaggtgggctacgaactgaaggatgagatcgagcgcaaattcgacaagtggcaggagccgccgcctgtgaagcaggtgaagccgctgcctgcgcccctggatggacagcggaagaagcgaggcggccgcagagacgagaagagaggaggggaggcctcctccgccgccgccatcttggaccgggcccggtcagcttccgcggagccatcggcagacgccgcggcctcccttgagccccgacccccgtcgtcagaacaaccccgggcccaatcaaacaaacccactatccgacatacgcgccgctatcgcgatagcgcccgggcccggggcgcgagaaaaaggcggcgggcgctcgcctcccccgcctgtcgcgatacgctcctcagcggcggcgccagctcctgtgcgcggggctcccggcggggggcggctccctccctctcgccctcccgttcctgcgcctctttcacgttcctcagcgcctcccgggggtccttccgcgagcccggagccccgggccccgcccgccgccgcctccccgcgtggcatcgcgtcgggccccccggtgagattgatcgctgcctcaagaaggtgtccgagggcgtggagcagtttgaagatatttggcagaagctccacaatgcagccaacgcgaaccagaaagaaaagtatgaggctgacctaaagaaggagattaagaagctacaacggctgagggaccaaatcaagacatgggtagcgtccaacgagatcaaggacaagaggcagcttatagacaaccgcaagctcattgagacgcaaatggaacggttcaaagttgtggaacgagagaccaaaaccaaagcttacagcaaagagggcctgggcctggcccagaaggtagatcctgcccagaaggagaaggaagaggttggccagtggctcacgaataccatcgacacgctcaacatgcaggtggaccagtttgagagtgaagtggagtcactgtcagtgcagacacgcaagaagaagggcgacaaggatgatgcaagagtccagacctccagactttttctctccaaggacccagggagtccaagccccaaccctcaaccagacgcaagagtcctggcttccaacctcctagtctgtcagatccagcagtccaaacccctaaccttctcctccctcaggatgaccccagtccataaaagggttctaagcgattctctgcttagcaggatcggtccacagcgggacgtgagtcatttcctcctcgcggcttaccgctctctccgcctagtgccaggcctcgggatgtctctggcagatgagctcttagctgatctcgaagaggcagcagaagaggaggaaggaggaagctatggggaggaagaagaggagccagcgatcgaggatgtgcaggaggagacacagctggatctttccggggattcagtcaagaccatcgccaagctatgggatagtaagatgtttgctgagattatgatgaagattgaggagtatatcagcaagcaagccaaagcttcagaaggggaaactgagtccctcacccccttcaagaccccaggccgctcctcgctcccgcccctcgaggcccttcgccggctctgcctcctcccccttcccgaccccaccggccataagatgatgtggtccaacttcttcctgcaagaggagaaccggcggcggggggccgcgggccggcggcgggcgcacgggcagggcaggtcggggctgacgcccgagcgcgaggggaaggtgaagctggcgctgctgctggccgccgcgccgtgtgcgaagcggccccacctggggctgtggaaggcgtgcaccaagcggctgtggcaggcggacgtgcccgtggacagggacacctgcggccccgcggagctgcccggagaagcaaactgcacctattttaaattcttcaccacgggggagaatgcacgcatctttcagagaaccacaaagaaagaggtgaatctggcagctgcggtgatagcagtgctgggcctggcagtcatggccttggggtgcctctgtatcatcatggtgctcagtaaaggtgcagagttcctgctccgagttggagccgtctgctttggcctctcaggcctgctgctcttggtgagcctggaggtgttccggcattccgtgagggccctgctgcagagagtcagcccggagcctcccccggccccacgcctcacctacgagtactcctggtccctgggctgcggcgtgggggccggcctgatcctgctgttgggggccggctgctttctgctgctcacactgccttcctggccctggggcgggggcaccgggccacctagagccacgcttcccccaggtaccacatcgagcaactactccctgggtaacttcgtacgactgggtctggctgccgtaattgtggttatcatgggagctttcctggtggaggcctggtacagccggaatgtgtctccaggtgaatcagaggccttcaaaccagagtga

SEQ ID NO: 151145 - DNA, 376 bp, Homo sapiens
gccacaaaagacctttaatggcctcctatttattgttcttttgttcatttgttagagttgaatgaactataataacttgtctgacataataagaatgccacaggtataacagataaacctggcaggtggtccaggaatgagagtgtcacaaaataatcactcaacacaagggccacagacctggagattcttcccagccatccctcactcctgcctaagtgagaagcagggcaagcgatgaagactggtggggaagaagtctgcaggaaagaggtcatcccaaacactaaaggatcttgtgtcagccccaaaggtttcagaagacactggagggcatatgtttgccatgcattgctccagcatttcatcagctctg

SEQ ID NO: 151146 - DNA, 1118 bp, Homo sapiens
ttcctctggccacaaaagacctttaatggcctcctatttattgttcttttgttcatttgttagagttgaatgaactataataacttgtctgacataataagaatgccacaggtataacagataaacctgggcaggtggtccagggaatgagagtgtcacaaaataatcactcaacacaagggccacagacctgggagattcttcccagccatccctcactcctgccccgggacacaacccatggcagggcccccattccatagggaaggagggcagggtcccacagtgtctgtgggcttaggacctttaacactgaggcaggaggatgcccggggaagatggcacttcctatgctcgttcccaagttgctctgctgcatcttgccatgcaggttcaggaccataccccgagtttgtgaggcacccacctctcatactcaccacctcatatgaccacctatcatacccacctctcctatgacccttgcaattgtcccagtgaggtgggaagagcctggactagccccattttgcacacagggaaactaaggacacactcggaccgaatgtaatacacccgtgtcatgcgcttgctgtgccctgagcttcacattttcacctagaattccctggggggtgggagtgggggacagggcaggcagggttttgtgccaagggctggtccagttctcactaaagtgtccaggattcctgggggaatcctgccctcaaaggagggacttttgtcataaaatcctccctgagtctgtcttttatgtgagccaagatttccatccatccggcgctgtgtaaagatgaatttaaccctagcctctctcctatcacactgcttctcctgctgtgtcccttgggcctaggccaggaaagtggggtgccagataggggtgcagacacaagtcctcagtgggggattgagcctgtttccttgctccagagctccccatgcttcatgggccaatatcagggtcacgacccatccccactgagcaccaggtccctgtccaaatcaaaccttggccagagattcagggtgggttggctagaaaaaccatcaactatgtacgtgtgtgtgtgtgtgtgtgtgtgtgtgtgtgtgtg

SEQ ID NO: 151147 - DNA, 2124 bp, Homo sapiens
  misc_feature (1)...(2124): n = a,t,c or g
aattgaacccccctcgagtacccgtgccggaattgccccggaaatcccgcgccgacccacgcgttcgcggacgcgtaggaaaaatacgctttgtttctcaacctatcatgactggccccagagagtgagctctactattcttgggagtgactcctgtctaacttttcatactggcgagaagaaaagaagcctattttaacactttcgcggtgctgaaacacattacttactttctgaagatgtcccagggaatcctctgtcaattcactgccatatgtaatctatatgataaggaatgcatcttccttctaagtactgcccaaactcttgccagctcctctcccattgtcccttcatgtgaatatttcttggctaccttaggggaaatatagatcagtcttctccccatccatcctctcaaacataatgagattgtttactctttagatttatgcagtgaaaatgcccagtcaggtctgaatcgtcagtgcattatattgactctgagcactttagaatttagagttgcaattgaatgccagctgtggagatggggtgcatatcagatatataaataaagctcaggtttgctagggaaccaggtatagagaaaaataagtctgatatgaggaaaattgcacaatttagagtagttatgccgtagagaaaatttccacaaactagggaaatgtagagagttattctatagaatactccaaaagagggaaagtatgtgatttttgggaaacagggaaaatcttgcaaacttctttcttcacttcccttttgtgtttagctgacccctcccaaaggggaacaatgccctttgggaagtttggggaagaggtaacggggaaagtgggccctggatccccctgccttcccataccttcactccctcccatcccatcccttcccctcccctccttcccccctcccagcctaaatggacaattcctagcccaacattgagtcacctcaataagtcctcaacacgtgggtgtgtttgcttgagattgtcccagcgggttgagcagtttggtctcacctccctcgctagttgagacccaaaaagagacaaataactttttcatggtctttgaaacgataatgcttatttcgtggtcaatggctttaaaaaaatctggtttcttgttttcttcaacaaactcacttagtttccctttaaatgatattgtaaaaattaaagtaatcttgaaaaatgttttgacaaaagtaaaattaaagggacatcttttcttgttttgttttttttttctattgccacacatgaccgttccttcacctttaagcaaagagagtggttcagatggtttctaagatgccaacctgacctcgcattctgtcattctacccagctcttaattcaatttgcttccattatcctaacaggcttctttcttacttaggaacttgggaaagggctgctgtatttaataccctccaacactaacggcaggacttaggatagggtactgtttattggaaaacctactgaggtggaaatgtgcggttttaggaccttcataaacatctcatttaatctttctagcatccctgtgaaacagcccatgatttcacgttgataaacaaagaagaccaggggtccccagggatgtgaagcatcttgcccaggctttctgctgctggtgaccagtgtagccagggantcccaacccaggttttcctggactcaggaaagactgaggctttttcctgggatgttattaaatagcctaattgtgtcccaagcaacccaagggcccttgaagtcctgccttggttcctgccttatggccttcacattcaagaaaatggagcctagtcccatgtcctgtagtccccaatgctttgggaagcccatgatgggaaggttgtcgggaggccaaaagttcaagaaccaggctgggcaatatcacaagactccatctctacggaaaagtaaaaaattagccagtcatggtggtgtacacttatggtcctagttactcaggagacttaggcaggaggattgcttgatcctaggaattcgaggctgcagtgagctatgattgcacctctgcaccccaccctcggcgacacagcgagaccctctctcttaaa

SEQ ID NO: 151148 - DNA, 371 bp, Homo sapiens
caccgacactgccacccctcccatactgtggacgggaggatggagtcaattgacgtcgctaccgacggcggttagaggacgggggtcctagcggtctcaggtctgtcggtttccctgcgtacggcggaactgagtacgagaaagctgctcatgaactcggaacagcgcatcaaccggatcatgggctttcacaggctaggcagcggcgcggtagaataaagacacacacaatcaatgcaacacgacagcgataaactgaactccctcatcattccttccgtttcaaagcgagtagtgctggtcgattcagtctgtacaggaacgactgaccatcagggtggcgtgctcgagcgaaaagtgaccacactggg

SEQ ID NO: 151149 - DNA, 408 bp, Homo sapiens
cggacgcgtgggcgaacgcccgcagcagggtcagattggaggtggccggtctccgtcgtgacctctgacggtttctgagcgttggcctttggcacgcgctacacccttttgctttggttctgccatgccgatgtaccaggaagagtctaacctgtctctgcaagctcttgagtcccgccaagatgatattttaaaacgtctgtatgagttgaaagctgcagttgatggcctctccaagatgattcaaacaccagatgcagacttggatgtaaccaacataatccaagcggatgagcccacgactttaaccaccaatgcgctggacttgaattcagtgcttgggaaggattacggggcgctgaaagacatcgtgatcaacgcaaacccgggcttccctccccttttcct

SEQ ID NO: 151150 - DNA, 494 bp, Homo sapiens
ggaggtggccggtctccgtcgtgacctctgacggtttctgagcgttggcctttggcacgcgctacacccttttgctttggttctgccatgccgatgtaccaggtaaagccctatcacgggggcggcgcgcctctccgtgtggagcttcccacctgcatgtaccggctccccaacgtgcacggcaggagctacggcccagcgccgggcgctggcccacgtgcaggaagagtctaacctgtctctgcaagctcttgagtcccgccaagatgatattttaaaacgtctgtatgagttgaaagctgcagttgatggcctcttcaagaagaatcaaacccccaagagccaccttggatggaaaccaacataatccaagcggatgagcccacgactttaaccaccaatgcgctggacttgaattcagtgcttgggaaggattacggggcgctgaaagacattgtgatcaacgcaaacccgggctcccctcccctctctcg

SEQ ID NO: 151151 - DNA, 456 bp, Homo sapiens
  misc_feature (1)...(456): n = a,t,c or g
ctcgagttcactacacagngggggaattcgatatctctgcctgggcaagagtgtggaggtgccgaggtgtcttcattctctcgcacatttccacagcacctgctaagtttgtatttaatggtttttgtttttgtttttgtttgtttcttgaaaatgagagaagagccggagagatgatttttattaattctttttttttttttttttttttttcactatccaaacctttaaagggggccccctttccccttttttttttttgctctttttcattaacccctttccccggtttttttttttcttttaaaccccgttcttaagggccttggccttttttaaacctttttttttttttaaaatagttttggccgaaccatattttttttttaccaacccccaaattttaatgagggggggggggggattttcgggccggggttcttaaaatatattatt

SEQ ID NO: 151152 - DNA, 764 bp, Homo sapiens
ggaggcaggagatgagacttgccagtgcctttagaggccactgtccaccccagaccctccactgggagaagcagaggccaggataggctgacttgtatgggtaggggattatttcagtctctaagtcctggccagtgtggacctaggtccctctgagagacactcctatccatggggaggtagcgtgtgacctcaggcagcctaccataatcctggggcttctctggaggaccccacacagatctatcataggataaatctacttgtctgtcgtagatctatctcaactaggaccattcatcagtgggccatttaatcagcccacttcagccaggaggcgcacaaacatgaagctactttgcactgaatcctatcagtgtggtgagaacattacacatgcctatagggaatgatctgtgtttttggttgatataaaatagagagcaattaattactgtttagtaaatgcagggcagtggaaaagaatctttcaaaagaggatccccacatggaaacaatcaaggtggcttttgtgatgacaagtggggaacgagatactggactaactgagcccatggctgggtagaggggaagctgaggctcatagtgagatgggccagccagaggtcatgaaactagtctggggcataggggggtctctggagatggcggaagcatgggtccctctctcactgcgaatgcactgccttctatatctcgtcctttccccgactcggtcaccgattctggcagcgcccctctcc

SEQ ID NO: 151153 - DNA, 384 bp, Homo sapiens
aaaagactcagagaggtcaaatatacactgatggatatgttagactctgaaatcagaaggccattggtgacttgggaacagctatagtgaaaaagtgagtgaatggcaaaaacagattttccaagaagtctggttatgaagggaaggagaaagagagagagaggagtatgaggggagggaaaatgggggtggaggggtaatgaaatagaagtatgagaccatacgctatagggactctgttaaaggccgattcacgatcttctaacaccttaccaagaactgcctacatctgcgggcgatcggtcttggagctgatgactcccacttttattcctgtgcaaatgatgtcgcggactctggaaccaccttattttttgattccga

SEQ ID NO: 151154 - DNA, 364 bp, Homo sapiens
cgactcttaacttgccggggactgtaaccggaacccggtgtctgctcctgtcgccttctgctcctaatccctacccactattcgtgagtgcatctacatccacgttgtccacgctggcgaccatattggcaatgcctgctgggagctctactgcctgtaacacgggatccaccccgatggccacatgccacgtgacctgaccatcgggggcggagaggactccttcaacaccttcttcaccgagacgggcgctagcgagcccgtgccccgggctgcgtttgctgacttggaacccacagtcatcgatgaagttggtactgtgacctatggccagtatcttcagctttgacagcttatcaagtga

SEQ ID NO: 151155 - DNA, 1257 bp, Homo sapiens; identical to SEQ ID NO: 125428

SEQ ID NO: 151156 - DNA, 1618 bp, Homo sapiens
  misc_feature (1)...(1618): n = a,t,c or g
ccgcctgcaggaattcggcacgaggggtttgccgccagaacacacggtgtctgtgaaaaactaacccctaaaagccaaaatgggaaaggaaaagactcatattcaacattgtcgtcattggacacgtagataacgggcaagtatcaccactacttggccatctgatctataaatgccggtggcatcagacaaaagaaccattgaaaaatttgagaaaggaggctgctgagatgggaaagggctccttcaagtatgcctgagtcttggataaactgaaaagctgagcgttgaacgtggtatcaccattggatatctccttgtgggaaatttgagaccaagcaagtactatgtgacttatccatttgatgcccccaggacaccagagacttttatccaaaaacatgatttacaggggacatctcaaggcttgacntggtttggggggccccctttttgggggggttntcccctgattgtttgctgctggtgtttggtggaatttgaaagctggtatctccaagaatggggcagaacccgagagcatgcccttctgggcttacacacctgggtgtggaaacaaactaaattgttcggtgttaacaaaaattggatttccacttgaggccaccctacagcccagaagaagatattgaaggaaattgttaagggaaagtcagcacttacattaaggaaaattggctacaaccccgacacaagtagcattttgtgcccaatttctggttgggaatggtgacaacaatgcctggagcccaaatgcctaacatgccttggtttcaaggggatggaaaagtcacccgtaaggatggcaatgccagtggaaccacgctgcttgaggctctggactgcatcctaccaccaactcgtccaactgacaagcccttgggcctgcctctccaggatgtctacaaaattggtggtattggtactgttcctgttggccgagtggagactggtgttctcaaacccggtatggtggtcacctttggtccagtcaacgttacaacggaagtaaaatctgtcgaaatgcaccatgaagctttgggtgaagctcttcctggggacaatgtgggcttcaatgtcaagaatgtgtctgtcaaggatgttcgtcgtggcaacgttgctggtgacagcaaaaatgacccaccaatggaagcagctggcttccctgctcaggtgattatcctgaaccatccaggccaaataagcgccggctatgcccctgtattggattgccacacggctcacattgcatgcaagtttgctgagctgaaggaaaagattgatcgccgttctggtaaaaagctggaagatggccctaaattcttgaagtctggtgatgctgccattgttgatatggttcctggcaagcccatgtgtgttgagagcttctcagactatccacctttgggctgctttgctgttcgtgatatgagacagacagttgcggtgggtgtcatcaaagcagtggacaagaaggctgctggagctggcaaggtcaccaagtctgcccagaaagctcagaaggctaaatgaatattatccctaatacctgccacccaactcttaatcagtggtggaagaacggtctcagaactgt

SEQ ID NO: 151157 - DNA, 991 bp, Homo sapiens
ttttttttttgggcttaaaaaacaaactttattccaaattatcaaaaaaaaagtgttaactcctggaaaccatttaacagatttcttttaaaccccataggggtccataaaacccaacctatcaacaaaaaatagcattgtgccccttacccactttcaataatggacccttcaggaggaacatttagagactccccacacaatttggggagccataggcaacacatattttatattaagcaaagacagcattaaaaactaaaaatcctcaaatttcaagagaatacctgttcaagtctttgatatacatttgcacatgagaaaagaaatattttaattttaaaaaagagacccaagtctgagtgcttatcctttcttcaaatgtaatctcctgtccacccttcattttatgactgcatacgcctcactctacttcatttacactgaaccagtgttcgttcaacatgattggcttcactcgaaggccctctagatcccatttcatatatccccatcgaccaccattattccccttaccatggtttcacagccttatactgagcattacattgtaaccaagcttggggaatttcaggtatccaaaggtaattatatacacaaacgcttctgttttattgcacagttcacaatatagctggtgattacacaaccaaccatgttaagatgaatatcggactatttagacaaatacatcggattttgtccccaaccacaaatgaaacaagaaagacacacatattcgccaccatatcaaggttgtgtttactctgtggtgcagtcctgagggctcataccactctcagtgtgttcaatacggaatccataacatttctggtggcatcacacatgaagtataggacacaagaccataagtgtcctgcgctcatgagccatttgtgccacagacgtaacagaaaggccacttttaaagcttttcagatattcaatcacatttgccttttcaattttt

SEQ ID NO: 151158 - DNA, 372 bp, Homo sapiens
  misc_feature (1)...(372): n = a,t,c or g
gcaccttggggggacccaccacccattgggcccttcaaaaaaggggtnnnnnnnnnnnnnnnnnnnnnnnnnnnnnnnnnnnnnnnnnnnnnnnnnnnnnnnnnnnnnnnnnnnnnnnnnnnnnnnnnnnnnnnnnnnnnnnnnnnnnnnnnnnnnnnnnnnnnnnnnnnnnnnnnnnnnnnnnnnnnnnnnnnnnnnnnnnnnnnnnaaaagaaaaaaaatactaaggatcaacaaaactaaaagctgattctttgaaaagataaacaaaatttataaaatgctaactcatttaagaagagataagagacaaaaaaaatcagaaattaaaaaaggtgatattacaactgataccacagaaatgaaaaaaag

SEQ ID NO: 151159 - DNA, 637 bp, Homo sapiens; identical to SEQ ID NO: 144817
  misc_feature (1)...(637): n = a,t,c or g

SEQ ID NO: 151160 - DNA, 805 bp, Homo sapiens
  misc_feature (1)...(805): n = a,t,c or g
cctttgaacaccttgacaaggatcccagattcactggacgccgtattacaacgtcgggactggaagaccagaattcggcacgaggaggttatcaataagctcctagtccagacgccatgggtcatttcacagaggaggacaaggctactatcacaagcctgtggggcaaggtgaatgtggaagatgctggaggagaaaccctgggaaggctcctggttgtctacccatggacccagaggttctttgacagctttggcaacctgtcctctgcctctgccatcatgggcaaacccccaaagtcaaggcacatggcaagaaggtgctgacttccttgggagatgccataaagcacctggatgatctcaagggcacctttgcccagctgagtgaactgcactgtgacaagctgcatgtggatcctgagaacttcaagctcctgggaaatgtgctggtgaccgttttggcaatccattttcggcaaagcaattcacccctgaggtgcaggcttcctggcagaagatggcagaagatggtgactggagtggccagtgccctggcctccacatacccactgagctcacttgcccatgattcagagctttcaagggataggcttttattctgcaagcaaatcaaaatataaaatctattcttgctaggagatcaccaaannnnnatnntnnnnnnncccccggattttttatttagcgggccgcacctttttccccttttagggggggtaaatttatattgggccttgggccggggttttcaaaagcggggggannnnnnnnnnaaagagccc

SEQ ID NO: 151161 - DNA, 411 bp, Homo sapiens
aatcctcctgtcttggtggggattgctttaaatagggtgctgaggaaaagtctaagaagtgacatttcagccaaaagctaaaggagaaaagggagtaaagctgtggctatttggggaaagggatccaggaaagggagtggccaaaggccttgagcaggacagccagggccagaggggattcagctggggtagccacagatcagagataaaggggatcagatggggccgcacccgtgttggtaggtttgtgggactttgactccaaacacatctttttaagttttttgttgtgtggctgggcgtgatggcgcacctggggttaaggctcacttccctgcggctcagaagccatgggatggtggcttcccagggccctgaagtgctggagtcgggccaccacctatcccaaga

SEQ ID NO: 151162 - DNA, 412 bp, Homo sapiens
tcctggtctccgtgtccagatgggttctgcacctatcgggtcttaagatcctgcccactctgcaacctgaatctgtcatagggtttgaatgaatcctctttgtcccctaccaagcactgcaaggattacgaatcccatttacagatgagacaccttgggttcagggcattttggtgactgactccaggtgtccgaagcccctgtttaatttcatctttgccaccaatgctagtctacagcacctgggagtggtaggcagaggacagtctccgaggagccatagccacatagcactgaggatgggcagagggggcagtggggagggacgagtctccagcacccagcacaggactgaatgtgcaggtcccctcgaagccccagctcccttcctcccaaaccactcccagggatg

SEQ ID NO: 151163 - DNA, 1880 bp, Homo sapiens
  misc_feature (1)...(1880): n = a,t,c or g
caggtgagaacttgtagcttccaggctgactggttcaggtgtgaagatgggaggagtcctcgccctgctgcctgcctgggccctgttccctttcaaactgcactgctgcatactcagagaacacacagaaagatcctccaccgacctctcaccctgcccagagcccacaggcaccaggagcgaggccctcatcctcttcctccccagcccactgggctgaacacttggcccagttgggagtaaccgctgactgggcttggttggtggaagcaggattctttctcccctggggcagactcagaccagactcaagctcccaccagcgttccacagcagtccagcttcccctgaagaccacacagtgaaatcaganccccaggcccaggagcaaagggctcctttgtggaaagccagcggccagtcaggccagaacaagaaacaaaaccagaagagaaaatctaagcccaagggacctctgccaatgtctggggaagggaaatgaggctccagaaacctgacgcaccattcgttaggtctgggagaagggaatgactaaaaagggctcctcggaattctttattcctgaacaagggaaggaggcttggccaggtgggagggaggggcactacttgtacagtggccttgactcgacgctcaatgtgtgacaggtaaggaaccgtgtagcaggtgaagtccccagggctacttgttcttagcctggagtccagggatgggtttcattcagggagtcccagtggctcctgaaaattgcttggggtttttgaagtctacagtcagttatttctgttttcctagggaaaggtccgtaacccttcatcaaattttccaagggcttcgtgtctcccaaagagctaagaagcactgctcagaaaaggaaaatgaaagcctggaaggtttcattcacatcttggaagaaggttttgcctctaagaaaccaggtctgccacccaactttgctgtggttagctttagaccaatcactttcctgtctctgaactctagccaagtggtggaccaggcgggagcagagaagccagctctccacacaggcatcgtcctaccaccagtggcagagagtgggggcctgtggccaggcagccaggatgaggtctgccccagctgtgattcccaccaggcctggagagtttgtccaccagagcttggaatctgcttccaattccaggctccaaccagtcacctccactggtcaccgcagtgcacctcttgaggcaggtcttcttactggatgtgtcctcatgcccgggtgcagtgccagccaggcctccatggaactccattcctggtctccgtgtccagatgggttctgcacctatcgggtcttaagatcctgcccactctgcaactgctctaggccggatgggccagagaaggagaaccatggccaggagccggaagcagctgtgcgcagccagccagagggtcccgagggaggaacgcgagcggggcggccggagcctggcggcggcccacaccttcaagagcccaaagccagcgaaacccataatcccgggatcccatctagagagggagctgcggcccagggccatctccaggggtcggggacgcacgtgcggggcgggaagcagccgtcggcagcaggccccgggcgcatcatagcacgcgtcctaagtgggccgcctggccctcgggcccgtggccgtggctgcgctgatgggtcttgagcgagccctcgcgcgcgaagctcttgccgcagcgggggcagaagtagggccgccgctccccgaagacgccggggcggcgcgggtgcggcgcgggcatgcgcgcgtgggtgcgctggtggttgagcaggaagcgcggctcgcggaagcagcggccgc

SEQ ID NO: 151164 - DNA, 1211 bp, Homo sapiens
attcaatagatgcactattcttgtttttactgcatgaacgtaatccagtatttggaaagtaatccagtttgaaatgtgaagatgtattccggcagaatagtgagtagaatgacatgcttactatacagaaggcaaaaataggactctcaggtaatagtttaaggaaacccttgattccttatatatgtttaagaaggttagttttctgtttctttgcagtttttcttctagagtccatagcaggaaagtatgtaaccagaattggttagtgtgaccccctcaagtagcaagtgatggaaaataagagtcaaataccttgatgtttgtgatctctaactcaaaaaatttgaagtgttttaagttgtttctgggtaagggagatgttaggagaaaggaaatgctgtaactaaagctcaattattatcagttctatgctaacgtatacattttaatcatagttacctaaggcagcatgcatttaattggaacctttaaaatgttccccactgcggctggggcctaaaacaaacttttttgaaaagctgttttcttaaaagattccttaaattcagatatgacagctaaattacctcatcataaattacttttatactacatcgtttccaagggttttaagagtagcttgaatgtttatttcacaagggcacccttaaattctatagaaataaaacctcagatgagtctccctccctagagtgttacaatgaatgggagtttacaacttttatgtgtcatgtttcccaacagctgtgtttggggtggtcactggcaggaggggaccgtatctcagaatggcacattatttctattttacacatgagcaaattgaggcatagagagttagataacttgcccaggttacacagattgtaagttgatgaagctgggatttgaatcttcacatgtgtgtacttataaatacaaatgtaaggaaaactctagtgagtccacctcttatattgagttattactgtgtgagtgccaagtactgttttagatgctttacatatactattttgtttaatatcctttttaaagaataaactaggttggtgcagtgggctcacgcctgtaatcccgggactttgggaagctgaggcaggtggattgcttgagtctcaggagttcgggaccaggctggttaacatggcgaaaccctgtctttactaaaagtacaaaaaattagctgg

SEQ ID NO: 151165 - DNA, 460 bp, Homo sapiens
tccgtaaagaagataaatattttttggaatcggcctgtgtcctctggggtgaagagccagcatagagggccccgagcgcccaccgtgccaacccatgccctcgtctgacctcgctccctttctccccatagaccagccccacccccttctgtgtcggtgggcttcaggccaaggggcaagagaggcacccagggagacaaggggaagtgtcttgggtacagggggccgcagcagttgtgaccacatggtaccccaggcccaacgcagggccgacgggcaagaggctgttatctgcaacctggcgcttgggggcctttgttgagtcctccatgggaatgtgatgtgtgagagaggagataggagatacaaaaacaaacgcccctgggatcggcggtccggacaggggcagggaaacaacacgccaaactgtgccctttcgtgtccatccgagaattacaga

SEQ ID NO: 151166 - DNA, 539 bp, Homo sapiens
ggccgccctttttttttttttttttcccgtgaagaagataaatatattttggaagctgcctgtgtcctctggggtgaaaagccagcatagagggccccaaacgcccaccctgccaacccatgccctcctctgacctcgctccctttctccccatagacccgccccacccccttctgtgtcgctgggcttcaggacaaggggcaagagaggcaaccaggggagacaaggggaagtgtcttgggggacagggggcccacagcagttgtggccacatggtaccccagggccgacgcagggccgacgggcaagaggctgttatctccagcctggcgcttccgggcctttcttgaggccaccatgggaatgtgatgtgtgagagaggggctaggagagacagagacacacgcacctgggatcggcggtccggacaggggcagggaaaccacacgccctactttgccctttcctgtccatcccagacctactcagatccctcagtgcaaaagaaaacagaacagtgaggactgggggttagggga

SEQ ID NO: 151167 - DNA, 540 bp, Homo sapiens
tggttcgtgcacgatggcctgcaggcccctgagtctcagtgagcgtgggcctgcggcctccgtgggaactgcaggtctgggtcctctgtgtgccccggggccaggccaaaaccaggctggaacccgccggcagggcccccgaggcgcctctgcctgctctctccgttcttgccggcggcagcgattcggactcccgctttcgacaaagtctcagctccgcagcagcacccggcgcggactcgctgggcgcgcggactgagctccgggtggaaccaggaccctcgcgccctcgccctcgccctcgccctcgcccgagttggaccaccgcgagcaccgccgacgccagccgcagagccgcgggtgcgcggggaagaggaaacgaaagcgcgggctccggagctgaggtgagaagtgagcagaaagtgaaaagagaatccatcggaaacagataaaaaaggaaaaacaaaacccactcgaaaagaaagaaaacgttacaacaaaaaggataaagtaacgctaaatgaaataaaaaggagccat

SEQ ID NO: 151168 - DNA, 349 bp, Homo sapiens
ccccgcctcctccattcagcagggagggcggagggcctgcttggaagtcacatggagctgcagcatctggaacccaacagccacaggaggcctggatcggggctccgtaaggcacagccgagagggaggtggggaggccccagtccgagtccagggcccaggggagatgattcctgcagtccccaaaagcagctggaccctacacaagatgcagctcccaggacacgtgtgttccactctcggcaggagaggagacgaaaaaggagaggccgggccagaggctcacgcctatgatcccagcactctgggaggccgaggccagcggatcacctgaggtcaggagttcaag

SEQ ID NO: 151169 - DNA, 498 bp, Homo sapiens
atgaagccccctaaaggtccaccatctctacaagttccatcagcccctcccaagaagttgaggacagatggcagaatcacaacacccagcacgcacagtctgcactggcagctgattggatggtgtccattcacactgcgtgtgggtcttcctctcctaggccaccaactcaactgtcagtcttctctggcaacaccctcacagacacacccagaaacagtactccaccagccatctaggcatccttcaatccaatcaagtggacacctaatattaaccatcacaagtcctggaaccatggccagtgctgctagtgtggtcatgagacagactggctctgaccactttccatccttgcatctctccttgagggagtgcagctcctcaccagcaatggaacaaagctggacagagaatgactttgatgagttgagagaagaaggcttcagacgatcggtaataacaaacttctccgagctaaagaagctaaaaccttga

SEQ ID NO: 151170 - DNA, 979 bp, Homo sapiens
ttttcaattggacacggggtctcgctctgcacccatgctgtagtgcagtggtgtgataatggctcactccatcgctaaaagcctccaaactcctgggctcatgggatccttcaacctcagtctcccaagtaggtgggactacaggcatataccaccatacctggctaattttcttatttttttcatagagatggggtcttgctacatcacccagggatcccactttcctactttaaatggcctgtctttatccagcttagccaataaaatccaaggaaacattgggtcagacctagtagaggacacagggtgaaaggacttctatgggaggggggcagtggggcagcatcttgagggctgaagctgggctgtgggattcatttggcggagggggctttgggagacagcactggacttaaaagtgcggaagcttgaggctgcttctgggacagggctggattctcactggtgagaaggccccatgaagccccctaaaggtccaccttctcctaaaagttcccatcagcccctccccaagaagttgaggacagatggcagaatcacaacacccagcacgcacagtgtgagccctgctgcctgcccctcttctcttcaggagcccaggatttattctgattgtacagaaccactgtgactattatccaaccccttcacactgggacccctcctccagatgtagttggagttgaagggcccaggcctgctgcatgtgcagtccagtcatgtactcaagacagggttctcacaaacagctttctgcagaaaggcaaacagaaaggcttacaggctcaactcgtgagcagaacaaaataaccctggattttccttcataaaggaaaagtcattaaaaggcaatgattgggaaagaggtcagcagaccaatttagggatttccccatattctgcaacactagttacgtgattttggactcatcatttaacccttgaaactgcttcc

SEQ ID NO: 151171 - DNA, 576 bp, Homo sapiens
  misc_feature (1)...(576): n = a,t,c or g
ggtcgactttttttttttttttttgtaaccatgatggtctttttaacaagcaagtgactggactgtttgcaaaggaaagaaaacattttccaaggatagtaagtattctacgaattcctagccagcttttgtcttcttgaaaattatcaccataaggaaagaattaaattacactggcatttataagggattaggcacaccaggtaccctatgcttcaatcctgtcctttcatcttccttccatttctctgtcttgggacatggtaatttggaggtgagaccaccctttcttgtccctgacaaagaatcctgtcatctgcagaatctctattcttccagctggctcctagcagggtagggagagacacagaaagagagagtcaccgttccacttcagatgctgcaagttgctgtagaggagctgccccgccgtcccagccgcccgggtgaactcctgcaaactcatgctgcaaaggtgctcgccgttgatgtcgaactcttggaaagggatacaattggcatccagctggttgtgttccngaggtgctggagccactcccacacctgttacttggt

SEQ ID NO: 151172 - DNA, 863 bp, Homo sapiens
ccaggaacgagcgtcacgcttatgataaaggaacctggaaaacccgaagagctatcatgactgtgcaatgaagtggcgaaacgaatgttgaccgcgcctacaacctgctttaccagacgctggactggacagacagctacgtcacttgctaagaaaacaaggagattgctgcaggccagcggaatgaaagtcattctaatgactggaccaagtaccaggtgtgggagtggctccagcacctcctggacaccaaccagctggatgccaattgtatccctttccaagagttcgacatcaacggcgagcacctttgcagcatgagtttgcaggagttcacccgggcggcagggacggcggggcagctcctctacagcaacttgcagcatctgaagtggaacggtgggcacactggcatctcaaaatcatgcaaggagacccgacatctgtttccattcttctacctggggccaggccatacgttagccacatgcagagctgtctccaagagactccagcccaagctccagtgtgccgtgcatagctttgtgactcccggcattccctatctggatgaaattggttatagagcaagagatttaagagaacctgggcaaggtgtggctgccctcctgcctctgtcttcagatggcaatccccgccgcagacccggcttacccaagctgaaagcacagcgccgcgttcggtttcccagtaacaaaggcaggggtggaccttcttctccacccttccactcagcttttctgaactggcaacacaagaatgtctggatggtcaagaaggaattatcaagttatttgggacctctccagtattaccctggctccttcggtggggctatctga

SEQ ID NO: 151173 - DNA, 442 bp, Homo sapiens
  misc_feature (1)...(442): n = a,t,c or g
ctgcggtnnnnncccggaatttccgggtcgacgatctcgtctcgccacggtgctgtggaattctctggtttttcacgcaaggtcaggcgtcctgctggcgccctctcgccaccctgccctcccgtcagaagcccggctcctcgccggggaaggccggatgctggcccgccgggacctgggacttgtgccacatggagtgtcgggagtctccattgccgcgagttctacaccacagggccaggctgtttgctccccatcggtcgctgcccccagcaccctgttgttattaaggactcatttgcttggagcggcatcattacaagggtgtgggcaccagatactgctacaccatctcatcggcatggacctatatgtggcagcaagtccatctcatcgcttttggtgaaagtcagtccagtttgtaaagattctcattgtcact

SEQ ID NO: 151174 - DNA, 1626 bp, Homo sapiens
tcaagtcatcagttcccagcggttcagccagcgtgtcttgtgaattctcccagggctctctggttttagcagggtctccatgtgcaaaccttgcctttgcacaagagccaccatggcaggaggttgaccaagctgttctggggaggtgaaaggtgctgagaagttgatgcttcctcctaagtgctgtatggagcaggcttggcccagatccaacatgggcacccagcaaagactggttgtctcctggtgtccctgcagccctcccagccatcccctcacttcccactgtggcatgctgcttacagctctctccctccacatgcctgagggcctttctgcaaagaggggttcagagatatccatgaccagccagtctaaccttttcagggtgggagggcagagcagaagttttacagtggatacgaggcatctcagtgcaaagcggctgccagcatacccggacagcccggcacatgcggaggcacttgccgctgctgccactgcgctatgacaaggagttttgtgccttcggaggagcgccaaatccaatgacgaatgagaatctttacaaactggactgactttcaccaaaagcgatgagatggacttgctgccacatataggtccatgccgatgagatggtgtagcagtatctggtgctgccccagtgttacaccgtttatccccagcggcacagccacatcctgaatccttcttcaagagtcctgggagaagaaaataagccccgttaccctctcctcctttctgtcttggagagaagaggcaaaaggcaacttctggggaagaaaaagaaactccttgttctccgctcactttcagaactgatgccctggcagacatgaagcgtgctttcggcacgaaggaggaagaagaggaacgcgcagggcttgattcccggttctccagaattcggaagtggaagaagccgtgcaagcgcactgtgcatcgcgcctgcagcctttcgaaaatagaaaaatagggagtatatgtagtaccccacacccttgtaatgatgccgctccaagcaaatgagtccttaataacaacagggtgcttgcgtgaaaaaccagagaattccacagcaccgtggcgagtgctccccggctgcgaccgcgcctcgggccgcgaggatgttcctatggcgccacctagtgtcggaggtgcagacaacgctctggcgagggctgcaaggacggcctgcgaccagccctggaacctcagacttaggctgggaccttgggatgggtcatcccaggggctccagctgtggacgagtgatgcccttccaccaggcaaaaagccccccagacgtctctctcttcctgctgcaaccaaagctccatcctccaactcctttccaacgtcagtagctggctccaccaggctggccccagttgagctgtattctgcagaaagaacttccaaacgaaaggaataaggcattgttttaccaagagccttttctccctcaagaaacacaatgtaaactaggaaacttgcactttcttttccctttgggtagatgagcagaagggaagagttactacccagggtgaggtcattcctccatggtggtagaatatctggttctttcagtttccccat

SEQ ID NO: 151175 - DNA, 357 bp, Homo sapiens
gcctcttctctccaagacagaaaggaggagagggtaacggggcttattttcttctcccaggactcttgaagaaggattcaggatgtggctgtgccgctggggataaacggtgtaacactggggcagcaccagatactgctacaccatctcatcggcatggacctatatgtggcagcaagtccatctcatcgcttttggtgaaagtcagtccagtttgtaaagattctcattcgtcattggatttggcgctcctccgaaggcacaaaactccttgtcatagcgcagtggcagcagcggcaagtgcctccgcatgtgccgggctgtccgggtatgctggcagccgctttgcactgagat

SEQ ID NO: 151176 - DNA, 791 bp, Homo sapiens
aaaggaaaaggagtgggagaagaaagaatccgcctgagtggacctgactccattccattcatggctccctatttgttccactcctggatcaagtttttaatttaacaagactgcattttgaggggagttttcaaccccatctgtttggggccagagtgtgccccacctggtggtgcaattgatttctgaattaaccgggctttatttcagtacaatagagcgattgtttagttgcttttaagcactaggattcttggaatctgatgggcaaaaaaataaatcagactgcaacgtgtggttctctgggctgctaattgcatctgacccattatcctccacagtcctggttcaaactttgacacggctgacttggagtttgaaatgtaaatggaagggctgccttttgcaggtcatcatacctgcagaaagtccattcctggaacactttccaaggcaatgagaatctttacaaactggactgactttcaccaaaagcgatgagatggacttgctgccacatataggtccatgccgatgagatggtgtagcagtatctggtgctccatcctccaactcctttccaacgtcagtagctggctccaccaggctggctaaggagcgaggagaccatcacctcagaaagcagccccgctgggaggtccacggagcagttcgccgagctgtgcacaggccctttattttccatctgtcaagaaaggaagctgcctgttgcttatttcctcctcccactcttctcccttcccgccagcagactcttccactttcaaaat

SEQ ID NO: 151177 - DNA, 321 bp, Homo sapiens
acagaaacgagggaaaacactccctgatttttaatctgacttcgggtaacagctcaatgggcgtcacacacacttccagaccctgtggtgggaaaccctgggagcgggtggaaggagaaggacagagactcagaatgggggtggagggacctgaaatccaagacctgggttgaggtggaggcggaagggggcctgtcaggggatacattccaatggctcccacaggggagcagccagaggcctgggctccctctggtgaaccagggggcaggggtgcaggagactaaaggggcaggccctctttgttaccctcccagccac

SEQ ID NO: 151178 - DNA, 333 bp, Homo sapiens
acagaaacgagggaaaactctccctgatttttaatctgacttcgggtaacagctcaatgggcgtcacacacacttccagaccctgtggtgggaaaccctgggagcgggtggaaggagaaggagactaaaggggcaggccctctttgttaccctcccagccactctaaggtgtggggaaggggagccacctcctctgtgtcagagggaggctcacagagggcaggtcacttgcccaaagtcctgcagcacagcagggactagaatgcaggaacactagactgcccaaggtcagggcggttgctgtgaggctgtgctaccccccacttggtggac

SEQ ID NO: 151179 - DNA, 999 bp, Homo sapiens
tgcctggccgggtttctacctctcgtcaccggagctgatcactgtcagttttgtaccgatttagaaataacaataataatgaagattctaggaatggcatgagggattgatgggggacttggagggagggacaagtggtgccctgtcccctgctcccctggccaaagaaagctgtccttgaggctgagccctcagccctggcctggtggggggacagcaaggtcccttgttataagaggggcagagaggacaactccgctttggccaacctagccaaggctgcagcatatagaccaggaaatcaggtagcccagactggtgatggagcaaagtctgggggaagggtcgtgggtggggaatttatcaccaacatccattgtagggggaatctatgattctgcttccccagcggattcccactctgtccaccaagtggggcgtagcacagcctcacagcaaccgccctgaccttgggcagtctagtgttcctgcattctagtccctgctgtgctgcaggactttgggcaagtgacctgccctctgtgagcctccctctgacacagaggaggtggctccccttccccaaaccttaaaagtggctgggagggtaacaaagagggcctgcccctttagtctcctgcacccctgccccctggttcacccagagggagcggatgaaggatggcagcatctcacatgccccatcaccaactctgaggcaccctggggtgggggggcggagcccgaggcctctggcctggtcccctgtgggagccattggaatgtatcccctgacaggcccccttccgcctccacctcaacccaggtcttggatttcaggtccctccacccccattctgagtctctgtccttctccttccacccgctcccagggtttcccaccacagggtctggaagtgtgtgtgacgcccattgagctgttacccgaagtcagattaaaaatcaaggagtgtctttccctcgtttctgtaaaaaaaa

SEQ ID NO: 151180 - DNA, 431 bp, Homo sapiens
gaaagcttcagatttagaaccacagggctttatttttttccccttttctcttctgttccatcctttccctcatgggcggggggggtgtcataaaagtctgggaaaggaaagcaagcatcctcttgggctgagtcacagaaagagcatggagagacggagggtatggagtaaattgggaggcccaccaaacagggcttggggcagtggacagcagtgtgggagaggatggagaggaccaataagtcaagggcatggccaaacgcctgtgagggtcctggagcagtgggcaactacatcgcctgggccagcggccttccctagatgctcaagaccagagctgccagaacctgggttcaagctggggtcagagagtcagcccaaggctttctgaataaaaacagaaggatcttggaaatggggctttccagaat

SEQ ID NO: 151181 - DNA, 428 bp, Homo sapiens
  misc_feature (1)...(428): n = a,t,c or g
nnnnnnnnnnnnnnnnnnnnnnnnnnnnnnnnnnnnnnnnnnnnnnnnnnngaagcctttgggggttacctaagggagcactttaccaccccacagctggcacggagatctgcagtgcatttcacaataaaagctctgcgcatgctgagcacagagccaggacttaagggggggagggtttagggaagcaaggaagaccagcacataacaacctggatttggacttttattttgccttctgtattcagctaacaagcttcaggagtcagtgaccttcaaggatgcggccatagatttctcttgggaagaggggattcaagcagaatctgctcaaaggatgaccgtgtatggggaggtgatggttgaaaactaccaggaacccggtttcctggggaaataccttttccaaacgcgagggggcctcccac

SEQ ID NO: 151182 - DNA, 1504 bp, Homo sapiens
  misc_feature (1)...(1504): n = a,t,c or g
ggtgcccagccantgaccctacatcantggaccttttaaagttcctgaagggttccgccagaaaagttaacaccttcctgaagtttgggttgcccccatcagagctggtccacatttccttgatccattgaaaaaatgaatatccttaatttttgtcctttgcctgactggtatttataaaatacaaatgccttttagtgggttgagctgttgtgataatctcttcccatcctaccttagagaagaagctgtactatttagacagttttggccaacactagaagcaaaagaattcaaaggctgggtggatatttaagaacttattctaacctgtcaggtttcaatttggggggcctgggtttaacagaggaaaaaaatataaattgattttctgatgtctcacaaatatcacatacctggaaaaaaattaaaacaaaaaatgaattttgtaaaaggttatgtatgacttccatttgctctgtaaaaaaatgaacaaagattgtgaaaggatcctcttccaccacatcatttaatgggttagcggaacagatagggagctatgacactagcaccaaagagagattttttttctgggttgggtggggctggtgccatgcccctttctgggatttgacaagtctttcccactcacctatacaatatgccaaatcaactggagttgtcattctaatgttttaaagaatgattgggttcccccaaactgtaggaggtcgatggtaacaataaagtgatacaaaatgcttatgtcattataatttatgtaagggagaccattaggcttgaaaatcaatatgattgaggttatctattctcctgaaaagtgaattggagaataaagaatgaatatttgaaaggatgttgtgtactacgcactatactaccatgtattagaaaatacggtaaactgtgggttagaaaagcgaaagcagctggtatgatagaacactgcactgagtaacgaagagattctagtcatggctcttgtggtcatttcatttttgagcctcacattcttccaattaatggagggtaccagattaaataaactctggggattcatcccaattcgaactctgtaattctctgaatgaactctctcttcaattaaagccaaattattaaccattttaaccccaagtttaaaatttaatagagaagtcaaaaatgaggtatgccactttgtggaatgtttttggtcttatcacaataacctgattaaaatggtgccctttatttccatgtttactcctttaaataagatgaaagctttcagaacatttatttgcaaaatgactgtcaatatcaacaatatgcatcaaagtaccatatatgctaagggagaggagcacttgatgggctgctatgttaactgtaaattgagaactgcttgttttatggcttttgctgttaaaaaaaaactgctggcttttaatatgtactttaaaatatactcatgtctgggagagaacttttaaaaaaaaaa

SEQ ID NO: 151183 - DNA, 612 bp, Homo sapiens
tggagagagagtccacactccgctcgcccgaggctggagccgcagtgctacgatctcagctcactgcaacctcctgggctcaagtgatgctcccacattagccttccgagtagccgggactatagttgctgtgctaccatgccaagctaaattttttgtgtgttttttggggtagagatgaggtttcaccatgttgccaaggctggtctcaaattcccaggctcaagcaatccacctgcttcaggcatcccaaagtgctgggactataggtgcatccttggccaattctcttcttttgaagccaaacctcgtatgctgattttcacactgttcataatatgttctgggcatgtcatgatgtcttagaattcaagttttgggatggccaagcatcaactgctttaagtatactcctcagagcatctagcacattttgggatctcaataaatttgttggttcccacagccaccaaacatcatggccccaagacactcaccatcagctggtctgtcatctccactgccttctccacagtgtgtagctcactgagggcttgctgagcacggctgctgctcccgacggctgaagcttgctggaagttggtctgaatg

SEQ ID NO: 151184 - DNA, 433 bp, Homo sapiens
ttttttaaaaatttttatcgtataaatagggacagttactacaaagctgccaaattcttccctgtcctatgcatctcttccttccattcctactgctctaccctgcctcaggccccactgcctcaggcctggctgaatctgaggaggtcctctggggtcttcctgcttctcatctcaatagtcagagctgatgttccgaccccattccaaatacttggcctgatattggaggccccaccctctcagtcttatttcctaccattctcctccatggacggcctgatgctccacccaaataggaaagtgggacaattaacattctctaggcccggggaggtggctcacacctgtaatcccagtactttgggaggccgaggtgggcggatagcctgaggtcaggaattcgagaccagcctgggcagcttaatttctc

SEQ ID NO: 151185 - DNA, 698 bp, Homo sapiens
gagccttcgtcccgacccctgcattcatctgtgttctgttttatgttttttcccagtcacctgagctgcaggccttgggcaccccagactcctccctcctgtcacccttatcctcaccccagcacctttacgtctgccccaggctccatttccccctcttctgcctggatcaaaccacccttgacttttcctgggtcttcgtgcaacagcctagctccggccgctgcctcactgcacctgcaaatccacttgcacccacacccaggccagggttttttaaacagaaagcctcagcagatccctctctctggccagctccctgttgaaccaggaagcaggtccctgttgaacctcagcatgacccgcccccacccctggtacctgggattacaggcacaagtcaccgtgcttagctaatttcttgtatttttattagagacaggggtttcaccatattggcctggctggtcttgaactcctggcctcaaggtgatccacccatcttggcttaccaaagtgctgggattacaggtgtgagcaacatgtccagccagaaaatattttttaagtggagaaccattaagattagatatagcttagaaaatccactatagtagcacaatgaggaaaaaatggactgaaatggaggagggcaagattaattaggaagcctctgaaaatatacaaggtagggggaa

SEQ ID NO: 151186 - DNA, 389 bp, Homo sapiens
tcgacctgattgtgacatcacattcatcccctgggctttggagcttgtcactgggaaggaagactcattgggagaatacccaacaagatgggttactgggagaatctcttcaatggcactgactggaggcctcaaggggttggagccttgtgaacagggaaccttacccccaacacttgaatggacctgggtttcagagatgagacatggggtatgatgtaacccgtttccagggggatgttgacgaagatcttatctgccctatttgcaggggagtcttggaggagccagtacagccttgccagaccaaagtcatttgtatcattctggggcaagtatgaggagaagctcacgattaccacgcaccttattgtgaacatgctttctgc

SEQ ID NO: 151187 - DNA, 1338 bp, Homo sapiens
gcaaaggatccgtctgaggcggcgacgagtggtaggagtcttctttcccctccttcccctttcccttcccttcccgggagaggctgggacccggcaccagggcagtactgtggccgctgcggcctcagctccgactgggtcaggttgcggagactccaggccgcttccagggcgagtactcctgattgtgacatcacattcatcccctgggcgatggagcttgtcactgggaaggaatactcagtcggagaatagccaacaagatgggttactgggagaatctcttcagtggcactgagtggaggcatcagggggtatggagccttgtgaacagggatcctgccccccaacacttggaaggacctgggtttcagtgatgagacatggggtatgatgtaacccgtgtccagggggatgttgactaagatcttatctgccctatttgcagcggagtcttggaggagccagtacaggcacctcattgtgaacatgctttctgcaacgcctgcatcacccaatggttctctcagcaacagacatgtccagtggacccgtagtgttgtgacggtcgcccatctgcgcccagtacctcggatcatgcggaacatgttgtcaaagctgcagattgcctgtgacaacgctgtgttcggctgtagtgccgttgtccggcttgacaacctcatgtctcacctcagcgactgtgagcacaacccgaagcggcctgtgacctgtgaacagggctgtggcctggagatgcccaaagatgagctgcccaaccataactgcattaagcacctgcgctcagtggtacagcagcagcagacacgcatcgcagagctggagaagacgtcagctgaacacaaacaccagctggcggagcagaagcgagacatccagctgctaaaggcatacatgcgtgcaatccgcagtgtcaaccccaaccttcagaacctggaggagacaattgaatacaacgagatcctagagtgggtgaactcccttcagccagcaagagtgacccgctggggagggatgatctcgactcctgatgctgtgctccaggctgtaatcaagcgctccctggtggagagtggctgtcctgcttctattgtcaacgagctgattgaaaatgcccacgagcgtagctggccccagggtctggccacactagagactagacagatgaaccgacgctactatgagaactacgtggccaagcgcatccctggcaagcaggctgttgtcgtgatggcctgtgagaaccagcacatgggggatgacatggtgcaagagccaggccttgtcatgatatttgcgcatggcgtggaagagatataa

SEQ ID NO: 151188 - DNA, 1239 bp, Homo sapiens
atgaataaacaaattcaggggagaactggggcctgctcccagagagatacagctacgttgatcaaaactgaatcttcggatgtgatccaccttatcatgcagtacttgaaggagaacggtttacatcgggcattagccaccttgcaggaggagactactgtgtctctgaatgctgtggacagcattgagagttttgtggctgacattaacagtggccattgggatactgtgttgcaggctatacagtctctgaaattgccagacaaaaccctcattgacctctatgaacagattgttctggaattgatagagctccgtgaattggcagctgtcaaagatgtggaagaagaaaagtttcctacacaactgagcaggcatattaagtttggtcagaaatcacaagtggagtgtgctcgattttctccagatggtcactatttggtcactgggtctgttgatggactcactgaagtatggaactttactactggaaaaatcagaaaggatcttaagtaccaggcccaggataactttatgatgatggatgatgctgtcctctgcatgtgtttcagcagagatacagaaatgttagcaactggggcccaagatggaaaaatcaaggtatggaagattcagagtagacaatatttaaggagatatgagagggcacacagtaagggtgtcacgtgtctaagcttttctaaggatagcagtcagatccttagtgcttcttttgaccagacaattagaattcatggtttaaaatctgggaaaaccctgaaggaattttgtagccattcctcctttgttaacaaagcaacatttacacaagatggacattatattattagtgcatcctctgatggcactgtaaagatctggaatatgaagaccacagaatgttcagatacctttaaatccctgggcagcactgcagggacagatattaccgtcaacagtgtgattctacttcctaaaaatcctgagcactttgtggtgtgcaacagatcaaacacagtggtcatcatgaacatgcaggggcagattgtcagaaacttcagttctggtaaaagagaaggggaggactttgtgctctactgtttcagtacagccactggcaaactggaaagaactttgacagtgcacgagaaggatgtgattggtattgcacatcaccctcatcagaacctgattgctacctacagtgaagatggactcctaaagctctggaaaccataa

SEQ ID NO: 151189 - DNA, 792 bp, Homo sapiens
aaaccactctggaccgcttttaattattgggtcgacgatttcgtctggccttgagggagagctggggcctgctcccttatagatactgctatgtcgatcgaaatcgaatcttcggatgtgatccgccttattatgcagtacttgaaggagaacagtttacatcgggcgttagccaccttgcaggaggagactactgtgtctctgaatacatgtggacagcattgagagttttgtggctgacattaaaaagtggccattgggatactgtgttgcaggctatacagtctctgaaattgccagacaaaaccctcattgacctctatgaacaggttgttctggaattgatagagctccgtggaatttgggtgctgccaggtcactttttgagacaagacctgatcccatgatcaaggttaaaacaaacacagccagagcgatatattcatctggagaacctttttggccaggtcttactttgatcctcgtgaggcatacccagatggaagtagcaaagaaaagagaagagcagcaattgcccaggccttagctggcgaagtcagtgtggtgcctccatctcgtctcatggcattgctgggacaggcactgaagtggcagcagcatcagggattgcttcctcctggtatgaccatagatttgtttcgaggcaaggcagctgtcaaagatgtggaagaagaaaagtttcctacacaactgagcaggcatattaagtttggtcagaaatcacatgtggagtgtgctcctcgtgccgaattcgtgcagcgcaggtcaaat

SEQ ID NO: 151190 - DNA, 379 bp, Homo sapiens
  misc_feature (1)...(379): n = a,t,c or g
cgcacgccccccgtggcggggacgacccattcgaacgtctgcccagtaaaagcctttctgcagctnnnnnnnnnnnnnnnnngaaaaaaacctaaaaccaaaaaaagaactgggcccgttagacagaacgtgagatggggccgctcgctatccccgggccgagcccccgctgaaggcccccagggcggaagtaccgaaagccctccccttctggtggggagatgcctgatccttggcctgcgggaaccaggggtcccaccagccgcctacgggaggttcctgagggattacatgaattctatccaagggaaacttgaaaaacaaagaccanaatgaggtttgccttctttgactggcgctgcggaactaatcaagcacc

SEQ ID NO: 151191 - DNA, 393 bp, Homo sapiens
  misc_feature (1)...(393): n = a,t,c or g
cggaatcttcatacattttgatggaaatataaaaattacaacgcttttggaaaacaatttgacaatttctgataaagttaagcctataaaaaaattacagagtggcacaannnnnnnnnnnnnnnnnnnnnnnnnnnnnnnnnnnnnnnnnnnnnnnnnnnnnnnnnnnnnnnnnnnnnnnnnnnnnnnnnnnnnnnnnnnnnnnnnntgggcagtgtactgcacatcatttatgctttcatgatgctataaaatataatgtaagccagcactttccctattaggaatctaaactacagaagtaaaaacatatgtttacacaaatcgttgttgtgaaatgtccacatcagctttgctcatagtagcaaaaaattgaaagcattccaaatgttt

SEQ ID NO: 151192 - DNA, 638 bp, Homo sapiens
cctcccagccaggggtctggtggaggtctgactcctctgtcctgtgcccttggatgtggtatggaggaggggagaataaggcagcccccaggttctgggcgcaccccactccctacgtgggaagggcaggtggctccctctctagcctgccgtggtggcagggtccacagaccccactggggcccaacaacgtgaggccctgccttgccctgcactgggcgcctgtgtacccagtctcccaaggccttgtcccacctcacagccaagctgctcacctggatgcctgccgctacggcccagctttgctaccctgaggactcagctgcactgtgcagggaaggttctaggtccagggaaagccttgggggatgggcagggctgtctgcccagcacctgggccagtgaggctcgaggaaaggcccgtctgtggcacaccctgtctctgcctccaccctgccaggatgactcctgcctgggggtccatacactgtctcccttcccatggtgggtgtccctgcctgccagtaaatgctcccagctggctcggacaaccatccccatgggccagggcccttctccaatgatgggtggtactgggagctgagggcctccaccccaccctcaggacgacagtggga

SEQ ID NO: 151193 - DNA, 1306 bp, Homo sapiens
ttttttttttttaaaaacatcatttatttaagagttcatataaagttacacttatgttctgaaggaggcattatggtgggacaaatattaacaaagcatgatttaaatatatatatatttaatgtgtgatatgtttgtatatatatttaaacacatgcaattgttctacaatttaccagattggtgccacagtgaataaaagagaaagtagacagcttttgctggaagattcaactaaagtgcctaatacgtgaaaatctaaaactaatattagaaaaatgtcacaagagatgcccaggccttcagctttctggaccatgaaagtgtcaccaaattcaaagaacatttctgaatgtacatccagtgacatctgttatgcaaaagaggaaaactttgtgaaacatttcatagctttggtcaatgatttactttttgtccatgtattgataaatcagtcacttctgagttgacactgattttcactgaccacctgcactgttaaagagtaaaggaaatgaaagctaccataatataataacaaaaagtcagtgcctatgagagacaaaagcatagtgaccacttttttcaccatttgccacttgttagtgacatacacatgtaccacacctacacacccttcacaacattttccacacaatagaagatttgtataagatcaagtttattatttccagtgctttctgcaactattttctcaaaatattctttccccccaagatgttagataagtcatatggaattacagtttggggctatttttgcagaaatcctgttcagaggtccctttcatcatctgcataatattaatttcacttgggcttcctgctgcccacatgcatctcagccaggcagacagaggggcagcagttggaatgaatatcattcatttagggagttcaaccaggaaaaggagaagatatggcgagctggctcagaatcagctccactgccactcgctggagctgcagcctgtccctggaggggaggagcctcaaatccaatctgtgtcacaggggcatccgcagcaggtggcagggctggaggtggctctggagaggaaactggaagtgccccaggggcagcctgcagctccacctgagagagctatgaagctttttctgggttctcatcttctcctggaaactctgtttgaacattttctacctcttccacttatactgcttctcctcccacttctccttctccttctgtttctccttctccgccgtgttattattattcatcttcatcttctctgtaaaagtcaatttcacgtattatcttt

SEQ ID NO: 151194 - DNA, 640 bp, Homo sapiens
  misc_feature (1)...(640): n = a,t,c or g
aagggtcctgtcagcaaggagcccaggagtggtatgaaccgtaacagtgcccttagagtaaatgtgcggcccctaagaccctgccctcaggaaggcggccttcccctgcagtcctgtgtcccacccctgggtctctgtagggtgccatccaggggcaagcaacccaagcacttgcttcccaccgggtgatgagccattgcaggccttccaaacttgcacgtcattgatttcattcccttaaagttgagttttggcctttgaggagttccccagggtcctcccccactgggcaggggtcctcaaagccaaggaagcctggtgacacaggcacccatgggaggtgggcccagaaaggggcttcccatagataggccctgtgagtagggagcttgtacactggggccatgggcagcgccagttcccttgagcagtaaaggcccttttccccctacggtgggacccaggagtctctctgacagcttttctgcaaggcanagtggctcatgctgtaattccaacatctgggaggccgaggcgggaagatcacttgaggtcagagttcagaacagctggccaacatggtgaaagtgtctctgctaaaatacaaaattagtgggtgtggttaaagngctataaccca

SEQ ID NO: 151195 - DNA, 448 bp, Homo sapiens
ttttttatatttaaacatcagtatttttattattgttaacatgtcaaggaaagtattaatcaaatgttaatgtctctataaatgaaatcaaaacattttatcaacttaatttcaaggcaacataaaaactacaacctgatatatacgtttatcaggagcagagatttcaaaacagcaatctttctttccatcctttcttagagtgttattcattctgacactgtagccatctattgcaaattcacctttctgttgtttgtctgttgaagataaaaccagttagaatttcatttactaagtattaatgctcaattatcttttatgtaaaatttcttcatcaattcttggaaataacattttttggtcatattgctttagtaatataatgcttaggtaatgtttttagaaatcatttttaattctgaaacatggaagtattagggatgat

SEQ ID NO: 151196 - DNA, 372 bp, Homo sapiens
cggacgcgtgggtccggacgcgtgggtctaccctcgcgtccgttcttaagagaagcagcggcaaacatttgctaggcggacaactgacagggaatggattccaaacgccggggtgttaagctaaatgatggccagttcatgcctgtattgggatttggcacctatgcaccttcttaggttccgagaagtaaagctttggaggtcacaaaattagcaatagaacctgggttccgccgtatagattctggtcatttatacactaatgaggagcaggcgggactggccatcctaaacatgattgccgatggctgtgtgaaaagagaagacatattctacacttcggagctttgggccactttttattgaccagag

SEQ ID NO: 151197 - DNA, 311 bp, Homo sapiens
gctcgacctctcttgctcctctcacaggctcttttctgagtaacaccaagtacttgggaacaaaattacacattgctctctgtttatttatggttatatttatcttggcaatcgacctgttaagctagttttaactttcttatgggtaacagtcacatgttttaaaaggaacctgatggttccagaatccttgttactactaccttttttttttggagacagaatctctgtcacccaggctggagcgcagtggcacagtctcggctcactgcagcctctgactcccgagttcaagcgattctcctgcctca

SEQ ID NO: 151198 - DNA, 363 bp, Homo sapiens
gtgagccactgtgcccggccaaattaaggtgtttaatatgactcccatgtgtcacacctgggaggatggtagtcttcagatgaagagtcagggtatggagaagtcatgagttcaagtttggatatatagagttcgaattacaagtggcacattgtaagctgtggggtggacatttgttgtcttgcctgctgaataccccttgccctttcaactggtaatggcactctactttttttcttttgagacagagtttcgctcttgtcacccacgctggagtgtagtggtgtgatctcagctcactgcaacctctgcctcccaggctcgagctattctgctgccttagcctcccaagtagctgggatt

SEQ ID NO: 151199 - DNA, 360 bp, Homo sapiens
  misc_feature (1)...(360): n = a,t,c or g
attaacnnnnnnnnnnnnnnnnnnnnnnnnnnnnnnnnnnnnnnnnnnnnnnnnnnnnnnnnnnnnnnnnnnnnnnnnnnnnnnnnnnnnnnnnnnnnnnnnnnnnnnnnnnnnnnnnnnnnnnnnnnnnnnnnnnnnnnnnnnnnnnnnnnnnnnnnnnnnnnnnnnnnnnnnnnnnnnnnnttcctttagaagtacaatttgtaatgtacttgtcacttaatgagtgttatacccatttctgttctgaccaaactaatccccaaatgtcatctttgattcctaggacagtccagagaaaactgctgccacggtaaggggagatttttatgtcactggagacagaggaatgatggacag

SEQ ID NO: 151200 - DNA, 357 bp, Homo sapiens
  misc_feature (1)...(357): n = a,t,c or g
ctgaccctccatgaacccgccctgccctnggccctcccccaaagtgctgggattaatagncgtgagcccactgcgcccnggcccttttttttttttttttggtgatagggtcttgctctgtcaccccaggctggagtgcagtggcatgatcacagctcactgcagcctcaaactcctgtgctcccagtgancctcccacaacagcctcctgaatagctgggaacacagacacatgccaccacacctagctaaatttttttttcatcagcagacaaagctataaaagaaatgaaacaaaaatagatcacttgaatccgcaccactgtctgtgttcataaagaaagtgacaactacact

SEQ ID NO: 151201 - DNA, 357 bp, Homo sapiens; identical to SEQ ID NO: 151200
  misc_feature (1)...(357): n = a,t,c or g

SEQ ID NO: 151202 - DNA, 1075 bp, Homo sapiens
tttttttttttttttttacagcgatgagataaacatgtatttgttgacatggaaagaggttcacaatgtacagttaagtgcaaaagcagattataagaaaacagtgtgcatagtaggataccacggtggcaaaatctatattctatatattcatagaaaaaggcctagaagaaaatataacagtattcaccccagagagtgggatggccaatgagtcttctttctgcttctattttctaatctttctacaatgtttgtgtagtcagttttcctggtttgctttttttttttttttttttttgagcacaggtgggtcatgggagtcacgctctcatgctgcctgtcaagagcatggtacttgctacaggggctactccccagcagctctgcttaagaagattctgggaatgtcttgagtctcccaagaacaaggaaacaaagaactttcctgtgccccagggaaccagcaagcttccccacttccttctcacagcaaccttgtggggtatgaggtttctctgtctgcttgatggaaaagaagagcccagagaggggaggtacctgcctaagttcacacagcagggatttaaagccgggtcacctgggcccaggagccccggggcttatttaaagcttatgaacagagcaagcagctgagcccaggggaagggctcaaacattctccccgtgatttcccgctgtgtttgacaagctgcaaaatgtgccaggaaaggactgggtgtggtggcctccatgccctgtaatccccccgcactttgggaggcctgaaggtgggcggatcaccctgaagcctcaggagttccaagacccagcctaggcaacatggcaaaacctcgtctttactaaaaatacaaaaaattagccgggtgtggtgacgcaccctgctactggggaagctgaggcaggagaactgcttgaacccaggaggtggaggttgcagtgagccaagattgcaccactgcactccagcctgggcgactgaatgagactctgggtctcaaaaaaaaaaaaagggtcaggggaggaagagctgtcacttcagtgttaggacccc

SEQ ID NO: 151203 - DNA, 967 bp, Homo sapiens
gcccaggcctgcctcccttccctaggcctggctccttctgttgacatgggagattttagctcatcttgggggcctccttaaacacccccatttcttgcggaagatgctccccatcccactgactgcttgacctttacctccaacccttctgttcatcgggagggctccaccaattgagtctctcccaccatgcatgcaggtcactgtgtgtgtgcatgtgtgcctgtgtgagtgttgactgactgtgtgtgtgtggaggggtgactgtccgtggaggggtgactgtgtccgtggtgtgtattatggctgtcatatcacagtcaagtgaactgtggtgtatgtgccacgggatttgagtggttgcgtgggcaacactgttcagggtttgggcgtgtgtgttcatgtgggtgttgtgtgacctttgcctgaaaaagcaggtattttctcagaccccagagcagtattaatgatgcagaggccggaggttagaggttgtgactgtggctcagacccaggggtgcgggcatagctggagctggaatctgcctccggcgtgagggaacctggctcctaccacttcggagccatgggggcaagtgtgaagcagccagtccctgggtcagccagaggcttgaactgttacagaagccctctgccctctggtggcctctgggcctgctgcatgtacatattttctggaaatatacatgcgccgggagcttccttgcaggaaaactgctccgaatcacttttaatttttttcttttttttttcttgccctttcccattagttgtattttttatttatttttatttttatttttttttagagatggagtctcactatgttgctcaggctggccttgaactcctgggctcaagcaatcctcctgcctcagcctccctagtagctgggactttaagtgtacaccactgtgcctgctttgaatcctttacgaagagaaaa

SEQ ID NO: 151204 - DNA, 425 bp, Homo sapiens
cccaactcagatatccctttgcagcccacctactacccaagaagctgctgtgtagggacagagcccaccagggcactggggacacgtggcacaggccagagagctcctgaggcctgggaggctgccatgttgggtcccagatggacacaccccagtacgcccagtctcagggcctgagccacccactggttctagaattctctcaggagaagagagcccctcacggcccccttcatcacaggctgcgcggcctcagcctggccagccccgagacccttctagcttgcggatccccctcctgctcccccgaccctgactctcccagagtggactggccagctctgggtctggtctgcgggcaggagccctgcccaggcggcccccagggccggccctcctctccccgactccatgcacgtctataa

SEQ ID NO: 151205 - DNA, 383 bp, Homo sapiens
cacaagggttcagaaaactacccctaaaaaccactacgggaaaggaaaagactcatagctgcattgtgggccttggacacgtaaattcgggcaagaccaccactactggccatctgatttataaatgcggcggcttcgacaaaagaaccattgacaaatttgagactgaggctgctgataaggcaaagggctccttcaaaaatgcctgggacttggataaactgaaagctgagcgtgaacgaggtatcaccattgatatatccttgtggaaatatgaaaccagcaggtactatgtgactatcattgttgccccatgactcatagactttatcataaacatgagtaccgggacatctcaagctgactgtgctggcctgattgtg

SEQ ID NO: 151206 - DNA, 397 bp, Homo sapiens
cgtcgcgggagccgctcacagctacggtgtcactcagccaggcgactgcgaaagatccaatccttgtggccaatgcggtcgccccaggcaacagggggtcccaggtgggcagctggtaagatggcccaggctgttggggttttcgccgccggtggccagaagcgtcttggagggattcagctcgatggcatggatgccgcagccctggtgggcctgggccagcccggcctccttgtcccgcatgagggggatgcgcgtgatgtggcctgactgcacgtccaccacaaacagcgtattacacttggtgccgcacaccacctgcctggcgttcagccactgtgacgcgaacaccttgttgagggtgcccaggtccagctggcgctccgtcagcagctcg

SEQ ID NO: 151207 - DNA, 624 bp, Homo sapiens
  misc_feature (1)...(624): n = a,t,c or g
ggggcccaagggggggggccccttaggcccggagttttaaacccccccgggccacggaaggaaagcccctttttggtaaatattttcccaagggttnnnnnnnnnnnnnnnngaaaggaaggcnccccaatagtggtaactgtgacaactaacatattgttacaaacaaaaatttcccccaaggtgaaaaaaatcaacnnnnnnnnnnnnaatcaaaacgatgcctcagtctaggaagaggtgcttcctctctggaagcagctgaacacctgagctgctgtccacaggcggacggactctccaggagcccccagtgggcctcggctcctccacgtcagctcctctcttgtccctctgctggtccacgggggccgctgcagctggccaggtctcctgggagtcggagggggccatgggttccaccccagggcccacctcatcagcacagtgctctcaccatctgagcaccagcccagaggaaaaggagaaagaatgggtgatgctgatcccccaagcagaatggtaacccctccacctcccaccctcagtgcccagggcccgttgttgggtgcttttgagaagtgggaggtggaggggtttccattttgatgttggagcggccgc

SEQ ID NO: 151208 - DNA, 618 bp, Homo sapiens
atggagcaggtcaaaactgccgcactgatcaacggcaagatcctgcctaggatccccaacgagcaaaaagaaaatgccgatacttcattggcattttcttttatttctcaacaagatggtgaattgactatgctccgagaacgggtgcgcatagaaattgcatcaacgcatatagcgctacagcacgccatagtgactggcgatgctgtcggaatggacgatatcccgcaagaggcccggcagtaccggcataaccaagcctatgcctacagcatccagggtgacggtgccgaggatgacgatgagcgcattgttagatttcatacacgggtcaccgtcgacagcgacacacttgcatcggatgcagcccggttaacgtgccggcacgctggggtaaccggttattttgtccacataaccgtgcgcaaaatgttgtgtgataagcaggacacagcagcaatccacagcaggcatacaaccgcacaccgaggagagcatatagattattgtggatattctgttcttcctatggctgtagaacaagatgtgctaatagctgtagaacctgtgaaaacgtacgctctccaactggccaatacaaatcccttgtatccgtga

SEQ ID NO: 151209 - DNA, 459 bp, Homo sapiens
ccaccccccgtttcctccgaagtggttggtgccttagcaactaaagctggcaactgggaaatcgtccggtgctgcaggtctcagccgaagggcgtcggaaactgcgctcgcatcgagcagtttccagcctcctgggtaaaggagcagtctcctcccttgcttgggactctggacgcatctcattccggtgaaagtaagggacagcttaggaccagaagcctttcgcggagaaaaggctgacatgcccgtcctatatgacaggctactgaagctaatggagatgctttacttcaagtctggaactattcccatgttttatggttgagctccccgaagagtctacataataggagagcgtattcattattgcggatattctgttcttcctatggctgtagaacaagatgtgctaatagctgtagaacctgtgaaaacgtacgctctccaactggccaatac

SEQ ID NO: 151210 - DNA, 1075 bp, Homo sapiens
ggagggaagacacatgccagccctgcctactggggcgcccctgataacaaaggaaccagccccaggccaaggccacctgcccctgaccacaagttgaatttgtcactcagactgcagtgtttcccaacattctaattatttgcagaggtgttcaatttggggtaattcacttaaaatccagttttggttcttctgggctgagtgggccctggcccctcccataggctgtggctcccctgggtgccccctctccagtggagctgacccaccgctcagcgcttggccttgcagcccttactaaaagacttgaaagtccctgggttcaccccctgagtgaattaaaggccagaggggccccgaagggcactgtgagggacagagactcacctgggcagtgcagaagccggccgcgtgtccctccttacaggggatgaaatgacctggggaggaaaccccagccctgccctggaggttccagagtaggcgggccgggtgctgtgaggcttcacaacctgctgtcccaagcacgcttgagttgtatgtgagtctgtgccgtgccgtgccgtatgcttcagctcctgcaaccccggctgagctcgatttttacctaaatatcagtctccaacgggaccccacccttcattcaatgccttcttgtcccttggggcaatgtgtgtgcttcctcgtcccaatttccattccctggcagtgaggagcccaatcgtgccagggggccctgccccacttgtccctgggaaggaataggagggtttgggtgtgacctcacagtccagaccagactgtcccagtcctatgtcagggacacccagatgtagaagctgactgagacctgctgcagggcgtgggtgctcccctctgcttggaggctgtccctggacagtgacccacccactgaggaccaaggctgggtgtaccttgagctgggcacagcagcctgtggtgttgcctgtgggtggggagggccccaggtgtgcttctcccgtagcagtcctaggcttctctccctgtgccctgtgtcacctggatcctccagtaaagtgaaattcagcactgt

SEQ ID NO: 151211 - DNA, 389 bp, Homo sapiens
cgtcgacgtaagaatgtctgggatacttttgtctaagtgaaaaaaaccaaagttcagaaaagcatagtaggagcagccgggcatggtgactcacacctgtaatcccagcactttgggaggccgaggtgggtggatcacctgagatcaggagttcaagaccagcctggccaacatggtgaaaccctgtctctgctggaggtacaaaaaattggccgggcatggtggcgcatgcctgtaatcccacctactcatgaggctgaagcgggagaattgcttgggcctggggggcggaggttgcagtgagccaagatagtgccacggcactccagcctgggcaacagagcgagactgtctcaaaaaaaaaaaaaaaaaaaaaaaaaagtcgacgc

SEQ ID NO: 151212 - DNA, 404 bp, Homo sapiens
agatcttccctccggacctgctcctcgccttaacccatgccctgggttcccggctctcttgtgtggcagatcctggctcactcctgcttctccaggaagtggttctccttccttctgcagcggccatatccaaagatcttgcagatcctggagctgatgttgaagaaggacctggaaggaaggctccaggtagaaggcaggtggcggggctccagagacaaaggagggtcaataagaagatggtcatcacagcggtctacacagcaagcagcagaaacaaccggcatggccaagcatggtgactcacacctgtaatccgaacactttgggaggccgaggtgggtggatcacctgaggtcaggagttcgagaccagcctgaccaacatggagaaaccctgcctct

SEQ ID NO: 151213 - DNA, 3101 bp, Homo sapiens
tttgactggccgtagagtctgcgcagttggtgaatggcgttggtggcgggaaagttgagtctctcctgcgccgagccttcggggcgatgtgtagtgccttccatagggctgagtctgggaccgagctccttgcccgacttgaaggtagaagttccttgaaagaaatagaaccaaatctgtttgctgatgaagattcacctgtgcatggtgatattcttgaatttcatggcccagaaggaacaggaaaaacagaaatgctttatcacctaacagcacgatgtatacttcccaaatcagaaggtggcctggaagtagaagtcttatttattgatacagattaccactttgatatgctccggctagttacaattcttgagcacagactatcccaaagctctgaagaaataatcaaatactgcctgggaagattttttttggtgtactgcagtagtagcacccacttacttcttacactttactcactagaaagtatgttttgtagtcacccatctctctgccttttgattttggatagcctgtcagctttttactggatagaccgcgtcaatggaggagaaagtgtgaacttacaggagtctactctgaggaaatgttctcagtgcttagagaagcttgtaaatgactatcgcctggttctttttgcaacgacacaaactataatgcagaaagcctcgagctcatcagaagaaccttctcatgcctctcgacgactgtgtgatgtggacatagactacagaccttatctctgtaaggcatggcagcaactggtgaagcacaggatgtttttctccaaacaagatgattctcaaagcagcaaccaattttcattagtttcacgttgtttaaaaagtaacagtttaaaaaaacatttttttattattggagaaagtggggttgaattttgttgatatacatcataaaatagtcttttgcagggtactacgcaagccttaaaatttttcttaagacagagtcttgctctgtctcccaggctggagtgcagtggcacaatcatggctcactgcagccttgaactcctggcctcaagggatcctcctatgtgtgcctcctagagtgcagggattacaggcgtgagccactgctcgtggccaaaagttttctttttttttttttttctttttgaaacagtcttactctgtctcccaggctgctggagtgcagtggcacaatctcggcccgctgcagcctctgcctcttgggttcaagtgattcttccacctcagcctcccaggtagctgggattacaggcacccaccaccacgcctggctaatttttgtatttttaatagagacggggtttcaccatgttggccaggctggtctcgaactcctgacctcaagtgatccacccacctcggcctcccaaagtgctaggattacaggcccgtgcccagccctaaagttttaaactctaggggaattaacagtatttctttacagaatggatttgttaaactagcacagtaaaagtaaagactattctgtttctaggctgttgaatcaaagtgattttagcaattaaactttgtattaatttaccaccaatatttcttcacaaaggaacttttaaaagattatctcagaaagtaaatctgagaggtaagaagtaataatgagtaaatggtaagtacttgagtaaatctaaagaaatattgatagtaaggcaatcctaagcaaaaagaacaaagctggaggcatcacgctacccagcttcaaactatactacaaggctacagtaaccaaaacagcatagtactggcacaaaaacacacgtagactgatggaacagaatagagaatttagaaatgagaccacacacctataatttttttgatcttcgatgaacctgacaaaaacaagcaatgggcaatggattctctattcaataaatcgtgctgggataactggccagccatatggaaaagattgaaaatggacgccttccttatgccatatacaaaaattaactcaagatggattaaagacttaatgtaaaacccaaaacagtaaaaatcctggaagacaacccaggcagtaccattcaggacataggcacaggcaaagatttcatgacgaagacgccaaaaacaattgcaacagaagcaaaaattcacaaatgggatctaattaaactaaagagctgcacagcaaaagaaactatcaagagagtaaacagacagcttacagaatgggagaaaattgttgcaaactatgcatctgagaaaggtctgaaatccagcatctatacgtaatttaaacaaatttagaagaaaaaaccaccccattaaaaagtgggcaaaggacatgaacagacacttttcaaaagaagacatctgtggccaacaatcctatggaaaaaagcccagcatcactgatcattagagaaatgcaaatcgaaacaacaacgagataccatctcacaccagtccaaatggctattataaaaatgtcagaaaataacagatgctggtgaggttgtggagaaaaagatatgcttatacactgttggtggaaatgtaaattaaattagttcagccattgtggaagacagtgtggggataaagacagagataccattcaacccagcaatctcattactgggtatatacccaaaggaatagaaatcattgttataaagacacatgcacgcgtatgttcgttgcagcactgcccatcagtgacagactggattaaaaaaatgtggtacatacacaccagggaatactatacagccataaaaaggaacaagactgactgggcgtggtggctcacacctgtaatcccagcactttgggaggccgaggtgggtggatcacctgaggtcaggagttcgagaccagcctgaccaacatggtgaaaccctgtctctactgaaaatacaaaaaattagctgggcgtggtggtgcatgccgataatcccagctactcgggaaggctgaggcaggagaatcacttgaaccagggaggcggaggttgcagtgagccaagatcgcatcattgcatttcagcctggacaacaagagcgaaactccatcaaataaataaacactaatagccag

SEQ ID NO: 151214 - DNA, 710 bp, Homo sapiens
tttttttttttttaaggcagtcagaatacacgtttattgattaagtacaccagtcttgtataggcagagttattggcaccctatagtacaacaccaacatcaaatatcactgatcacagatcaccataacagttatttattaatgaaaaagtttgaaatattatgtgaattaccaaatgagacatagagataaaaagtgagcacatgctgttggaaaaaaatggcactgatagacttccttgatacagggttgtcacaaaccttcaatttgtaaaaaactcaatacctacaaagagcaataaagcgaagtacaataaagtgtgcctgtaatatgaatgtacaaaatatagtagtttttgagatcttttttggttattttattattcattttaacttattataaaatattttgaacataagaagtagagaaaatagtataccaaatcctcatttattcatcacccacatccagtccttatttttaaaattttgttaatagacatataacaattatatgcatttatggggtatatgtcatattttgagacaattatgcaaggtgtaatgatcaaaccagggtatttaggatagctctcacctcagtcatttatctttttcttgtgctaggaacattaaaaattttctcttctaaatggataaatttctggacacatacaccctcccaagactaaaccagaaagaggtcaaat

SEQ ID NO: 151215 - DNA, 534 bp, Homo sapiens; identical to SEQ ID NO: 144862

SEQ ID NO: 151216 - DNA, 1014 bp, Homo sapiens
atggtgctgtctcctgccgacaagaccaacgtcaaggccgcctggggtaaggtcggcgcgcacgctggcgagtatggtgcggaggccctggagaggatgttcctgtccttccccaccaccaagacctacttcccgcacttcgacctgagccacggctctgcccaggttaagggccacggcaagaaggtggccgacgcgctgaccaacgccgtggcgcacgtggacgacatgcccaacgcgctgtccgccctgagcgacctgcacgcgcacaagcttcgggtggacccggtcaacttcaagctcctaagccactgcctgctggtgaccctggccgcccacctccccgccgagttcacccctgcggtgcacgcctccctggacaagttcctggcttctactcagagagaacccaccatggtgctcgtctcctgccgacaagaccaacgtcaaggccgcctggggtaaggtcggcgcgcacgctggcgagtatggtgcggaggccctggagaggatgttcctgtccttccccaccaccaagacctacttcccgcacttcgacctgagccacggtttctgcccaggtttaagggccacgggcaagaaggtggccgacgcgctgaccaacgccgtggcgcacgtgggacgacatgcccaacgtcgctgtccgccctgagcgacctgcacgcgcacaagctttcgggtgggacccggttcaactttcaagctcctaaagccacttgccttgctggtggaccctgggccggcccacttccccgtccgagtttcaacccctggcggttgcaacgtcttccctggggacaaagtttcctgggtttcttgttgaagcaccgttgctgaccttccaaatacccgttaagcttggaagcctcggttggccattgtttttttgccctttgggcttccccccagcccctcctcccctttcctgcacccgtacccccgtggtctttgaaataaagtcttgagtgggcggcaaaaaaaaaaaaaaaaaaa

SEQ ID NO: 151217 - DNA, 637 bp, Homo sapiens; identical to SEQ ID NO: 144817
  misc_feature (1)...(637): n = a,t,c or g

SEQ ID NO: 151218 - DNA, 761 bp, Homo sapiens
  misc_feature (1)...(761): n = a,t,c or g
gacactcgctttttggaacgtctgaggttatcaataagctcctagtccagacgcccatgggtcatttcacagaggaggacaaggctactatcacaaagcctgtggggcaaggtgaatgtggaaagatgctggaggagaaaccctgggaaggctcctggttgtctacccatggacccagaggttctttgaccagctttggcaacctgtcctctgcctctgccatccatgggcaacccccaaagtcaaggcacatggcaagaaggtgctgacttccttgggangatgccataaaagcacctgggatgatctcaagggcacctttgcccagcctgacgtgaactgcacttgtgacaagctgcaatgtggatccttgagaacttcaagctccttgggaaatgttgctggtgacccgtttttggcaatcccattttcggcaaagaattcacccctgaaggtgcagagcttcctgggcagaaagatgggtgacttggagttggccagtggccctgttcctccaggataccactgagctcactggcccatgatgcagagcttttcaaggataaggcttttattcttgcaagcaattacaaataataaatctatttctgctaagagatcaccaaannnnnatnntnnnnnnncccccggattttttatttagcgggccgcacctttttccccttttagggggggtaaatttatattgggccttgggccggggttttcaaaagcggggggannnnnnnnnnaaagagccc

SEQ ID NO: 151219 - DNA, 276 bp, Homo sapiens
gtcagattctctgatagcttatggatggatcaatgaggataacctcaaaaaatttgtatgtggaatctcaccacccagtaagaattcaggactgaaggcttcgagcaaactttagctggttaacaccatgatggacaggcttgccgtaagttgcacccttaggaactgggcgttttcggccaccacggcgaacacgaatcctatatataacgtaaccttgcttggccttgtagcccagtcggcgcgctttatcaggccgggtggcgtccagctcgc

SEQ ID NO: 151220 - DNA, 545 bp, Homo sapiens
gagtctgatgtcaggcgctttctctggagggtccgtctgtgcaataccgccagctctcgcctctccaacagcttcccgctccacccggccgtataaagcgcgccgacttggctacaaggccaagcaaggttattcgtgttcgccgtggtggccgaaaacgcccagttcctaagggtgcaactttacgcaagcctgtccatcatggtgttaaccagctaaagtttgcccgaagccttcagtccgttgcagaggagcgagctggacgccactgtggggctctgagagtcctgaattcttactgggttggtgaagattccacataccagtggatcaccaaaccagtccacaagcacagggagatgcgtgggctgacatctgcaggccgaaagagccgtggccttggaaagggccacaagttccaccacactattggatgtctcgccgggcagcttggagaaggcgcaatactctccagctccaccgttaccgctaatataagtaaagtttgtaaaattcatacttaataaacaatttaggacagtcaa

SEQ ID NO: 151221 - DNA, 753 bp, Homo sapiens
ggtcgacgttttttttttttttttttttttgacggtcctaaattgtttattaagtatgaattttacaaactttacttatattagcggtagcggtggagctggagagtattgcgccttctccaagctgcccggcgagagccaccgaatagtgtggtggaacttgtggccctttccaaggccacggcttctttcggcctgcagatgtcagccccaacgccatctcccctgtgccttgtgggaactggttttggtgaatcccactgggtgttcaaggatttcttctgaatagcttttatggaaatggatcaaatgaggataacctcaaaaaaatttgtatgtggaatcttcaccaacccagtaaagaatttcaggactctcaagagccccacagtggcgtccagctccgctcctctgcaacggactgaaggcttcgagcaaacctttagctggttaacaccatgaatggacaggcttgccgtaagtttgcaccccttaggaactgggacgtttttcgccaccaacggcgaacatgaatcctatatataacggcgaacacgaatcctatatataacgtaaccttgcttggccttgtttgtagcccagtcggtgcactttatcaggccgggtggggcggggagccctgtggagagcagatagctggcggtactgccagcagcggaccctcagaagaaagcgcatgacatcagactgcttctttctccatagctccaggatgtacttgtatgcacccat

SEQ ID NO: 151222 - DNA, 637 bp, Homo sapiens; identical to SEQ ID NO: 144817
  misc_feature (1)...(637): n = a,t,c or g

SEQ ID NO: 151223 - DNA, 768 bp, Homo sapiens
  misc_feature (1)...(768): n = a,t,c or g
gacactcgctttttggaacgtctgaggttatcaataagctcctagtccagacgcccatgggtcatttcacagaggaggacaaggctactatcgacaagcctctggtgcaaggtgaatgtggaaagatgctggaggagaaaccctgggaaggctcctggttgtctacccatggacccagaggttctttgaccagctttggcaacctgtcctctgcctctgccatccatgggcaacccccaaagtcaaggcacatggcaagaaggtgctgacgatccttgggagatgccataaaagcacctggatgatctcaaagggcacctttgcccaagcctgaagtgaactgcacttgtgacaaagctgcaatgtggattcctgagaacttcaaagctcctggggaaatgtgctggtgacccgttttgggcaatcccattttcggcaaaagaatttcacccctgaaggttgcaaggcttcctgggcagaaagatgggtgacttgcagttggccagtggccctgttcctccaggataccactgaagctcaattgcccatgaatgcagagcttttcaaggataaggcttttattcttgcaagcaattacaaataataaatctatttctgctaagagatcaccaaannnnnatnntnnnnnnncccccggattttttatttagcgggccgcacctttttccccttttagggggggtaaatttatattgggccttgggccggggttttcaaaagcggggggannnnnnnnnnaaagagccc

SEQ ID NO: 151224 - DNA, 614 bp, Homo sapiens
  misc_feature (1)...(614): n = a,t,c or g
ggcacgaggagggtatcaataagctcctagtccagacgccatgggtcatttcacagaggaggacaaggctactatcacaagcctgtggggccagtgccctgtcctccagataccactgagctcactgcccatgatgcagagctttcaaggataggctttattctgcaagcaatcaaataataaatctattctgctaagaanaaacacccacccacgccnaacnccaaacaacataataaaaaaggggttttaattaaagggcccgagaggttaacccccttaagggggggtaaattttaaggtgggcccgggggcggggttttaaacaaggtcggaaccttggagacagggtnnnttttgccccgggcccctgggacgctttataatatccgcctcaataaggagaacgttaggtctggttctttttttatactcgggaaaacctctaaagggtgggaaaaaaactcaggggtcccttatattacgcgtcaccctttatatctggggagatcggaaaaatagcttttgggctatttantcatgcaaaccggctattatatttagtaacagattaagacaactctgaagagacaaccattagacgtgagaagcgg

SEQ ID NO: 151225 - DNA, 358 bp, Homo sapiens
tctggctagggatgaagaataaaaggaagcacccttcaacagatccacacactcgcttctggaacgtccgaggttatcaataagctcctagggcagacgccatgggtcatttcacagaggaggacaaggctactatcacaagcctgtggggcaaggcgaatgtggaagatgctggaggagaagccctgggaaggctcctggttgtctacccatggacccagaggttctttgacagctttgccagctgagtgaactgcactgtgacaagctgcatgtggatcctgagaacttcaagctccttggaaatgtgctggtgacccgttttgccatccatttccgcaaagaattcacccctgag

SEQ ID NO: 151226 - DNA, 506 bp, Homo sapiens
  misc_feature (1)...(506): n = a,t,c or g
gctcctagtccagacgccatgggtcatttcacagaggaggacaaggctactatcacaagcctgtggggcaaggtgaatgtggaagatgctggaggagaaaccctgggaaggctcctggttgtctacccatggacccagaggttctttgacagctttggcaacctgtcctctgcctctgccatcatgggcaaccccaaagtcaaggcacatggcaagaaggtgctgacttccttgggagatgccataaagcacctggatgatctcaagggcacgctgcatgtggatcctgagaacttcaagctcctgggaaatgtgctggtgaccgttttggcaatccatttcggcaaagaattcacccctgaggtgcaggcttcctggcagaagatggtgactggagtggccagtgccctgtcctccagataccactgacctcactgcccatgatgcagagctttcaaggataggcttcattctgcaagcaatncaaattaataaatctattctgc

SEQ ID NO: 151227 - DNA, 565 bp, Homo sapiens
ggtgaatgtggaagatgctggaggagaaaccctgggaaggctcctggttgtctacccatggacccagaggttctttgacagctttggcaacctgtcctctgcctctgccatcatgggcaaccccaaagtcaaggcacatggcaagaaggtgctgacttccttgggagatgctcctctgcctctgccatcatgggcaaccccaaagtcaaggcacatggcaagaaggtgctgacttccttgggagatgccataaagcacctggatgatctcaagggcacctttgcccagctgagtgaactgcactgtgacaagctgcatgtggatcctgagaacttcaagctcctgggaaatgtgctggtgaccgttttggcaatccatttcggcaaagaattcacccctgaggtgcaggcttcctggcagaagatggcagaagatggtgactggagtggccagtgccctgtcctccagataccactgagctcactgcccatgatgcagagctttcaaggataggctttattctgcaagcaatacaaataataaatctattctgctaagagatcac

SEQ ID NO: 151228 - DNA, 739 bp, Homo sapiens
ggcacgaggaggttatcaataagctcctagtccagacgccatgggtcatttcacagaggaggacaaggctactatcacaagcctgtggggcaaggtgaatgtggaagatgctggaggagaaaccctgggaaggctcctggttgtctacccatggacccagaggttctttgacagctttggcaacctgtcctctgcctctgccatcatgggcaaccccaaagtcaaggcacatggcaagaaggtgctgacttccttgggagatgcgtggggcaaggtgaatgtggaagatgctggaggagaaaccctgggaaggctcctggttgtctacccatggacccagaggttctttgacagctttggcaacctgtcctctgcctctgccatcatgggcaaccccaaagtcaaggcacatggcaagaaggtgctgacttccttgggagatgccacaaagcacctggatgatctcaagggcacctttgcccagctgagtgaactgcactgtgacaagctgcatgtggatcctgagaacttcaagctcctgggaaatgtgcaacctgtcctctgcctctgccatcatgggcaaccccaaagtcaaggcacatggcaagaaggtgctgacttccttgggagatgccataaagcacctggatgatctcaagggcacctttgcccagctgagtgaactgcactgtgacaagctgcatgtggatcctgagaacttcaagctcctgggaaatgt

SEQ ID NO: 151229 - DNA, 602 bp, Homo sapiens
ctgaggttatcaataagctcctagtccagacgccatgggtcatttcacagaggaggacaaggctactatcacaagcctgtggggcaaggtgaatgtggaagatgctggaggagaaaccctgggaaggctcctggttgtctacccatggacccagaggttctttgacagctttggcaacctgtcctctgcctctgccatcatgggcaaccccaaagtcaaggcacatggcaagaaggtgctgacttccttgggagatgccacaaagcacctggatgatctcaagggcacctttgcccagctgagtgaactgcactgtcataaagcacctggatgatctcaagggcacctttgcccagctgagtgaactgcactgtgacaagctgcatgtggatcctgagaacttcaagctcctgggaaatgtgctggtgaccgttttggcaatccatttcggcaaagaattcacccctgaggtgcaggcttcctggcagaagatggtgactggagtggccagtgccctgtcctccagataccactgagctcactgcccatgatgcagagctttcaaggataggctttattctgcaagcaatcaaataataaat

SEQ ID NO: 151230 - DNA, 1366 bp, Homo sapiens
  misc_feature (1)...(1366): n = a,t,c or g
ggcacgagatcaataagctcctagtccagacgccatgggtcatttcacagaggaggacaaggctactatcacaagcctgtggggcaaggtgaatgtggaagatgctggaggagaaaccctgggaaggctcctggttgtctacccatggacccagaggttctttgacagctttggcaacctgtcctctgcctctgccatcatgggcaaccccaaagtcaaggcacatggcaagaaggtgctgacttccttgggagatgccataaagcacctggatgatctcaagggcacctttgcccagctgagtgaactgcactgtgacaagctgcatgtggatcctgagaacttcaagctcctgggaaatgtgctggtgaccgttttggcaatccatttcggcaaagaattcacccctgaggtgcaggcttcctggcagaagatggtgactggagttgtggggcaaggtgaatgtggaagatgctggaggagaaaccctgggaaggctcctggttgtctacccatggacccagaggttctttgacagctttggcaacctgtcctctgcctctgccatcatgggcaaccccaaagtcaaggcacatggcaagaaggtgctgacttccttgggagatgccatatgagcacctggatgatctcaagggcacctttgcccagctgagtgaactgcactgtgacaagacaagctgcatgtggatcctgagaacttcaagctcctgggaaatgtgctggtgacccgttttgccaatccaatttcggcgcaaaaattctcccctttaagggcaggcttcctggcagaagatggcagaagatggtgactggagtggccagtgccctgtcctccagataccactgagctcacttgcccatgattcagagctttcagggattaggctttatcctgcaagcaatacaaataataaatctattctgctaagaaaaaacacccacccacgccnaacnccaaacaacataataaaaaaggggttttaattaaagggcccgagaggttaacccccttaagggggggtaaattttaaggtgggcccgggggcggggttttaaacaaggtcggaaccttggagacagggtnnnttttgccccgggcccctgggacgctttataatatccgcctcaataaggagaacgttaggtctggttctttttttatactcgggaaaacctctaaagggtgggaaaaaaactcaggggtcccttatattacgcgtcaccctttatatctggggagatcggaaaaatagcttttgggctatttantcatgcaaaccggctattatatttagtaacagattaagacaactctgaagagacaaccattagacgtgagaagcgg

SEQ ID NO: 151231 - DNA, 434 bp, Homo sapiens
tacaatattatcagtttcattactgatgaatattatatgcctcctgataagatgtactgaggaggacagaatatcacttttgtagatttataccaaaaatgcataatttggatataatgaagaaacagtcaaatccaagtttgaggctgggcacagtagctcatatctgtaatcccagcactttgggaggccaaggcagaggatcacatgaggtcaggagttcaagatcagcctggccaacgtggcaaaaccccatctctacgaaaaatacacagattagccaggcatggtggaatgcacctatagtcccagctacttgggaggctgaagcacaagaatcgcttgaatccaggaggcaaaagttgcagtgagccgagatcacaccactgcagttcagcctgggcaacagaccaagactctgtctcaaaaaaagg

SEQ ID NO: 151232 - DNA, 1338 bp, Homo sapiens
atgcccactgtgggcaaggcccaggcaagacgacggactcgtgacacgttactcctggatatcacgcaagtactgatagatcagtcaccacggaaagacacgggcttagcacaacagacaggtgtgattgtgccctcaaaaggcattgtgaaatattggcgggcccagctcaaaggtgatatgaaatatgcctctccagcatttgagttattttacttttctgtgagagcccagtccacagatgggattgtgacattgctagacccaacaactagagaagattgtgatatatcttcagccccaaacccagaggtgcgcacccaacgccaggcagaggtagcaggtgtggggctgctggcggtcaaggtcccccgagatgaggagggtgttctaggaggggccccggggccacagaagaggagcagagtgtgcggcgagcccaccttgcaaaggcgctctggtccgcttccagtggcccgaccaggctcccggtgtcctcctccaacctcagtttcctcacctgtcccagaggacgaatatggcaggactgttgtgatgattaggctggataatcctggcatatcaggcaggactatagagaacaatcctccagaattagaaaagcaacttccaggggaaccatctgagaactccccttatttggggccacctcaagttctcttcttattacgagaccctagggaagatgttatgctgcttctaaaccaaaccccaaccacagctgaaaagcaggcagttctgcaggcagcagagattttcagaaatgagcaacaaatctcctataatacatcaaaagggaagaaaggagatagggaatgtgaagaaatagcagaaacaccatttcaaataggaagtgaagcagttcctcttgacaaccctgactggaactccagtagctctgcgggtgaatggaaaaggagacactttttaatatgcattttagaaggtctggaaagaactaaggccaaatttcttaattgttctaaactgtctatggtagaccaaaagccagatgagaatcctgcagcatttatggaaaggctgagagaggcactaatagagcaaacctccttatccccagattcggtcgagaaacagctcattctaaaggacaagtttgttacacagtcagcttccaatattagaagaaaactacagaagcaagctataggaccaattagcaccttaaagaacctcctgaaggtggccactttggtcttttataatagaaaccaagaggaggaccctgtagtcccagctactcaggaggctgagacaggagaatctcttgaacctgggaggcggaggttgcagtga

SEQ ID NO: 151233 - DNA, 1354 bp, Homo sapiens
tttttttttttttttttgacagtacaggagataactttattgaaacgcaaatggcattgaacagatgaatctttgctgggagggagacatgccagatggacagagggcccagattgggggtggcctcagtggtgatgaaggaaggcctcttcagctggctctggcatgaattttatttttaaataatttgttatttaaaatgaattactgaggggacagcccggctctctcttcatgattgttaccgcaactatatacaacagtttgctttccagattcaatttcgctttttctacattagatataaaagggggtaggttgaaagaggggagggtcaaataaaaaacataaacacacagacatacacatatcctggtttgggattttgcacccaataacttaaaaaaaaagtgttgcaaaaacttctgacccactctccacctgaggaacaccatgcatttgagaaacacggactctgtcacataaacggtgctgcctaaaacagtatggaggcggggaaggaagctagcaggggttggaattcattttgaaaaaagattgttttgttagaaaaagcaaaaacaaaaaagcattagaaagtgggagccactgcacagcagtagcctagagactggctgcgatatggtagctctgccttgatatcatcttcgtgtcttcaggcatagagaaatggcagaggagcagtaagaccccacaggagatggccagaggatccaccatcagccttctggggactgaggaggtgatcttagtggaattattttatactcacctcccccggggtttagtccttcctccaaacacctagttccagggcgcaggagacctgttactagcactgtatgtttctttgtgctttacccaagttctcatacagggaaaattgacaaacttgaaacaaaaccagttctaaacagcctcatctcctccatggcccaatcagctattttatgagtttgtaaagatatgaagcttttttcagatattttttaaaaaggatcttatttggcagggtgctgtggctcacgcctgtaatcccagcactttgggaggctgtggcaggtgaatcacctgaggtcaggagctccagcacagcctggccaacaaggcaaaactccgtatctactaaaaatacaaaaattagctgggcgtgatggcgcacgtctgtaatcccagctactcaggaggctgagacaggagaatcgcttgaacctgggaggcggaggttgcagtgagccgagatcgtgccactgcacaccagcctgggtgacaaagcgagactccttctccaaaacaaacaaacaaacagaaaacaacaaaaaaaggattttat

SEQ ID NO: 151234 - DNA, 1082 bp, Homo sapiens
cagcgtggtggaattcgactccttttgcataagccagaagagcagtgccttgcttcctgtgaaaaatgcttggcagttagcctgtgtaattatttagcaatcatgttaatagatgtttaagaatatatgtaactggagctgtactgagccaaggatggaaatgaagacatgtgagactattttttcttcatccaccgatactcttcagttacaaggatttaatttaaaagggttttaattaaatggaatccagaagctttggacgctccagtttttcttcttagagacaaaccctagctcagtttcctgggagcttgactcaagaatgcagcatggtactcccggactgacagtgtgccagctttattcacttatctctctaccttttggcttgcatttatttcagggctggctgacattttgaccttatgtacaaagatggccgatacgattatttttcatcatatattacagaaaatactactcttgaaaaatactctgagaaatatgttctatgggtcagataagtttggggaaacagtgaattattgttcctcctttgcaggaatcacaatgcactgttaggctaattaaagactctcaggatgtcccactgggaaaggaatccatgtttaggctttgtttaacctaggcctttccccaaacttattagagcataaaactttgtttttgttttttttttaataagataggtagctatttccttagaacacagtttgggaaaactttttgttcatttgttttaataagaataccttaggtagctatttccttaaaacacgagccgggtgcatgtgtcacgcctgtaatcccagcactttgggaggcccaggcgggcggatcacctgaggtcaggagatcgagatcatccggcccaacatggtgaaaccccgtctctactaaaaagacaaaaattagccagccatggtggcaggcacctgtagtcctagctactgtggaggctgaggcaggagaatcacttgaacccgggatggggaggttgcagtgagctgagatggcgccactgtactccagcctgggcgacgagcaaaaactccttc

SEQ ID NO: 151235 - DNA, 441 bp, Homo sapiens
agatccaactcgtaacacaacctcacaaaaagcggtccaaatttatactcccccaaagtgaaatttttgttctctgcatggtacctgtaaatgacatttttagccagttccacatggtcccgagactcacacaaatgtagtaaggttatcaactcccccttcaagatgagcttgttctgggtcagtttctttttcaagtttctaaaatacgtttctttagtgccagaaagattacatgcaacagccactttcttttgttgaaattcttttaatttccccacattatctgtaagtaggtatcttttagctccgagagggcagcggcagctgacagagccggagcctcccaccccaggatacaccacaatctgcagcgcctgcaggagaactcgattcgagggccgaaatacagcagccatactgtctcggcggacgcgtggg

SEQ ID NO: 151236 - DNA, 1271 bp, Homo sapiens
tccgagacagtatggctgctgcatttcggccctcgaatcgagttctcctgcaggcgctgcagattttggtgtatcctggggtgggaggctccggctctgtcagctgccgctgccctctcggagagtttggaagcagaggtcttatggagtctcagttctgctaacaatctaaaagacttaacgctaaaagatacctacttacagataatgtggtgaaattaaaagaatttcaacaaaagaaagtggctgttgcatgtaatctttctggcactaaagaaacgtattttagaaacttgaaaaagaaactgacccagaacaagctcatcttgaagggggagttgataaccttactccatttgtgtgagtctcgggaccatgtggaactggctaaaaatgtcatttacaggtaccatgccgagaacaaaaatttcactttgggggagtattaatttggaccgctttttgtgaggttgtgttaccagttggatctcgaggaatctgcaggggagctcatgaaagaccagcatttacgaggtttcttctcagactccacattattcaatattttgatggatatgttatttatcaaaggcaaatataaaagtgctttgcaagtattgatagagatgaaaaaccaagatgtgaagttcaccaaagatacctatgttcttgcttttgcaatttgctacaaactgaatagccctgagtctttcaaaatctgtactacattaagagaagaagctctactcaaaggagaaattctctccaggagagcatcctgtttcgctgtggcattagctctgaatcagaatgagatggcaaaagctgtgtccattttttctcaaatcatgaatccagaaagcatagcctgcattaatttaaatattataatccatatccagtcaaatatgttggaaaacctgataaagactctaaaaaatgctgcagaaggaaatttatcaaaatttgtgaaaagacatgtgttctcggaggaagtgctggccaaagtgagggaaaaagtgaaggatgtgcctgcccttgtggccaaatttgatgagatctatgggacactgcacatcactggccaggtcaccactgattctttggatgctgtgctctgccacacccccagggacaggaaatctcacacgttgctattaaacaagaggatggtcagccgtcgcaccttccagccactcagccagtccctgttggctgagtaaccctggtttcagtccacctatggatctgaggggcctgcttctagtgag

SEQ ID NO: 151237 - DNA, 672 bp, Homo sapiens
cagcgctaagcactggaccgagacacaagatggcgccgatgtaaggtggaaccgtcgaccgcgagcgcttaagggtccatggtagttcattctcagtcagcagacccacagcaactgtggtgtcagaagctataaatggtctggccaagcaagactcagagtattttgtgaaatcctgagctgcaaggttctgcctcacctgtctctccactctgacatcacgaaatcagcaaaaccagatatttattctcctcactcccagcagatacgaggacaccaacaatgcagttgatccctctgggcctgagtctcccatctgaaacatggggaattggggtaggtcaagctttttgaaactgcaaaacctctacctgtttttaaaaatgagatcttttgaccaggcacagtggctcacacctaaaatcccagcactttgggaggctgaagcaggtggatcatctgaggtcaggagtttgagatcagcctggtcaacatggtgaaaccccgtctctactaaaaatacaaacattagctgggcatggtggtgggtgcctgtaatcccaactactcgagaggctgaggcaggagaatcgcttaaacttgggaggttgcagtgagctgagaccacaccactgccctctagcctgggtgacggagtgagactatctcaaa

SEQ ID NO: 151238 - DNA, 2100 bp, Homo sapiens
ctcgctgcatgcaattcgacgccatgctcttgtagctgaaggaagacatgtgataagtgattaacctggcctgaggatgatgtgactcttatactgacaggccttcccttaaaacatcttaagacctatatatctatctgtcgaactgaaatttactaacagagggaatttgaattggaatttacttccagctgcactcatgcttgaatttgcgaagtatactaataaataacaataggctcattgaggagagccttgtactcagcaagagtggctaacattagagcatacagactatgtgattgtataaggcatggagagttaaacaacctccagtcagctgcctgtttgaataccactgacttgttaagaatgatcttgcttttagattttaccatattcaaacttattaggtgagccttatatagcatatatacctggctgctattgtggggtttgggaacatgaggggtggggtgaactgttgttgttttaggtttcagtcagacagacatccctgtgcctcagttcccagaagcacagcatgcctctaggagcatccgtgggaacggcgcagtcctgacatcaccaactctcctgctcaggctcatcccatatacagaggtcaaagggtggggtttgagatcgggggaaggaatgagaaagtagaagcaatgtcacttcagtgccactgttgactagtctttggtgcttatgtcagtatttgttttatttcctgatttttttaaagttggcaaaactacatatttttatcttgatgaaggcagtgggagggtggaacaaaaacaagccattactgctatttctagttcatttactggagactgtcccttaatagctaatgtagaataaatttgaaacatagacctagatgacaaaaagaatgggaatagaaatgaatctcagggatttgaacaaacagaagacgtttatgctgtgttgatgcccagttctacaactgctattacatttgtcattctgtctccccttttcccctaattcttttatgtatgtatgtatacagtttgaggaaatgtgcatttatggtcagtcctttttaaaagacttaatgaatttattactcttttgcaaaaaatatacccactgcttatatgggcatacaaaggctaccctatttttaaatgtaggggggcgaatgggtccgtgttttaatgtattcagagccattgggcaataagcagtccagaacatttgaaaactcaagcaggtaaagcacctaacaccccctagtttctagaattactttaaaaaacttttatattgctgcatcttccacagttctttggggtagtctctgaacttaaaatttgtaggagttgtagactacctaaatttttaagttatggtatttgttcataggttgtaggggtaggtaaagaaggaaacagacaagaaaatggcttcttgaggtggcagctgctgagtggctaaatcttaccactttctttctactttttttggaaattttcccagcttagcatgaacatggatcatacagtgtttgattttatgtgattgagattttttgttttttatttttggagggaaggtcttgggagaaacattaaaaagttggtgtatgtgccaaaaatacgaaattgttaaacaaagggaattttttcttatttaatctgaatggttaagcaagaacttttttctatatacccctttctgctgcagcagacaactaaaactgggtaggtgggcagcaggagggaagggaattctttcaggtttgatgggctactgacttaaagtctgcatagggagaagagatagagcctgacatacccaagttgaagccagggggacaaaaatgggaaacaggactaagattcctgcattttgactctaaatggttcttttgaagtaaccagtgatcttttttgcttaccctcatcaacagaatggatgaagatagatttgactgtgtgctttttcaagtggagaatatgaatatacagaacaagaaagcaataactccaacctgtttgattccgtctgttttctaaataaagacactttgcgctggaaataacataaaaaaaaaaaaaaaaa

SEQ ID NO: 151239 - DNA, 391 bp, Homo sapiens
catatataaaccgctttgcaaaaagagagtgtatggaataaaagagaaaatgaagaagaggagaaaggctggagtgcagtggtgtgatctcggctcactgcagcctcaacctccctggctcaggtgattctcccgcctcagcttcctgattagctgggattacagtaatggtgaaattgccggtaatcgctaagtaaaaactactgaagaacaggacagaagccaatgaccacctcacctccaccgagtgccctgcagaaaaaggaaatggaaatccttcctgttattctccgcgtcccttcgtagaagactgcctgagaggtcagcacaggagtcctctaagtgccctgcagagaacacgggtctcggagcccggacaaacctaaatttt

SEQ ID NO: 151240 - DNA, 394 bp, Homo sapiens
ggaagtcccctggcagagaaggccttgtctgaaggctacgcccgctttcggtacagggacactttcttgctcatctggcagcagcaacagcataaggtggagtgggtgccacctgggacgtacctgagcaggagccgaagcatgtggtactcacagtatggaaatgaggccatcttggtccgagacaaaaacaagctcgaggtctctagggacacagggcagtccaagttttgcacaattatgtaattccgatgtgagcacctgaacccaggaccacactttgaggaaaacagacctgagtttcattcagttgtcttgttgatttccaatccttgctggaagattttgaataatgaacgtgaagatcaaactgtggtgtaagaacccaagaagc

SEQ ID NO: 151241 - DNA, 434 bp, Homo sapiens
ggtggcccacacgccctgacccctgcagagactggcccttgagcacacatcctgccagcgttgcaacgtgacctcagaccccattctgcatgtctgcgctgcctcccatgcttggggccaaccccgccacaacccgtcctcaggggagtctgtggtgcggtgagaaggtggcacacaggcattccagatttgcctctggagtttgctttcttcccaggcaggacttaaactgaagaactgaaaagatgcagacaaaccctacctagcggatgtggagtgcttccttggcgggcccgccttgctgtgggagtgtcagccggcggggcaggtcctccagccccatgctcactccctctgcagctccatgcggcaatcctggaagtctgacttcaaatctcccagctgcaggctgcaaaccctcgtgccaagcttgg

SEQ ID NO: 151242 - DNA, 1542 bp, Homo sapiens
atgcaggccttgccagtggtgtgccgggcgcgggtcctgtctggcggcggcctgtcgtctccagagtttcgaaggattaatgacttcctcagcgcccttgctggcgggctgaggagactggcccttgagcacacatcctgccagcgttgcaacgtgacctcagaccccattctgcatgtctgcgctgcctcccatgcttggggccaaccccgccacaacccgtcctcaggggagtctgtggtgcgctccatgcggcaatcctggaagtctgacttcaaatctcccagctgcaggctgcaaacaagccaggactctcgcagaagggactcgggctgtgcaggaggctgctgccgaccaggcctctggcaggacatttggggaatgcactttgacccagcagttccacttctaggacgtttgcgaatgaacttgcacagctgcaaagagaagcacgaacagaagacctcgagcttgtttttgtctcggaccaagatggcctcatttccatactgtgagtaccacatgcttcggctcctgctcaggtacgtcccaggtggcaccgactccaacttctgctgttgctgctgccagatgagcaaggaggtgtccctgtaccggaggcgggcgtaagcctttcagacaaggccttctctgcccagggggaacacggccactcatcccctcccccgtcccgctggactccctgggaaccctgctgttctgagacggcccacgcgcactaaattaacggacagctttcccagctatggggcttaaggatccctcgtttaactgaatggtagaaattaggaattccgcccatttgcaggcaacgtcctcaggagggttgtgtggtgaggaaatgaggcggcctcaccattctgaagacacctgagacccattcaggggaccgcacacaggtcagagcggcgcccggccacagctcttccgggtgcagctgtgtggaattgacagggacgaggcgtcacaccctggggggtgaattctgccaccatggcctggaccactgagcttgaagagatggatccagtgccctgaggaagggacatggtggccccagacgcaagctggaaggaagcttccggttgcaacgcccccgcacgcatctgtcccggccaagctttcagggcaaacggctgttctgaccccaccctggggatccagcaccagcgtttgttcaggtctcgtctctccccaaaggtgcttggtcccgtggggcagccttgggagctgggtggagagtgagacgaggcgcccagtgccagctttttcagtcactgggaggtgctggggaggctgcttgttggggcttcagggtctccatctgtgaaacaggagccagcggcgcttgaaagggcgcgggttcccggagacgccgccaggcgtcagccccgggaccggaaggggcccccaggcccgccttgctgctccgagcatccagctcccgtgagagccccgctcgtcgcgggcctcggagatgcgggcagcggcgcgcctcgtgccaagcttggcgtaatgatg

SEQ ID NO: 151243 - DNA, 455 bp, Homo sapiens; identical to SEQ ID NO: 145206
  misc_feature (1)...(455): n = a,t,c or g

SEQ ID NO: 151244 - DNA, 523 bp, Homo sapiens; identical to SEQ ID NO: 145207
  misc_feature (1)...(523): n = a,t,c or g

SEQ ID NO: 151245 - DNA, 4345 bp, Homo sapiens; identical to SEQ ID NO: 145208

SEQ ID NO: 151246 - DNA, 9234 bp, Homo sapiens; identical to SEQ ID NO: 145209

SEQ ID NO: 151247 - DNA, 3943 bp, Homo sapiens; identical to SEQ ID NO: 145210

SEQ ID NO: 151248 - DNA, 454 bp, Homo sapiens; identical to SEQ ID NO: 145211

SEQ ID NO: 151249 - DNA, 1647 bp, Homo sapiens; identical to SEQ ID NO: 145212

SEQ ID NO: 151250 - DNA, 17889 bp, Homo sapiens; identical to SEQ ID NO: 145213
  misc_feature (1)...(17889): n = a,t,c or g

SEQ ID NO: 151251 - DNA, 939 bp, Homo sapiens
tcatggagaggttatagctcctgacttctctgacttcttgctcttggacaaagcagctgcctgcttcaggagctctcggtttttggcctgcagttgttctgtgacttctttgtgggttttctccatctggttcattttggctctcatctgcgattcctggtactgaaaatcagccttcaactctgtaatcttcttctctttctctaaaatcatttgatccttttgatgcaacatcttcttcagggtagccacttcttccttcagttgggcaatgatgacaaagtggtcagtgcctggtgagtccagagccaggtctggggagaagctgttataatggccaccaccactcaggcgactatactgctccttctcctggtggccagcacgagaagagctactcaggtgtttcctctgctctttggtcttctgaaggacccgtttgtatgaaagtgtgcacagccagcacagcaatttcccatctaccttctttctatcatctttcctgtcaaatgcacactgctgcttgcactgttcacaagaatagggtggtccatacttcttttctgaatttgtgcagcgctggcatttattcccaataaatgctgcaattatgttgcaatactgacaaggtttgggcgttccatacaactgcacgttctgagcacatttcttgcatattgtattggttttaatgcctgtaatcccagctactcgggaggatgaggcaggagaatcgcttgaacctgggaggtggaggttgcagtgagccgagatcgtgccattgcactctagcctctcctgctggtactcagtcctgcagtaggtgcacttcacaacagggtgtgcaatccgacattccttgcacagctgctgcccctgagacagcgcctcgaaggggaagcgctggtggcacttggtgcaggcgtagagcgccgccat

SEQ ID NO: 151252 - DNA, 1026 bp, Homo sapiens; identical to SEQ ID NO: 144771

SEQ ID NO: 151253 - DNA, 855 bp, Homo sapiens
atggacgtcgtggaccctgacattttcaatagagacccccgggaccactatgacctgctacagcggctgggtggcggcacgtatggggaagtctttaagctctttgctaagtgttatacatgcattcacacttatgatgccatgagagttctcttcctcatgaccaagagtggctcccagcttccccgactgaaggaaaaaggtaaatggtacgagagagtaacaggagggaggtcagcaaatgtgcactacattattgtttattgtgaatctgtccacttccttccaatcctactgccgacactctccaccaagccactgtcatctccagagctcaatgcggctgcctcctatgtacccttcccgcccataatccacatcgacacagcagcgagcatgtgttacctgtttcacatgtacgtgggtgtccgggctggcggaggcattggggacgagatcgaggaccccgcgggtgacgaatacgagctctacagggtggtcttcgacatcaccttcttcttcttcgtcatcgtcatcctgttggccatcatccagggtctgatcatcgacgcttttggtgagctccgagaccaacaagagcaagtgaaggaggatatggagaccaagtgcttcatctgtggaatcggcagtgactactttgatacgacaccgcatggcttcgagactcacacgctggaggagcacaacctggccaattacatgtttttcctgatgtatttgataaacaaggatgagacagaacacacgggtcagagcagagctctgtgccgagcctttaggggtatgagagaaaccggagacctggtccgtgctctcaaagagctcgcggtgtag

SEQ ID NO: 151254 - DNA, 445 bp, Homo sapiens
agctccatgttccctcctcaccaggctccatcttcaccatcttcagtgccaccaggtcccctgacaccttgtctcgagccttgcaaaggggaagttggcagtcaggcaggctccatttgccagagtccctccacagcatccctgagtcaaggtcaagaactgggaccccctcttgcagcctcctccctgccgagggcttgccttaaaggtcactggttgtagggtgttggggacagaggggcttcctcaccttaaagacttccccatacgtgccgccacccagccgctgtagcaggtcatagtggtcccgggggtctctattgaaaatgtcagggtccacgacgtccatccctgggggcctgagctgggcctgcgcccaggggccagcagggcctcagggctcaacttctggcacgaatcgtcgagccgggaattccgggccggt

SEQ ID NO: 151255 - DNA, 652 bp, Homo sapiens
tttttttttttttttttagcaaaggctaaagtcatgtttattgggagatgaggacatgccatgaccactagtgtgtctatgggggagggggtgcaaggactagttcctgacacccccctagggactcattcctggatgtaaaggttgctgggagcagtatgatcatccactgggcgtgtctccaccactacaggcctgggggagccaagcagacggaaagtgagggtagggtctctcagctcctgtagcagctgatccgagcctagagcccacacctgcactccatgcttccataaggcctgaagctgacctccaaccatagccacggactccaccgcttcggtcatggggatctcaggtgtgcgaagtccccggactggggacccctccggggtcaccaggcttcacagagccatccatcaacaccatcaccatatcttcctctacctgggtcacctgcacgggtcccctgtgctcggtgctcatctcgcccagccagcaagagagcgcgccaaagcgcaccgtgttggaagagcaccgacttccccggccgcccggggctcacgccgatgcacacagcgggcagctcagagcctggcccggtcagcagcgcgaacacggacaagaggcgtcgcagtgggaacagcaccct

SEQ ID NO: 151256 - DNA, 2940 bp, Homo sapiens
gaaatctgattcaaattccagaaaaatccgatttaactaataagtctgaatcagcaagaatgccaagacagagaaatctattcacatggtaaaaggagtgatgatagagaatgacacaatgtctctctgagtgtcttatctgtaaattcttatcaggaaaagtaacgctgggccaggcgcagtggctcacgcatgtaatcccagcactttgggaggctgaggcaggcagatcacctgaggtcgggcgttcaagaccaagcctggccggcatggtgaaatcccgtctctactaaaaatacaaaaaaaaaaaaaaaaaaaaaagattagccgggcgtggtggcacatgcctgtagtcccagctacttgggaggctgaggcaggagaattgcttgaacccggtaaggcggaggttgcagcgaggcgagatcgtgccactgcactcccagcctgggggagccaagcagacggaaagtgagggtagggtctctcagctcctgtagcagctgatccgagcctagagcccacacctgcactccatgcttccagaaggcctgaagctgacctccaaccatagccacggcctccaccgcttcggtcatggggatctcaggtgtgcgaagtccccggactggggacccctccggggtcaccagcttcacagagccatccatcaacaccatcaccatatcttcctctacctgggtcacctgcacgggtcccctgtgctcggtgctcatctcgcccagccagcaagagagcgcgccaaagcgcaccgtgtggaagagcaccgacttccccggccgcccggggctcacgccgatgcacacagcgggcagctcagagcctggcccggtcagcagcgcgaacacggacagaggcgtcggcagtgggaacagcacctgctgcgggccgcacagggaggggcgggccggacaagcaggaatttgttcatgggctggtaccactgaagcaggacaacggacgtctccaatgcaccgcacaggaacgggcccccagagctcgcaccctccgccacacagcacgcccggcagcctttggtgtcctggatcttggtggaaaccatgttcttccttgccagtaggcggtgggggctaatgtgagcgatggggtttcctgctctggtctctttccgttccagcaggccaaggatgctatgagaatacacggtggggggtctttcctgagagagacatgagaacgttgttgatggagtacacccacgtagtccggctaggaaagagcatttccagcgtggcctcctggtcattccggttcaggatgaagatgccttcctctgcccccaggagcaggtgctggtccttggtggagggatgtgtccaggcggccgtgctgtggatccggagggggcagccattgaacaactttacgagaagggcacatccctttctcttcatcttttccttcttggggggcagaagtgggggcttgtcaagctcccgggagggtgggttccagagtgagggttctgaatgggcggtgaggtgggggctgctggtggatgggggaggcccaggacgggggctgtttggtgggggcccactggcacaccggaccagcacccccgggctcagctgcccatcatcccccatgctcccaggaccctcgtctgatggagaacggaacttgggcttggggggaagtggaggaggtgtgtcctctgcaggggtggggatgtccacgtcgtcatagtcatcgtcagacgactctgacagttgcttcctggggctgctgctcctgaggtctcgaggaggctgtaggcgagcggtgttggctgggggtctggtctccattcctcggagcttcctgaactccatgtgccgccgacagcagtctgcatctgggatccccagagagctggagcggtgggtggatctgatccgccgagggatagcagggggtagctcgggctcctcatcctcaatgtccccaatggagggtcctttcccgggattcttcagtttgtcaagaagatccaggatcaggcctcgattcagcccaggctgggataccagttgatgactgagcatcttggtggcgctgggtcgtttcttgggactcttagtcagagtgactttgatgaagttgtggaaggcagccgaccatttgcctttttccttcagtcggggaggctggtagccactcttggtcatgaggaagagaactctgagagggtgcacatcaaagagcggtggctgtagctcggccagttcgatggccgtgatgcccagggaccagatgtcacacagctcattgtatcctcccttcagggccacagctgccacttccggagccatccagtagggtgtcccaatgaaagagaggcgtctggccagtgtagccccaatctgggccgagatgccaaagtcagccaatctgacctccccagcatcattgatgaggatgttagctcccttgatgtccctgtgtatcttcttctgtgagtgcaaataggccagtccctggagcacttcccggcagacatagctaatctggagctctgacagggagcctgtcacttggtagatgtcctggagagaaccagccccacagaattccatgcagatccagagtttctgcaaccagagataactcccatggtaggccacgatgttggcgtgccggcaagttttcaatatgaggatttccttctgaagggtggagacatcatcatcaggctccatcttcaccatcttcagtgccaccaggtcccctgacaccttgtctcgagccttaaagacttccccatacgtgccgccacccagccgctgtagcaggtcatagtggtcccgggggtctctattgaaaatgtcagggtccacgacgtccatccctgggggcctgagctgggcatgcgcccaggggccagcagggcctcagggctcaacttctgacgaaatt

SEQ ID NO: 151257 - DNA, 1491 bp, Homo sapiens; identical to SEQ ID NO: 145300

SEQ ID NO: 151258 - DNA, 462 bp, Homo sapiens; identical to SEQ ID NO: 145301
  misc_feature (1)...(462): n = a,t,c or g

SEQ ID NO: 151259 - DNA, 761 bp, Homo sapiens; identical to SEQ ID NO: 145306

SEQ ID NO: 151260 - DNA, 432 bp, Homo sapiens; identical to SEQ ID NO: 133897
  misc_feature (1)...(432): n = a,t,c or g

SEQ ID NO: 151261 - DNA, 488 bp, Homo sapiens; identical to SEQ ID NO: 145341

SEQ ID NO: 151262 - DNA, 868 bp, Homo sapiens; identical to SEQ ID NO: 145342

SEQ ID NO: 151263 - DNA, 422 bp, Homo sapiens; identical to SEQ ID NO: 145373

SEQ ID NO: 151264 - DNA, 321 bp, Homo sapiens; identical to SEQ ID NO: 145374

SEQ ID NO: 151265 - DNA, 433 bp, Homo sapiens; identical to SEQ ID NO: 145387

SEQ ID NO: 151266 - DNA, 495 bp, Homo sapiens; identical to SEQ ID NO: 145388

SEQ ID NO: 151267 - DNA, 2297 bp, Homo sapiens; identical to SEQ ID NO: 145389
  misc_feature (1)...(2297): n = a,t,c or g

SEQ ID NO: 151268 - DNA, 491 bp, Homo sapiens; identical to SEQ ID NO: 145427

SEQ ID NO: 151269 - DNA, 2977 bp, Homo sapiens; identical to SEQ ID NO: 145428

SEQ ID NO: 151270 - DNA, 336 bp, Homo sapiens
  misc_feature (1)...(336): n = a,t,c or g
ggcacgagcggcacgaggctgctggacgaccagatccagagtctggtgagccagtgagtgagggcagctggctgtggcccagcgctgtgtgacccggaggagccactcactctctctgagatgctggacatcataagtggggaagctcaggccaggggactcccaggagtgtctggaggcctgagttccattctcagctctgccgtatgcttgctgtgctctagaggagttcctcttcctctccgagcctcggtttatgcacctgtgcagcgggagatccacctctgatgttcaatgaagactaccagaaaagtctgctagagcagtaccatctgn

SEQ ID NO: 151271 - DNA, 834 bp, Homo sapiens
gagttgattttgggtaacattaaatgtcaacaggagggtgaaacaaatgaaaataacaccagtccctcaagtcacgatatagcagctctagtctctgccaggcccttctttactataatgttgcctaatgactggcaacctaggaacaattgttaggtgcttgtccccaaactagctcttatttttcagaactacccataaggaatgggatccagggatgtgtgataggaatggggatggagtggggaccaccaaatgaggactaatctaggggacctgagctatcccagatcagctagtctagtcacttgctaggaatgggggatctttagaggcaccagaaagatacattttctaagagatacaagagccagtagatatgccattctggcagctttttaacaaaagtacaaggcattcaggatgaaccagatggttaggaaaggcttagaaccagaagtctgaagggccactctggtcagaacttgatttcaggagataatctgtcctcagaaaaggggaacacttctgtctaagacaagacccaaatggcaattaattagaggctgataaacttgctttatttagatatgtttaagtgcagactaaatctccatcccacagggctatctatactgcagaggcctgcaagtccccagtgacctgcctcatcacccctctgccctctgttgctgcccctctcctggctccattggcttctcactgctcaccaaacaaaccagacaggtgcctgcctcaggccttgcttgtcttctggctggaggttggggaaactcgtgcagcacctgctccctcacctccttttatacttgc

SEQ ID NO: 151272 - DNA, 351 bp, Homo sapiens
ggcacgagccgtacgaggtctcacgttatcattaagctcctagaccaggggccatggggcatttcacacaggacgacatggctactattacaagcctgtcgggccaggtgaatgtggaagatcctcgaggagaaaccctggcatggctcctgttcgtctacccatggacccataggctctttgacagctttggcaccctgacctctgcctctgccatcatgggcaactccaaattcaaagcacctggcaagatggtgctaacttccttgatagatgccatatcgcacctggatgatctcatgggctccttctaccagctgattgaactgcactgtgacaagctgcctgtcc

SEQ ID NO: 151273 - DNA, 365 bp, Homo sapiens
ggcacgagccacagactcagagagaacccaccatggtgctgtctcctgcctgcaagaccaacgtgaaggccgcctggggtaaggtcggcgcgcacgctggcgagtatggtgcggaggccctggagaggatgttcctgtacttccggatgaccaggacatacttgtggtacttctgcctgtgccactgctgtaggcaagcttggggacctggctttaacttctggaccacctgtgacggttgtcagacaaggaggcactgatttacatgtccgttggaagctgtgactaattttttaggctccaattgttttggcgcttcggtgcatttaagcctgcttttagctggccctcactatctagtggcg

SEQ ID NO: 151274 - DNA, 661 bp, Homo sapiens
cggaaggcaaatggctggcgtggaagcacaacccgctttcactcttcgaatttgtgcttagctcttttcttgtaccttgcgactcgcgaccaacatgctgtgatgtgtgccgagggaggaattggtcagctacacaacctggatcttaccacagtttggatatgactgaggctctccaatgggccagatatcactggcgacggctgatcagaggtgcaaccagggatgatgattcagggccatacaactattcctcgttgctcgcctgtgggcgcaagtcctctcagatccctaaactgtcaggaaggcaccggattgttgttccccacatccagcccttcaaggatgagtatgagaagttctccggagcctatgtgaacaatcgaatacgaacaacaaagtacacacttctgaattttgtgccaagaaatttatttgaacaatttcacagagctgccaatttatatttcctgttcctagttgtcctgaactgggtacctttggtagaagccttccaaaaggaaatcaccatgttgcctctggtggtggtccttacaattatcgcaattaaagatggcctggaagattatcggaaatacaaaattgacaaacagatcaataatttaataactaaagtttatagtagaaaaaaaaaaaaaaa

SEQ ID NO: 151275 - DNA, 410 bp, Homo sapiens
ggggcttctggaacgtctgaggttatcaataagctcctagtccagacgccatgggtcatttcacagaggaggacaaggctactatcacaagcctgtggggcaaggtgaatgtggaagatgctggaggagaaaccctgggaaggctcctggttgtctacccatggacccagaggttctttgacagctttggcaacctgtcctctgcctctgccatcatgggcaaccccaaagtcaaggcacatggcaagaaggtgctgacttccttgggagatgccataaagcacctggatgatctcaagggcacctttgcccagctgagtgaactgcactgtgacaagctgcatgtggatcctgagaacttcaagctcctgggaatcaaataataaatctattctgctaagagattccca

SEQ ID NO: 151276 - DNA, 478 bp, Homo sapiens
  misc_feature (1)...(478): n = a,t,c or g
acgtctgaggttatcaataagctcctagtccagacgccatgggtcatttcacagaggaggacaaggctactatcacaagcctgtggggcaaggtgaatgtggaagatgctggaggagaaaccctgggaaggctcctggttgtctacccatggacccagaggttctttgacagctttggcaacctgtcctctgcctctgccatcatgggcaaccccaaagtcaaggcgatcctgagaacttcaagctcctgggaaatgtgctggtgaccgttttggcaatccatttcggcaaagaattcacccctgaggtgcaggcttcctggcagaagatggtgactggagtggccagtgccctgtcctccagataccactgagctcactgcccatgatgcagagctttcaaggataggctttattctgcaagcaatcaaataataaatctattctgctaagagatcacanaaaanaaaaaaaaaaaa

SEQ ID NO: 151277 - DNA, 562 bp, Homo sapiens
  misc_feature (1)...(562): n = a,t,c or g
ggaacgtctgaggttatcaataagctcctagtccagacgccatgggtcatttcacagaggaggacaaggctactatcacaagcctgtggggcaaggtgaatgtggaagatgctggaggagaaaccctgggaaggctcctggttgtctacccatggacccagagctttggcaacctgtcctctgcctctgccatcatgggcaaccccaaagtcaaggcacatggcaagaaggtgctgacttccttgggagatgccacaaagcacctggatgatctcaagggcacctttgcccagctgagtgaactgcactgtgacaagctgcatgtggatcctgagaacttcaagctcctgggaaatgtgctggtgaccgttttggcaatccatttcngcaaagaattcacccctgaggtgcaggcttcctggcagaagatggtgactgcagtggccagtgccctgtcctccagataccactgagctcactgcccatgattcananctttcaagggataggctttattctgcaagcaatacaaataataaatctattctgctgagagatctcc

SEQ ID NO: 151278 - DNA, 452 bp, Homo sapiens
ggaacgtctgaggttatcaataagctcctagtccagacgccatgggtcatttcacagaggaggacaaggctactatcacaagcctgtggggcaaggtgaatgtggaagatgctggaggagaaaccctgggaaggctcctggttgtctacccatggacccagaggttctttgacagctttggcaacctgtcctctgcctctgccatcatgggcaaccccaaagtcaaggcacatggcaagaaggtgctgacttccttgggagatgccacaaagcacctggatgatctcaagggcacctttgcccagtggccagtgccctgtcctccagataccactgagctcactgcccatgatgcagagctttcaaggataggctttattctgcaagcaatacaaataataaatctattctgctaagagatcacaaaaaaaaaaaaaaacggccgcgaattc

SEQ ID NO: 151279 - DNA, 539 bp, Homo sapiens
  misc_feature (1)...(539): n = a,t,c or g
ggaacgtctgaggttatcaataagctcctagtccagacgccatgggtcaagcctgtggggcaaggtgaatgtggaagatgctggaggagaaaccctgggaaggctcctggttgtctacccatggacccagaggttctttgacagctttggcaacctgtcctctgcctctgccatcatgggcaaccccaaagtcaaggcacatggcaagaaggtgctgacttccttgggagatgccataaagcacctggatgatctcaagggcacctttgcccagctgagtgaactgcactgtgacaagctgcatgtggatcctgagaacttcaagctcctgggaaatgtccatttcggcaaagaattcacccctgaagtgcaggcttcctggcagaagatggtgactggagtggccagtgccctgtcctccagataccactgagctcactgcccatgatgcagagctttcaaggataggctttattcctgccnnccatacnaatnataaatctattctgctnnnaaatctccnnnnaaaaaaaaaaaaa

SEQ ID NO: 151280 - DNA, 847 bp, Homo sapiens
  misc_feature (1)...(847): n = a,t,c or g
acgtctgaggttatcaataagctcctagtccagacgccatgggtcatttcacagaggaggacaaggctactatcacaagcctgtggggcaaggtgaatgtggaagatgctggaggagaaaccctgggaaggctcctggttgtctacccatggacccagaggttctttgacagctttggcaacctgtcctctgcctctgccatcatgggcaaccccaaagtcaaggcacatggcaagaaggtgctgacttccttgggagatgccataaagcacctggatgatctcaagggcacctttgcccagctgagtgaactgcactgtgacaagctgcatgtggcctgtggggcaaggtgaatgtggaagatgctggaggagaaaccctgggaaggctcctggttgtctacccatggacccagaggttctttgacagctttggcaacctgtcctctgcctctgccatcatgggcaaccccaaagtcaaggcacatggcaagaaggtgctgacttccttgggagatgccataaagcacctggatgatctcaagggcacctttgcccagctgagtgaactgcactgtgacaagctgcatgtggatcctgagaacttcaagctcctgggaaatgtgctggtgaccgttttggcaatccatttcggcaaagaattcacccctgaggtgcaggcttcctggcagaagatggtgactggagtggccagtgccctgtcctccagataccactgagctcactgcccatgatgcagagctttcaaggataggctttattctgcaagcaatcaaataataaatctattctgctaaganatcccnnnaaaaaaaaaaaaaaaaaaa

SEQ ID NO: 151281 - DNA, 689 bp, Homo sapiens
ggaacgtctgaggttatcaataagctcctagtccagacgccatgggtcatttcacagaggaggacaaggctactatcacaagcctgtggggcaaggtgaatgtggaagatgctggaggagaaaccctgggaaggctcctggttgtctacccatggacccagaggttctttgacagctttggcaacctgtcctctgcctctgccatcatgggcaaccccaaagtcaaggcacatggcaagaaggtgctgacttccttgggagatgccataaagcacctggatgatctcaagggcacctttgcccagctgagtgaactgcactgtgacaagctgcatgtggatcctgaggtgctgacttccttgggagatgccataaagcacctggatgatctcaagggcacctttgcccagctgagtgaactgcactgtgacaagctgcatgtggatcctgagaacttcaagctcctgggaaatgtgctggtgaccgttttggcaatccatttcggcaaagaattcacccctgaggtgcaggcttcctggcagaagatggtgactggagtggccagtgccctgtcctccagataccactgagctcactgcccatgatgcagagctttcaaggataggctttattctgcaagcaatacaaataataaatctattctgctaagagatcacaaaaaaaaaaaa

SEQ ID NO: 151282 - DNA, 1365 bp, Homo sapiens
ggaacgtctgaggttatcaataagctcctagtccagacgccatgggtcattttacagaggaggacaaggctactatcacaagcctgtggggcaaggtgaatgtggaagatgctggaggagaaaccctgggaaggctcctggttgtctacccatggacccagaggttctttgacagctttggcaacctgtcctctgcctctgccatcatgggcaaccccaaagtcaaggcacatggcaagaagggctactatcacaagcctgtggggcaaggtgaatgtggaagatgctggaggagaaaccctgggaaggctcctggttgtctacccatggacccagaggttctttgacagctttggcaacctgtcctctgcctctgccatcatgggcaaccccaaagtcaaggcacatggcaagaaggtgctgacttccttgggagatgccataaagcacctggatgatctcaagggcacctttgcccagctgagtgaactgcactgtgacaagctgcatgtggatcctgagaacttcaagctcctgggaaatgtgctggtgaccgttttggcaatccatttcggcaaagaattcacccctgaggtgcaggcttcctggcagaagatggtgactggagggaggagaaaccctgggaaggctcctggttgtctacccatggacccagaggttctttgacagctttggcaacctgtcctctgcctctgccatcatgggcaaccccaaagtcaaggcacatggcaagaaggtgctgacttccttgggagatgccataaagcacctggatgatctcaagggcacctttgcccagctgagtgaactgcactgtgacaagctgcatgtggatcctgagaacttcaagctcctgggaaatgtgctggtgaccgttttggcaatccatttcggcaaagaattcacccctgaggtgcagagcttcctggcagaagatggtgactggagtggccagtgccctgtccttcagataccactgagctcactgcccatgatgcagagctttcaaggataggctttattctgcaagcaatcaaataataaatctattctgctaagagatcactgagtgaactgcactgtgacaagctgcatgtggatcctgagaacttcaagctcctgggaaatgtgctggtgaccgttttggcaatccatttcggcaaagaattcacccctgaggtgcaggcttcctggcagaagatggtgactgcagtggccagtgccctgtcctccagataccactgagctcactgcccatgattcagagctttcaaggataggctttattctgcaagcaatacaaataataaatctattctgctaagagatcacaaaaaaaaaaaa

SEQ ID NO: 151283 - DNA, 951 bp, Homo sapiens
gaggttatcaataagctcctagtccagacgccatgggtcatttcacagaggaggacaaggctactatcacaagcctgtggggcaaggtgaatgtggaagatgctggaggagaaaccctgggaggttatcaataagctcctagtccagacgccatgggtcatttcacagaggaggacaaggctactatcgacaagcctctggtgcaaggtgaatgtggaagatgctggaggagaaaccctgggaaggctcctggttgtctacccatggacccagaggttctttgacagctttggcaacctgtcctctgcctctgccatcatgggcaaccccaaagtcaaggcatatggcaagaaggtgctgacgatccttgggagatgccataaagcacctggatgatctcaaagggcacctttgcccaagcctgaagtgaactgcacttgtgacaaagctgcatgtggatcctgagaacttcaaagctcctggggaaatgtgctggtgacccgtttttggcaatcccattttcggcaaaagaattcacccctggaggttgcaggcttcctgggcagaaagatgggtgacttggagttggccagtgccctggtcctccagataccactgaagctcaattgcccatgaatgcagagcttttcaaggatatggctttattcttgcaagcaattacaaataataaatctatttctgctaagagatcaaacttcaagctcctgggaaatgtgctggtgaccgttttggcaatccatttcggcaaagaattcacccctgaggtgcaggcttcctggcagaagatggtgactggagtggccagtgccctgtcctccagataccactgagctcactgcccatgatgcagagctttcaaggataggctttattctgcaagcaatcaaataataaatctattctgctaagagatcaaaaaaaaaaaaaaaa

SEQ ID NO: 151284 - DNA, 664 bp, Homo sapiens
cggtcgacccacgcgtgcggacacaactgcgtacactagcaacctcaaacagtttccattttgcacctgactcctgaggagaagtctgccgttactgccctgtggggccaaggtaaacctggatgaagtcgatgttgaggccctgggcaggcttcatggtggtctacccttggacccagaggttattggagtcctttgggaatctgtccactcctgatgctgttatgggcaaccctaaggtgaaggctcatggcaagaaagtgctcggtgccttttagtgatggcctggctcacctggacaacctcaagggcacctttgccacactgagtgagctccactgtgacaagctgcacgtggatcctgagaacttcaggctcctggggcaacgtgcctggtctgtgtcgctgggcccatcacttttggcaaagaattcaccccaccagttgcaggcttgcctatcagaaagttggtggctggttgtggctaatgccctggcccacaagtaatcacttaagcctcgctttccttgctggtccaatttccaattaaaaggttcctttggttccctaagtccaaatacttaaactggggggatattattgaaagggccttgagcatcttggattttgcctaataaaaaaaatttatttttcattgcaaaat

SEQ ID NO: 151285 - DNA, 772 bp, Homo sapiens
  misc_feature (1)...(772): n = a,t,c or g
aattttgccctcgaggccaagaattcggcgagggcaataagctcctagtcccagacgcccatggggtcatttcacagaggaggaccaaggctactatcgacaagcctgtggggcaaaggtgaatgtggaaagatgctggaggagaaacccctgggaaggctcctggttgtctacccatggacccagaggttctttgaccagctttggcaacctgtcctctgcctctgccatccatgggcaacccccaaagtcaaggcacatggccaagaaggtgctgactttccttgggagatgccaacaaagcacctggatgatctcaaagggcacctttgcccaagcctgaagtgaactgcacttgtgacaaagctgcatgtggatcctgagaacttcaaagctcctggggaaatgtgctggtgacccgttttgggcaatcccattttcggcaaaagaattcacccctgaaggttgcagggcttcctgggcagaaagatgggtgacttggagttggccagtgccctgttcctccagataccactgaagcctcttggcccatgaattcagaagctttcaaggataaggcttttattcttgcaagcaattacaaataataaatctatttctgctaagagatcaccaaannnnnatnntnnnnnnncccccggattttttatttagcgggccgcacctttttccccttttagggggggtaaatttatattgggccttgggccggggttttcaaaagcggggggannnnnnnnnnaaagagccc

SEQ ID NO: 151286 - DNA, 435 bp, Homo sapiens; identical to SEQ ID NO: 145455

SEQ ID NO: 151287 - DNA, 449 bp, Homo sapiens
gtacataatacctactttagagattggcatggaaatataaagtatgtgggccttactaatgctagataatgctttgctttcttttatttgcatcttaccctcttccgtgagtattgatactgtcttaaacatagtaggggttgattagatatttgctggttgccccttcacttgcaagggatacatacaaatgttggtttgtattggataatgaatatgatgtttttaagagtaatatgtgattttgttactttttgaaggccttaacaacattaacactagtaaaagaagtagtaacatttagtctgtcagtcacttggtatcgcatttatttatttgcccattttggttcccaaaggaaatctgaaatagagtactatgctatgttggctaaaactggtgtccatcactacagtggcaataatattgaactgggcacagcatgcggt

SEQ ID NO: 151288 - DNA, 587 bp, Homo sapiens
gttccccggccatcttagcggatgctgttgggttgggggcccgtccccgctccctaaggcagggaagatgggtggcccgcaaaagaagacgaaaaaagtcgctggaagccgatcaacctcctagggctcccaactccgtttatgaaaaagtgggaaagtacgcccctggggtacaagccagactctgaagatgatcagacaaaggcaaagcgaaaattggtcattcctcgctaacaactgcccaagctttgaggaactctgaaaatagagtactatgctatgttggctaaaacttggtgtccatcactacagtggcaataatattgaactgggcacagccatgcgggaaaatacttacagagtgttgcacactgggctattcattgatccagggtgacttctggacattcattaggaagcatgccagaacgagactggtgaaaaggtaaaccttttcvacctacaaaatgttcagcctgcaaagccttaaaccctgcaaaattttcctttaataaaaattgcgtgtgtttaaaccagcaaagaagaataagaagatttggcccccagtagggggtttataaagcgag

SEQ ID NO: 151289 - DNA, 534 bp, Homo sapiens; identical to SEQ ID NO: 144862

SEQ ID NO: 151290 - DNA, 763 bp, Homo sapiens
ggcttctggacttaggaggtccgggcagctggtccatggttgttcaggtagtgccgcagggctgtgggataatccgttatgacgccagtggctcccacgctgaaggctgcttcaaaatccgactcttctggtccccacagactcagagagaacccaccatggtgcttgtctcctgccgacaagaccaacgtcaaggccgcctggggtaaggtcggcgcgcacgctggcgagtatggtgcggaggccctgggagaggatgttcctgtccttccccaccaccaagacctacttcccgcacttcgacctgagccacggtttctgcccaggtttaaggggccacgggcaaggaaggtggccgacgcgcttgaccaacgccgtggcgcaacgtgggacggacattgcccaacgcgctgtccggccctgaagcgaccctgcacgcgcacaaagcttcggggtggacccggttcaactttcaagctcctaaagccacttgccttgcttgggtgaaccttgggccgcccacctccccggccgagtttcaccccttggcggttgcaaggcttccctggggacaaatttcctggggtttttgttgaagcaaccttgttgaactttcaaataacctttaaaggttggaagcttggttggccattgtttttttgccccttgggcctccccaccgccccttcctcccctctttgcacccgtacccccgtggtcgttgaataaagtctgagtgggcggcaaaaaaaaaaaaaaaaaa

SEQ ID NO: 151291 - DNA, 330 bp, Homo sapiens
aaataattaagggagccctatacccggaaggaaacacatcaaaatataaaacccactggtagagcaaatacacaaataaaaaagagaaagaatttatatgtcaccactaccgaaaaaccaccaaccacaatgaaaaacaacatgagagaaagaaaggaagaaatgctatacaaaaaccagaaatcaattactaaaatgacaggaataagccctgtcatatcaataataatcctgaatacaaatgaattaaacttatcacttaaaagatacagaggggctgaaagaatttttttaaatgatccaaccacatgctgcctacaagaaattcat

SEQ ID NO: 151292 - DNA, 379 bp, Homo sapiens; identical to SEQ ID NO: 145102

SEQ ID NO: 151293 - DNA, 724 bp, Homo sapiens
ggcacgagcgcgggtctgtctcttgcttcaacagtggttggacggatcatatccggggacatctgttccagcctccgaccgccctccgatttcctctccgcttgcaacctccgggaccatcttctcggccatctcctgcttctgggacctgccagcaccagtttttgtggttagctccttcttgccaaccaaccatgagctcccagattcgtcagaattattccaccgacgtggaggcagccgtcaacagcctggtcaatttgtacctgcaggcctcctacacctacctctctctgggcttctatttcgaccgcgatgatgtggctctggaaggcgtgagccacttcttccgcgaactggccgaggaagaagcgcgagggatacgagcgtcttcttgagaatgcaaacccagcgtggcggccgcgctctcttccaggacatcaagaagccagctgaagatgagtggggtaaaaccccagacgccatgaaagctgccatggccctggagaaaaagctgaaccaggcccttttggatcttcatgccctgggttctgcccgcacggacccccatctctgtgacttcctggagactcacttcctagatgaggaagtgaagcttatcaagaagatgggtgaccacctgaccaacctccacaggctgggtggcccggaggctgggctgggcgagtatctcttcgaaaggctcactctcaagcacgactaa

SEQ ID NO: 151294 - DNA, 264 bp, Homo sapiens
catcatatatcgcctgagagcacaacaaggggacaatgatcgggatataaactcaggcattcaagcagggagtggcaaccccctttgggtcccctcccatcgtatgggagctctgttttcactctattaaatcttgcaactgcacgctcttctggtctgtgtttgttacggcttgagctgagcttttgctcactgtccaccaccgctgtttgccgctgttacagacctgccattgactcccacccgggtccaccactgctgttt

SEQ ID NO: 151295 - DNA, 1232 bp, Homo sapiens
gaatctctcttcctgacctgaatattaactccatgttggagcaaaggagggagccctggtctggtgagagtgaagtgaaaatagcaaaaaattcagatgggagggagtgcatcaaaggtgtgaacacagaaatgtcttccagtgtcaaaacccccatttttaataggaatgattttgatgattcttcatttctcccacaagaacagaaagtacaccttagagaaaaaccttatgaatgtaatgagcatagcaaagtctttagagtatcttccagccttactaaacatcaagtaatccatactgtagagaaaccttacaaatgtaattcatgcggcaaggtctttagtcgcaattcacaccttgcagaacattgtagaattcatactggagagaaaccttacaaatgtaatgtctgtggcaaggtttttagttacaattcaaactttgcacgacatcaaagaattcataccagagagaagccgtatgaatgtaatgaatgtggtaaagtcttcagtaataattcttaccttgcacgacatcaaagaattcatgctgaagagaaaccttacaaatgtaatgaatgtggtaaaggcttcagtcataagtcatctctagcaaatcattggagaatttatactggagagaagccttacaaatgtgatgaatgtggcaaggccttctataggattgcgctccttgtacgacatcagaaaattcatactggagagaaaccttacaaatgtaatgaatgtggaaaggtctttattcaaaattcgcacctagcacaacattggagaattcatacaggagagaaaccttacaaatgtaatgaatgtggaaaagtatttaatcaactttcaaatcttgcacgacatcgaagaattcatactggagagaagccttacaaatgtaatgaatgtggtaaagcatttagtgagtattcaggcctttcagcccatcttgtaatccacactggagagaagccttacaaatgtagtgaatgtggcaaggcattcagacacaagttatcactaaccaatcatcagagaatccatactggagaaagaccttacaaatgtaatgaatgtggcaaggtcttcaatcgaattgcacaccttgcacgacatcggaaaattcatactggagagaaaccttacaaatgtaatgagtgtggcaaggcctttagtcgcatttcatacctagcacaacattggacaattcatatgggatag

SEQ ID NO: 151296 - DNA, 496 bp, Homo sapiens
aaggtcacgccgcggcgcgattgacttctaaagagtcatgctgggatgaaaaagcccaaaagagaaagaagaggaaagcctacgagtcagggatggctcttcctcagggacacttaacattcagggacgtggccatagaattctctcaggcggagtggaaatgcctggaccctgcacagagggctttatacaaggatgtgatgttggagaactacaggaacctggtctccctgggaatctctcttcctgacctgaatattaactccatgttggagcaaaggagggagccctggtctggtgagagtgaagtgaaaatagcaaaaaattcagatgggagggagtgcatcaaaggtgtgaacacagggagcagctatgcattgggaagcaatgcagaagacaaaccaattaaaaaacaacttggagtatcctttcacttacatctgtctgaactggagctatttccagatgaccgggtaataaatggatgtaatcaaaa

SEQ ID NO: 151297 - DNA, 1624 bp, Homo sapiens
gccgactgaggcacgagcgggtgacgctgggcctgcagcgcggagcagaaagcagaacccgcagagtcctccctgctgctgtgtggacgacacgtgggcacaggcagaagtgggccctgtgaccagctgcactggtttcgtggaaggaagctccaggactggcgggatgggctcagcctgtatcaaagtcaccaaatactttctcttcctcttcaacttgatcttctttatcctgggcgcagtgatcctgggcttcggggtgtggatcctggccgacaagagcagtttcatctctgtcctgcaaacctcctccagctcgcttaggatgggggcctatgtcttcatcggcgtgggggcagtcactatgctcatgggcttcctgggctgcatcggcgccgtcaacgaggtccgctgcctgctggggctgtactttgctttcctgctcctgatcctcattgcccaggtgacggccggggccctcttctacttcaacatgggcaagctgaagcaggagatgggtggcatcgtgactgagctcattcgagactacaacagcagtcgcgaggacagcctgcaggatgcctgggactacgtgcaggctcaggtgaagtgctgcggctgggtcagcttctacaactggacagacaacgctgagctcatgaatcgccctgaggtcacctacccctgttcctgcgaagtcaagggggaagaggacaacagcctttctgtgaggaagggcttctgcgaggcccccggcaacaggacccagagtggcaaccaccctgaggactggcctgtgtaccaggagggctgcatggagaaggtgcaggcgtggctgcaggagaacctgggcatcatcctcggcgtgggcgtgggtgtggccatggtcgagctcctggggatggtcctgtccatctgcttgtgccggcacgtgcattccgaagactacagcaaggtccccaagtactgaggcagctgctatccccatctccctgcctggcccccaacctcagggctcccaggggtctccctggctccctcctccaggcctgcctcccacttcactgcgaagaccctcttgcccaccctgactgaaagtagggggctttctggggcctagcgatctctcctggcctatccgctgccagccttgagccctggctgttctgtggttcctctgctcaccgcccatcagggttctcttagcaactcagagaaaaatgctccccacagcgtccctggcgcaggtgggctggacttctacctgccctcaagggtgtgtatattgtataggggcaactgtatgaaaaattggggaggagggggccgggcgcggtggctcacgcctgtaatcccagcactttgggaggccgaggcgggtggatcacgaggtcaggagatcgagaccatcctggctaacatggtgaaaccccgtctctactaaaaatacaaaaaaaatttagccgggcgcggtggcgggcacctgtagtcccagctacttgggaggctgaggcaggagaatggtgtgaacccgggagcggaggttgcagtgagctgagatcgtgctactgcactccagcctgggggacagaaagagactccgtctcaaaaaaaaaaaaaaaaa

SEQ ID NO: 151298 - DNA, 2773 bp, Homo sapiens
ccacctctctctgcctttttgtaccccgctttttttctgcgttctgctcggtttttgtagccgtctgtttttgcaccccatttcgttttgtttctagacggtttggcggggggtgaagctgcattcataccccttcctcttgttattctcccctgctctgacagcaccccttttcatcgcagttggggggcctaggatcggtgcatcttccgccgcgctgccagcaccccgcagcgcgtggtcgtgcaccccggaatctgcagcagctgcatatctgaggggggtctcctttgcccgcgccgccttcgctccccgtgcttttgggtgtgtggagggcttcagtgcgcggcgcccccgcttctccgcaaccccccgccccgcgcccggactcgccccgcgccaccaagatggtcatccagaaagagaagaagagctgcgggcaggtggttgaggagtggaaggagttcgtgtggaacccgaggacgcaccagtttatgggccgcaccgggaccagctgggcctttatcctcctcttctacctcgttttttatgggttccccaccgccatgttcaccctcaccatgtgggtgatgctgcagactgtctccgaccatacccccaagtaccaggaccgactggccacaccgggcttgatgattcgccccaagactgagaaccttgatgtcattgtcaatgtcagtgacactgaaagctgggaccagcatgttcagaagctcaacaagttcttggagccttacaacgactctatgcaagcccaaaagaatgatgtctgccgccctgggcgctattacgaacagccagataatggagtcctcaactaccccaaactggcctgccaattcaaccggacccagctgggcaactgctccggcattggggactccacccactatggttacagcactgggcagccctgtgtcttcatcaagatgaaccgggtcatcaacttctatgcaggagcaaaccagagcatgaatgttacctgtgctgggaagcgagatgaagatgctgagaatctcggcaacttcgtcatgttccccgccaacggcaacatcgacctcatgtacttcccctactatggcaaaaagttccacgtgaactacacacagcccctggtggctgtgaagttcctgaatgtgacccccaacgtggaggtgaatgtagaatgtcgcatcaacgccgccaacatcgccacagacgatgagcgagacaagttcgccggccgcgtggccttcaaactccgcatcaacaaaacctgaggccccttcctcccaccccatctctctcctgtggatgctcctggaatgtccctgaccctgcctgatccctccctcacccaccccaaaggtatttttgataacagagctatgacttgtctgagcctcacatccttttccttgacttctcaacccagcctgaagtccattgcggttccgtcactcgcctttcccaccaacttctcccaacctcagatcagtcagacagggagctgggctaagatggccacagaggagttaggagcctttctagttctggtttagctgtgagagctatccactctcctgcctgcatatcccctgagagttatcggaagtgcccactgacccacccacccacctacaccccccgccacacacacacacaaacgtgcacacgcagtctcatttgacccctttgcttccagagatgaatgtggcactccctccttccattcctaagctctagccaccgtcccttgatctctcatactttctccctgtctacacagtcgccatcttggtgactttgaatttatctggctcctgggcaggtcttctcctcctctccatccctattccctcctctgaaatgcacccctttgtaattgaggacaaggtggttctgtggccttttccctctttgctggcacgttctgcttctcaccctctggtgactctgtgagctgggaaatgcgggactggaagtgaggcctgtgttgacccttcctgaaaatcctctagcagcccccgacttcagcagtttctttctttgtttttttgagatggagtttcgctcttgttgcccaggctggagtgcaatggtgcaatctcagctcactgcaacttccgcatcccaggttcaagcgattctcccgcctcaggttcccgagtagctgggactacaggcatgtgccaccatgcccggctaatttctttctttctttttttttttttttttgcattttttagtagagatgggggtttctccttgttggtcaggctggtctcgaactcccgacctcaggtgatccacctgcctcggcctcccaaagtgttgggattacaggcgtgagccaccgcgcctggccttcagtttcttcctaggccgttctgtcacccaaatagctgctacccagaggggcggggttgacctaggctgaatatccactttgtttttatggatggctcccttcccccattcgccttcccagaatatccttcaagttccacttcccagggagctctgggggaggggcggccattctggctccgtccccagtggccaccttggaaacatcggctggctttgggactattccacctccttcccctgagcccagatctgcccccaccatcctttctctggcttcttttagcaagttatcaactaatcactaactccttccttttcctctgcatgccagcctgaaaattccaaatctagcctctgaatgtcttggctccatctcttcagacccctttgcctttaaaaa

SEQ ID NO: 151299 - DNA, 3592 bp, Homo sapiens
ggcggggggcgcacagagccagaggggcttgcgagcggcggctgagggaccgcggggagggggcgccgagcggctccagcgcagagactctcactgcacgccggaggccccttcctcgctccgcccgcgcgaccgcgcgccccagtcccgccccgccccgctaaccgccccagacacagcgctcgccgagggtcgcttggaccctgatcttacccgtgggcaccctgcgctctgcctgccgcgaagaccggctccccgacccgcagaagtcaggagagagggtgaagcggagcagcccgaggcggggcagcctcccggagcagcgccgcgcagagcccgggacaatggggccgcggcggctgctgctggtggccgcctgcttcagtctgtgcggcccgctgttgtctgcccgcacccgggcccgcaggccagaatcaaaagcaacaaatgccaccttagatccccggtcatttcttctcaggaaccccaatgataaatatgaaccattttgggaggatgaggagaaaaatgaaagtgggttaactgaatacagattagtctccatcaataaaagcagtcctcttcaaaaacaacttcctgcattcatctcagaagatgcctccggatatttgaccagctcctggctgacactctttgtcccatctgtgtacaccggagtgtttgtagtcagcctcccactaaacatcatggccatcgttgtgttcatcctgaaaatgaaggtcaagaagccggcggtggtgtacatgctgcacctggccacggcagatgtgctgtttgtgtctgtgctcccctttaagatcagctattacttttccggcagtgattggcagtttgggtctgaattgtgtcgcttcgtcactgcagcattttactgtaacatgtacgcctctatcttgctcatgacagtcataagcattgaccggtttctggctgtggtgtatcccatgcagtccctctcctggcgtactctgggaagggcttccttcacttgtctggccatctgggctttggccatcgcaggggtagtgcctctcgtcctcaaggagcaaaccatccaggtgcccgggctcaacatcactacctgtcatgatgtgctcaatgaaaccctgctcgaaggctactatgcctactacttctcagccttctctgctgtcttcttttttgtgccgctgatcatttccacggtctgttatgtgtctatcattcgatgtcttagctcttccgcagttgccaaccgcagcaagaagtcccgggctttgttcctgtcagctgctgttttctgcatcttcatcatttgcttcggacccacaaacgtcctcctgattgcgcattactcattcctttctcacacttccaccacagaggctgcctactttgcctacctcctctgtgtctgtgtcagcagcataagctcgtgcatcgaccccctaatttactattacgcttcctctgagtgccagaggtacgtctacagtatcttatgctgcaaagaaagttccgatcccagcagttataacagcagtgggcagttgatggcaagtaaaatggatacctgctctagtaacctgaataacagcatatacaaaaagctgttaacttaggaaaagggactgctgggaggttaaaaagaaaagtttataaaagtgaataacctgaggattctattagtccccacccaaactttattgattcacctcctaaaacaacagatgtacgacttgcatacctgctttttatgggagctgtcaagcatgtatttttgtcaattaccagaaagataacaggacgagatgacggtgttattccaagggaatattgccaatgctacagtaataaatgaatgtcacttctggatatagctaggtgacatatacatacttacatgtgtgtatatgtagatgtatgcacacacatatattatttgcagtgcagtatagaataggcactttaaaacactctttccccgcaccccagcaattatgaaaataatctctgattccctgatttaatatgcaaagtctaggttggtagagtttagccctgaacatttcatggtgttcatcaacagtgagagactccatagtttgggcttgtaccacttttgcaaataagtgtattttgaaattgtttgacggcaaggtttaagttattaagaggtaagacttagtactatctgtgcgtagaagttctagtgttttcaattttaaacatatccaagtttgaattcctaaaattatggaaacagatgaaaagcctctgttttgatatgggtagtattttttacattttacacactgtacacataagccaaaactgagcataagtcctctagtgaatgtaggctggctttcagagtaggctattcctgagagctgcatgtgtccgcccccgatggaggactccaggcagcagacacatgccagggccatgtcagacacagattggccagaaaccttcctgctgagcctcacagcagtgagactggggccactacatttgctccatcctcctgggattggctgtgaactgatcatgtttatgagaaactggcaaagcagaatgtgatatcctaggaggtaatgaccatgaaagacttctctacccatcttaaaaacaacgaaagaaggcatggacttctggatgcccatccactgggtgtaaacacatctagtagttgttctgaaatgtcagttctgatatggaagcacccattatgcgctgtggccactccaataggtgctgagtgtacagagtggaataagacagagacctgccctcaagagcaaagtagatcatgcatagagtgtgatgtatgtgtaataaatatgtttcacacaaacaaggcctgtcagctaaagaagtttgaacatttgggttactatttcttgtggttataacttaatgaaaacaatgcagtacaggacatatattttttaaaataagtctgatttaattgggcactatttatttacaaatgttttgctcaatagattgctcaaatcaggttttcttttaagaatcaatcatgtcagtctgcttagaaataacagaagaaaatagaattgacattgaaatctaggaaaattattctataatttccatttacttaagacttaatgagactttaaaagcattttttaacctcctaagtatcaagtatagaaaatcttcatggaattcacaaagtaatttggaaattaggttgaaacatatctcttatcttacgaaaaaatggtagcattttaaacaaaatagaaagttgcaaggcaaatgtttatttaaaagagcaggccaggcgcggtggctcacgcctgtaatcccagcactttgggaggctgaggcgggtggatcacgaggtcaggagatcgagaccatcctggctaacacggtgaaacccgtctctactaaaaatgcaaaaaaaattagccgggcgtggtggcaggcacctgtagtcccagctactcgggaggctgaggcaggagactggcgtgaacccaggaggcggaccttgtagtgagccgagatcgcgccactgtgctccagcctgggcaacagagcaagactccatctc

SEQ ID NO: 151300 - DNA, 7884 bp, Homo sapiens
ggcttttcttccccttctgattttcccctccccccttttctccctttccgggtttggttccccccttttcttcccctctcccccctccttcccaagcccctttcccctcccccgtcccagtcccccctgcttcccagccctcggccccggggaagccccggccgagaaaagcccgcccccagaagcgcgccgccgccggccgtcggggccgagccgcagccgagcggccgtgggcccgggcggcgggcggagacgtgggcgccctccccgccaaggcccgtgcgagaggttagacttgtttcttatatgtgatgccattccagcactggactcatggaggctgagcatttattcaggagtccatagaggccactgtattctattgaagaacatgtctaacagtaacactactcaagagaccctggaaataatgaaagaatcagaaaaaaaaactggtggaagaatctgtaaacaaaaacaagtttatatctaagactccaagtaaggaagaaattgagaaagaatgtgaagataccagtttgcgtcaggagacacagaggcggacatctaaccatggtcatgccaggaaaagagccaagtctaattccaagctaaagttggtgcgtagcctggcagtgtgtgaggagtcctccaccccatttgctgatgggccattagaaacccaggatataattcaattgcacatcagttgcccttctgacaaggaggaagaaaagtccacaaaagatgtctctgaaaaggaagacaaggacaaaaacaaagaaaagatcccaaggaagatgctgtccagagactccagccaggaatatacggactccactggaatagacctacatgaatttcttgtaaatacactgaaaaagaacccaagggacagaatgatgctgctaaaattagaacaggagattctggaatttattaatgacaacaataatcagttcaagaagttccctcagatgacctcatatcaccggatgctattacaccgggtagctgcctattttgggatggaccacaatgttgatcaaactgggaaagctgtcatcatcaacaaaactagtaacacaagaatccctgaacagaggttctcagaacatataaaggatgagaagaatacagaatttcaacagaggttcattctcaagagagatgatgccagtatggaccgagatgataaccagactggccagaacggatatctaaatgacatcagactctccaaagaagccttttcttctagctctcacaagagaaggcagatttttagggggaaccgtgaaggactgagccgcacctcaagcagccgccagagcagcacagacagcgaactcaaatccctggagccacgcccttggagcagcacagactctgatggctctgtccggagcatgcgaccccctgtcaccaaagctagcagcttcagtggaatctctatccttacccgaggtgacagcatcggcagcagtaaaggcggcagtgcgggaaggatctccaggccaggtatggcactaggtgccccagaagtgtgcaaccaggtcacctcatcccagtctgtccgggggcttctcccttgtactgcccagcagcaacagcagcagcagcagcagcaacttcctgctctcccacccacgcctcagcaacagccacccttgaataatcacatgatctcacaggcagatgacctcagcaacccctttggacaaatgagccttagtcgccaaggttctactgaagcagctgacccatctgcagctctattccagaccccacttatctcccagcaccctcagcagactagcttcatcatggcttccacgggtcagcccctccccacttccaactattccacctctagccatgcaccacctactcagcaagttctgccaccccaggggtacatgcagccccctcaacagatccaggtttcttactatccccctggacaatatcctaactccaaccagcaatatcgacctctctctcacccggtggcctatagcccccaacgtggtcagcagctgcctcagccatcccagcagcctggtttacagcccatgatgcctaaccagcagcaggcggcttaccaaggcatgattggggtccagcagccacagaaccagggcctgctcagcagccagaggagcagcatggggggccagatgcaaggcctggtggttcagtacactccactgccttcttaccaagttccagtgggtagtgactcgcaaaatgtggtccagccgcctttccagcaacccatgctggtccctgtgagccagtctgtgcaaggaggcctcccagcagcgggggtaccagtgtactatagcatgatcccacctgctcagcagaacggtacgagcccttctgtagggtttctgcaaccccctggctctgagcagtaccagatgcctcagtctccctctccctgcagtccaccacagatgccacagcagtactcaggagtgtcaccttctggaccaggtgtagtggtcatgcagctgaatgtccctaatggaccccagccccctcagaacccatccatggtccagtggagtcattgtaaatactacagcatggaccagcgggggcagaagcctggagacctgtacagtcctgacagcagcccccaggccaacacacaaatgagcagcagccctgtcacatctcctacccagtctccagcaccctctcctgtcaccagcctcagcagtgtctgcacaggactcagtcccctgcctgtcctcacacagttcccccggcctgggggtccagcacagggtgatgggcgctactcccttttgggccagccattacagtacaatctgtccatctgccctcccttgctccatggccagtcaacttacacggtgcaccagggacagagtggactgaagcatggaaaccggggcaagagacaagcactcaaatctgcctccactgacctggggacagcagatgttgtcctggggcgggtgctggaggtgacagatctccctgagggcatcacccgtactgaggcggacaaactcttcacgcagctcgccatgtctggcgccaagatccagtggctcaaggatgctcaggggctgcctggagggggtgggggggacaacagtgggactgctgagaatggccgccactcggacctcgctgccttgtacaccattgtggctgtgttccccagccccctggctgcccaaaatgcctcccttcgtctcaacaactccgtgagtcgcttcaaacttcgaatggccaaaaagaactatgacctgaggatcctggagcgagccagctcccaataaatggaggaggggaaagggactgtcacagaagaagcaagggcagggtggagggggttgaaggatcctgacagaccatggacagaggcaggaagtaaggaaactgatgttaaactggaacctaagacagtgatgaagatggaaacacagatacctacactggcattggactccttcttgctcccctgccatgggtcctctctttttccctggttgaccccccttgcatcactcttcttcccatcctcttctttttttttttttttttttttttgagacggagtttcgctcttgtcaccccagctggagtgcagtagcacgatcttggctaactgcaacctccagctcctgggttcaggtgattctcctgcctcagcctcccaagtagctggcactacagacacgcgccaccatgcccggctaattttctgtattttttagtagagacggggtttcaacatgttggccagggtggtcttgaactcctgaccttaggtgatctgcccgcctcggcctcccagagtgctgggattataggtgtgagccactgcgcctggccaccactgcattcttatgctgagaaatgggaaggagctaagtgtggataaaggctgaggggcttctgatgtcgtctgaaaaagtaatctgaaactacagaccaggggccgactacaaaggcactgtgcaagctggaagcctgtcacttccctgtgtttgtctatgcccctcccattcccactgtttctctatcctgggctgctgcctcctccactcccaggcttggaggagacactgggttgggggagggggagaaacagttaccacagaagaggaggggagcccgggtggcaggggctgcagggagaggcacagaggagtgccaaggcgcaggtggctcctgggtagaggtggtcactctcgcccactcccccagtaccaggaacccttcccagtcctccctgctttccctcctgggagtcctggctctctctcacctccccgtgttcagtcctacggccacaactgccccactcgggtggaagtcagcacagagaccagtctcctgggagaggggagaaggtgaattcaagatgatgtctttctagtgagggaaccagagtgaaccccttgtcctcctaacttcaaagccacttactcccaaggagaagatgggaagagagggaagggatacccgggtatcactggagcctgaacagggagtgataccaaaatatttaaccacagaactgatgccaatagctgtgctggagattaaccatttaggtgctggatcaagaggaagtctgaggggttctgggggcggcagggagtgcccaggtggtactagaagcatcagcttttaccagtcagtacagaaaaattaatatttgagtagccagtgcagccataccagtacaaactggccacctctgggaggcagaaggcaaggtgctggggaaggcgtggtggccacaggtgtcctggtgggtgtggcatgggggatccaggggcacagggctctaccttgaggtcgatgctccaggccagtgcatggctctccccatcccacaggcagagctgccggtcgtggccgcaggtgaggaagcggttctgggaggggtgtgtgcagagcccccagagctcatcagtgtggccctgcagcacagcatgactgtcactcctgcccctctctcacacccctttgtcccttcctcccctgagcccttaacccccaacctggattacaggggagaagccctgggccaggtctcccctcagcaatgcattcttcgtggttcccaccagcagctcagagccaagcccttcagcaatggctcgcacggccccgaagtgctcgggaatctgcagagtggtagcagaatgtcaagagcccactgactattgctcttctccctcactcccttgaccccagcccagccctcacctcagcctcctggagggccaccaacccgggcccccactgtaccagccggcggtcccgcccgccaccactcagcactgtcccgtccctccggagacacaaggcgaagatagaaccttcatgagcgtgagcctgggccacaatcccataggtctctgttggcaaagccccaggtagatcatgttttgggggtgcaggggagtgagaaacagggccagcttggctgtcgcaatacagtaagaactcccagccattgcatgcactgactactatgtctcatcctcatactgccaacacatctgttattctccccattttacaaacaggacaactgagactcacagaaatgaggtaacttcctaaaggcaaggcaactaatagcaaaactggaatctgaacctgagatctggcaaacacaaagctccagccgtttctcctttgctgtgctgcccacacgcttctagactagcccccaagagaactatcaactctcaaggtaaaaaggtgggaaacctggctgggcgccgtggctcacgcctgtaatcccagcactttgggaggccaaggcgggcggatcacctgaggtcaggaattcgagaccagcctggccaacatggcaaaaccccatctctactaaaaatacaaaaattagctgggcgtggtggcgtgtgcctgtacttccagctacttgggagactgaggaaggaggatcacttgaacctgggaggcagaggttgcagtgaaccaagatcgcgccactgcaatccagcctgggcaacagagtaagacctcatctcaaaaaaaaaaaaaaaaaagatgggaatgggaaaccctctcctctgttcccacagaacctctggagtactacacttcccagatgcccctcccagccacatacctttggcgccacccctgcctggggtcttggaatctgaagggctccgcccccaggtgagaatgttcccctctgagtctccagtgagaatgtctccatccggaaggaacacaaagcaagggataaacttgggtttcttgtatttctagtgggaggggagagcagacagtagaggtcaaagggaagggcaaagattaaaagtcgcagggcaggccaggtgcagtggctcatgcctgtaatcccagcactttgggaggccaaggcgggcgggtcacctgaggccaggagtttgtgaccagcctggccaatatggtgaaatcccgcactgcactccagcctgggtgatagagcaaggcactgtctcaaaaacaaaaaaaacaaaaaaaaaacgggcatgatggccaacatgatgaaaccgtatctctattaaaaatacaaaaatcagccggcgcgcatctgtaatcccagctactccgggaggctgaggcaggagaattgctcgaacccaggaggcagacgttgcagtgagccgagatcttgccattgcactctggcctgggtgacaagagcaagactccgtctcaaaagaaaaaaaaaaaaaggtcacaggggcaggtgggggttagggaacctcagggtccatagtactcagcccagtgcttcctcttccactctgccctccccatcaccttccacttatccatgcctcaccccaaagacaccctgtttccgggtaagggtcccattcccaggaacccctactccaccactccaattccagaagtggacgtgagatttcccactggtgacgatgcagctgctgtcacgagggttgaagccaacggccaggactgagtcatttgtactctgaagggaagacactagattcagccaccccaagccctgggtaccttcattctacttgactctcctcaatttgcatcatgacagctggctggcagaggtccagaaaccccaggacaacccttctttcaaaaccctggtcccctaagagcactatttcctgtcaatcataattaatcaccctaatacctaacacattatgcctcatgaggtcagaacccatgtcacaaatgaagaaactaagggtcagagaagctaggagatttgccccatgtgacccagccaaaaaggaaggaaatgtatgggtgagtctggagctccctgcactccaccactcccacccccaacctcagagcccctccaagccacatggactcctcaccttgatctcagccagcttcattccccggctgcagtcccacaccgacagcatgtgctcattggaatcatccaccacacaaagaaaggcaccctgatcctgaagaagggtgacacataggaggtgcagagtgaaccctggaggtccaggggttcatggtcattaggttaagaggtaccatcacagatggagagggcagaaaaagttgacacacatggccctttctcaagagaaccagctgggtggggttcaggaaggccagaacttccaaggcttcctggtgacatgcaagagtggggttcctaggcaagaatgggggtctagaggcttcagggccagctcaccgcagctgaaaaggccagggccccaacaccccgctcgaaggcccccagtccaatctcctgcagtttcaacagcgtctctgagtcccagatgtgaaccacaaggctgcaagggctggtggaggaagagtcacaagtgtgaa

SEQ ID NO: 151301 - DNA, 551 bp, Homo sapiens
atgcccacactagcctctccaggggctctgcccttggcatccccgtcccccacctgggctctggcagagaagtcaggcgggaagaagccggctgagtgcccgccactcctctgtggtcgtgtgcgcgcgggcgcgcacacacacacgcacgcatgcaccttccctaagcaggaagctgctctttgccaagatcgaatggaattcagatttccagagggtgtccttggcctccagctctacggctgcatgatgaagaaaggtcctagtgtgtgtgccgggggctgggagagaggggcctccagctctgctcacatctatctgggccccaagaaaaacccacaactggctgtgctctccccagccacacccagccttggtcacattccttcccttcctgagcccacactgggtggccccggcaaaccagcttccacacctccctccccaccggcagggagacctagcccaagcccccatggggcagccagcaagtacaaatgaggggctgcaccccaggcccaaagagccagaaagcacggagggctcgtgcc

SEQ ID NO: 151302 - DNA, 375 bp, Homo sapiens
ggcacgaggacacacccttgttcattctccttgagaagcagctattatcaacagaacattgacagaacctgtgtttggggaaaggactgatggctttgagtctaggttggaaagcacacaggaaccactgtggtctcctcttgcaggctctgcgaagcagtggtcttctcttgtttccctgtggccagtgtccctggagaggagctggaagctttttggaccctgagataaaggctttcctggaggagaacactgaagtcaccagcagtggtagcctcacccctgaaatccagttgcggcttttgacccccagatgcaaattctggtgggagagagctgacctgtggccccacagtgatccttactgggcaatct

SEQ ID NO: 151303 - DNA, 374 bp, Homo sapiens
caacagcccatcttcccgttacctgagaccgccgttcagtcgccaatatgcatctctctgtccgcggggaggaactgcacaccttcgaggtgaccggccacgaaacggtcgcccagatcaaggctcatctaacctcactggagggcattgccccgaaagatcaagtcgagctcctggcagacgcgcccctgaaggacgaggccactctgcgccaaagcggagcggaggccatgactaccctggaagtagcaagccgcatgcttggacggaaagcccatggttccctggcccgagctggaaaagttagaggtcatactcctaaggaggccaaccaggactggaagaagagcatgacaggtcgtgctaagcggtgc

SEQ ID NO: 151304 - DNA, 801 bp, Homo sapiens; identical to SEQ ID NO: 145221

SEQ ID NO: 151305 - DNA, 1388 bp, Homo sapiens
acaaccatcatgactttgcatctatttgaaacttcttcttatgctctatatatgcattatttggaaggctcccatacgaggaaaaagatgatcaggattacccccaaatacccacttctagtgtatcttaccccagtttatagtgggttgttgtggtaggggtatagaatgcagatggtgtagaatgcggtgttggctggattctcccagatgaggtcactgttctagctctcaggaagagaaagcaaaactaaggttatggggaagactgggacccttacccgtcccatttagatgtcattgaacttcatctgaaacctttttcttttcttttctcttttttttgagacaaaacaaaacaacagattgtattggaaagtctcaggtcaaactgagtgaaactaggctgacgttggtttgtgcaagctttgcattgactacaagtgacccagtggctgacctcacaacgtggtatccactcagccgcttcaattacctgttgctttgagatgtcatggcaatgccctttctttggtgtcatgtttctattcagagcgtaaattgtacattttatcactgctagactctggttataaaatctcgtggaatgccatcatgatacactcttgttgggaaaccttctcatagtgcaggtgttcacagggacatcagtttggagatctgaggtggtgcatggccaaaccatctcatttcccagagcagcagacagcagtagcttctcatccctcctcaggtgctcagagaagaggagtcgtgtatcggtgattgcaacatgctgtcatgtcgagtgcacttctagttccattccattttatagagttggttttttaggcttcggttttctcgttttgaagaacttctttaattctcgtaattcctggggctgcaaactctgatcgactcctggggtcaatttatagctcagtggagacagaatgtaaccattttgataaagacagattctcttgcagaactcaaaggtgctaaacataattccaaaatatggaactatcttcagtaaattggctgtcaatccattccagagccccaggaccccctgggccttcactatctgccggaagcagtccactgctcctgagaaatggacatctactcctccactgtgtgggaggtaggggctctgagcctgacaggaaacagaagctgggatgaggcgattgaaacattaggaaataaatgtcctagtggaaggagccagggtctcaagtctacattctggatgctgggttcctggccaagatgatggcaaagaatggctgctgtggggttgatcatgcagaacatactggaaccatcgtacagggggctcctccatgctttttctactatttaccaacaggaagggt

SEQ ID NO: 151306 - DNA, 1059 bp, Homo sapiens
atggagccttccaatatctgcaagttaggcttgctaatcaggcccaaagctgatgattgtagagttgtcttggcaaaacaggaaattacaaggttactggaaacattgcagaaacagcagcagcagtttacagaagttgcagatcacattcagttggatgccagcatccctgtcacttttacaaagactgatgaagtatttctggaagcccagattcagaatatgacaacctcacctatgtttatggagaaggtttcactggagccatctattatgtacaatgtaacagaattaaattcagtcagccaagctggagaatgtgtgtctacgtttgggtcaagagcatatttgcaaccaatggatacacgccagtacttatactgcctaaagccaaagaatgaatttgcagaaaaagcaggcatcattaagggagtaacagtaattggaaaattggatatagtatggaaaacaaatctaggtgaaaggggaaggttacagaccagccaacttcaaagaatggctccaggttatggagatgttaggttgtctttggaggcaataccagataccgtaaaccttgaagaaccttttcatattacctgtaaaataacaaactgcaggtacaagatactaaatattttaggctttgcaggccgtaaggtttctgtcacaaatactgaactctgcatcgtacttcaagagcagccagtagcaaaaaagtacagtggtgtcacaaaagaacagttgactcgggaagctgagcagaaatcacttaaccggaggcgagataatcgagttcacattggaccaaaaatggaaattcgggtcgttacgttaggattggatggtgctggaaaaactactatcttgtttaagttaaaacaggatgaattcatgcagcccattccaacaattgctgttgtgtttgttgtagatagcagtcatagagacagaattagtgaagcacacagcgaacttgcaaagttgttaacggaaaaagaactccgagatgctctgctcctgatttttgctaacaaacaggtctttgctgcaggttag

SEQ ID NO: 151307 - DNA, 1467 bp, Homo sapiens
cgtattgttacctaggggtggtttcttttcctgcagtcgcgatgtgtgattgcagatggaaaacaaagtattttatgcctacgtttctaagatagaagaaatggacttgttgaaaagaagccagtttgtaaaggacacagtaggagaatttaaggtaccaccaccagagagaggttgagagtgcgtttgacttttggttttgtcaaacgcgaggttttccgtttccttccggggcaagttgaacctgtccagcccccgtaggctgtgggtcaaaagtgccggtcaaaatggaagtgaatccccctaaacaggagcacctgctggcgctaaaaggtcctgtttccctctgatttggcaagagagacaatcttgcaataataaattaacattctagctctgaggagttcaactaagaaattttctcatcactaagagtaactggattactgcagaatgactacagaagtaatattacattatcgaccatgtgagagtgatcccacacaactgccaaaaattgcagaaaaagcaattcaagactttcctactcgtccgctatcaagatttataccttggtttccatatgatgggtccaagcttccactcagacctaaaagatcaccacctgtgatttctgaagaggcagctgaagatgtgaaacagtacttaaccattttcagaacatgatgctaagtcacacagttatggtttgcacagtagatctattggagtttcaacctagcttgaaaaagcagtatttaacctggtcacacacactgaaggaacagactaattctggaaatctggtgatgcggctgactaagcctactttattcaccaatatcccagtaacatgtgaagagaaagacttacctggagatctctttaaccagctgatgagagatgatccttcaaccgttaatggtgcagaagttttaatgttgggagaaatgctgactttaccacagaattttgggaatatatttttgggagagaccttttccagttatatcagcgttcataatgatagcaatcaagttgtaaaagacatattagtaaaagctgatcttcagacaagttctcagcgtttaaatctttcagcctccaatgctgcagtggctgaacttaaaccggattgttgtattgatgatgtcatacatcatgaagtcaaagaaattggaacacacatcttggtatgtgctgtgagttatacaactcaggctggagaaaaaatgtatttcagaaaattcttcaaatttcaggttctcaaaccattggatgtgaaaaccaaattttacaatgcagagagtgacctcagttctgtgactgatgaagtatttctggaagcccagattcagaatatgacaacctcacctatgtttatggagaaggtttcactggagccatctattatgtacaatgtaacagaattaaattcagtcagccaagctggagaatgtgtgtcta

SEQ ID NO: 151308 - DNA, 414 bp, Homo sapiens
cacacgcatggcagcctcttaggacctgtgagagcttcttgccactgcactctcccttgcagagtctccatgctgggggaggcttcggggcttgtacctgcaccttaaccagccgtcgtcacctgacaacacttgttccccttagaaaggacccagagggggccctggctgaaggagagatgggaaaccctctcagtccccacacccctgtggcttcatctggcatgaaacatactggggagaaaccctttgagtgccccagatgtggtaggcgacactttctgaaggagaacctcctgcagcatgacgcccggatttgcatgagccgctcggaacaagtcttcacgtgctctgcgtgccaggtgacattccgtctaaagaagaagctgcgggtgcacaggagtgctcacacag

SEQ ID NO: 151309 - DNA, 414 bp, Homo sapiens
  misc_feature (1)...(414): n = a,t,c or g
cccacgcgtccgtaagcgagcgagcgagcaagcgagcgcggggggaaaaaggcagagaatgtccgccatctaccctccgctcctgggcgcgctctcattcatagcagcctcttcatgaattacagctgagggggggcggaggaggggggggtaccacacancaccccagcaaacctccgggcccccaggcatggctagctcgcgtgccgtgcaggtgaagctggagctggggcaccgcgcccaggtgaggaaaaaacccaccgtggagggcttcacccacgactggatggtgttcgtacgcgggtcggagcacagtgacgtacagcattttgcggagaaatgctgtttcctgttgcatgaaagcggtactactctccttcgagtgtactcgcatccctcttacagggtgtaacg

SEQ ID NO: 151310 - DNA, 489 bp, Homo sapiens
tctttttaaactttttttatttaaataaggagaattctttcatatggaaagagctagtacaatcacatatttgaaaggagaaacaataggtactgaaccggagggaaagggcgagggtgagtgtgccagcaccggcctggtgaatccacgattcgatttcccatccaaggtaagtttcccaaaataccgtataaacaaaaggaaacaaaaacaaaacacaaccctctcaggaaccaaacaaaacccccaaatccttttttactacacaaggcatgaggtcaaaagcttgagtacagtgtcccctttagatcacgggagaaaggcgtccacacagagccttagcaggaatttccactctgaggcttcagaacatgctgaagatggggctctgagggtgccactaccatcctggaggccaccaagtggggtggaaacagtgaagagcaggtctcacatgcccgaagaccaccagccaactacacattggtg

SEQ ID NO: 151311 - DNA, 6396 bp, Homo sapiens
tttttttttttttttttatctttttaaacttttttttatttaaattaaggagaattctttcatatggataagagctagtacaatcacatatttgaaaggagaaacaataggtactgaaccggagggaaagggccgagggtgagtgtgccagcaccggccttggtgaatccacgattcgatttcccatccaagggtaagtttccccaaaataccggtataaacaagtctgcacattacacctctaggccatcgtctgcccctttcaaaatatctggtccttacatgggaaaggacaaagagggaaagggccaaaacataaacaaaagggaaacaaaaaacaaaaacacaaccctcttcagggaacccaaacaaaacccccaaattccttttttttaaactacacaagggcatggaggtcaaaagcttgagtaccagtgtccccctttagatcacggggagaaaggcgttccacacagagcctttagcaggaattttccactcttgaggcttcagaacatgctgaagatgggggctcctgagggtgccactaccatcctgggagggcacccagtggggtgggaacagtgaagagcaggttttcacatgcccgagagaccaccagccaactacacattggtggccctggtggagcatggctgggcgacagcgtccatccccaacactgagccacttcctgtcctggatgacttcctgcttaggtccgtcacatttcagaagagagctggctttctggaagcctacgtttcccattcatcacagaacacgacagagtgcacacatcctggtacccttggtcttcaaaggccatttccagcagaccctctaacccaggcttgttctgcaggaagtgaaaagggacaaatgaatatttgaggggcagcctgcagctacttggcacaggggaaccaaacggcaagggagaaggctccaccagagctgccatgctgccgtagcaggccagaccacagcatggctgtgcacctgtgtgtgctcagcttccagaagctgtcactgaccatcccgaaggcagatccagaagataggagggtgacagcacggctggagagcactgatgtcaacgtttaacaaggttccccagtgtccctagaagtggctggaaggaccacagctttggaactgaactgattttcttgaatgtgaaataaagtcatcttttgttttcccccttaaggaacctagagccagagtgtctatgaattccaagtttgaaaacaatatgaatgtttaaaaaaaaacaaaaaacgctgtggggagaagccaacagttaagaaaaccaaaccaaatgcagctggcattgaagtccccagtgggtagatgggcatctgagatgtatacccacactctggacttcatcccactctagtggatggtggacaataccgcaaggccactggtggctgagcaacgagccgcatccccagtgaccaaggcagagctgccagcgtcaggagggcaactttaacaggcaaaagtgagtgggttctgaccccccaatccctacctcagcagcaggaaagggaagtgctggtctccacctgttcccactaaggccccgtggtatcctggcagaagcctctgcatgtatctgcgctctgaggatgggggtttgaaaacaaaataagaccctacgtcctactaccttgagcttggctctaaaaccacgggaaaggaagagatatattgcaccttaaaacatctctgcactaagaactgcatttcattagaccaaggaggggttggggcgctgggaggcctgaggcctgccctcagccccccaagtctcatttaaaacctgcatctcagcgaagagactgcagctcaggtcacacagaggtggtgactgcaccgaacttcacatgcaatttcctggcctttcctgcacagaattaattcagacattatatataaatagagcagtgaaacatttacttctttttttttcacctagacctacaacatcaatacatataaataaattctagtgttttttgtttttttatttggggtgggggaggagaaaggaaggaaataccaggtaagagaaaagggctggagaacaggtgacctttttgtttttattttttctcaaacagcaagtactgtgggtctgataccaggttcacctgaagggtacatcttaacagcatccagaaggctttcttttgacaaatcacacgcaccaccgcatcaggtgggaggggtctggccatgcggctcaagtgtccaggtggagatgaatgtgtggctcccgcaggcctgaactcacccaggaatggcttggcaaggagggccggtggggacagagagggctcatcccaggccccacaagcagccgcctgcagtgggagaaggaaaagcagacaagaagctcaggtagggaatgcctggaactgtcgggtgggcagcccctggggaagggactcaagcataaaggcttgggataaagagggaaaagaccaggtgagggcaggaggggagctgctgaaagatgcaggtgaacagtaaagcacctttcagtaaaactgccctttcccaggcagctctggggtgggcgctgttggtaggaggccgttctcccgcttccttagaattgtgagagcagtaagaagttacttcagcagttcctaagatgctccttccccatgttctacactagacacagagcttagagcccaagcctgagcgctgtcctgcacccgtgagacgctgaaggcagcctctggtggggggtgcatccccggccccctcctctaggtgttctgagccagcctcctctggaggaggaggtagacgctcagtgacccctaagaacagctgagaaacctgaactgtccccttccctttccttggaatgacagaatctggagtgatttccttgtttcttacttaaaaacaagcccagcacacgatggctcacacaagcctctggctggagaagctgccctcccggaggctgcgcaggccctttggaccttggtcagccctccacccagcctcaccctggacctgcccccgccgtctgaagacaaacgagactgatgcctactgcttagctcaggccctcctgtcctgacaacctgggtctgctgctgggagtgaagcaaaggaggaaaaggacaaactcccagtggcctcacttggggaccacacacgggtccactccctccatcaccaagtggtgttcacgatgagctgtgtgggaggtggagacaggtccagagaaagcagcaggctccggaagaggaaggaaggaaaatgacaggttacagaaggcttcagggaaagaaatgtgtgaaaaacacagcacccccgcagggcagggtatggagccccagaagcagagcccacggggcctgggatgggcctgtggtatgtcagctcaccccatctgggccaacctgggagccaccagcagccatctccatgatttgtctctggtgcccagcacatccactggctttagaggagcccaggacagggaccctgtgtgattctcatgctaaaactgtcatcaacttcatgggctgcctgtaagcgccctgggctcatcaagccaggagctggaacccaactatgacccccccccctcccccaacctgcctgctgctctgagcaccccattgcttcccaggcggggagccaggcaccagaatgctcgcaatcggtgccctcaagaacctccttttctttttgcaaataacctcaagggtgaaccagctgaggaatcaggaggggatgcattcttaagagtcacctcttaaggtactgcagtgacgtatcaaactaaacaggacagaggctagagatggaagggagcggaggggctggcaagaaacatataaaagttcagctatacacatggagcttgcgtttttgttttcttttcctttcccctttgtaaaaaccttggctacattttaaaacaaaaagcctcaaagtaaaatgaccctgctgccaaatcactgtgcctagggatgggcggctgggccggaagcactgctgagaaggcgccctggctgcgcggcaggacagggaggaggcagggagggcaaatctgcactgcacaggaggcgtcactccacagtcacggtaggagcagatgggatgaaggagtcgtctgcttttttgtttcgtatcaaagcaagcgggtcaatgccatatatccacgggtgcaagctggttgacaacggagctttcgggagtggagaggagggaggtctctcagtctgggccacgcatttggacggtggatctggtgaggctcccgagtgtcggctgtgtcgaggccgcatggcggcaccgtcctcagtagggagaggcgaggtggcagccaggcactgtcaggccttactctcctccactttgacagcccgaggcttgatcgctccggttcgcttcatctgggaggcagccgagggggcctcctgcagcttcacggctcccaggctgggtttctcatccactcgttgttttgcctgttgcacgtagtgtccctgcacagagcccatgttaactgctgatccagagggcttcccactggggctagcagagctaggcctgtaggtctgtggcgatggcacggggcctcctgaagggacattctgtttactgtcggcaaagtggaagcctttcatctccatctgagagggctctctgctggtgttcaggactggcggctgggacccgggcggaggaatccttcggggggccccaacggagaggctctgcccaggtggcagctgaatagactggggcaggatcagtggctgctgcccggagccgtaccgaggcagtggcatggtcagctgtgggagctgggagtccaacatctgggaggcacccaggccagcagcctggctgagctggccctcgtagaccagggcttggttcccgctcatgggctggtagggtgagccagactgcggcttcaccatctccaagggctgcatgcctgggaacgccgagtatggaggcttcaaggctgtgcccccagagaggatcatggtgctgggcggtgacaggctggggtgcatgtacacctgagatctgaagggctgcaaggagctgaagatctcctgggactgggacacaggaagcccacccctcagtccaagctgagcttgtgcctgcagagatgtgtgaagggagatcgggatctgctgggcagcggcggcctgttggtaactctgctgctgaggtatcgtttgaggaaccagccggggctgacttgcaaacacatggccatccaggtacaggggcgggaggtggctgcctggcatagaagcagaaggtgctacagaggccacaggcatgggtggcatggacactccaccgaaggagctgtagttgaccccgctggaggcacccacagaggatggaggctggatgcctgagccagcgccgcctggagagctctgctccggcaaactgggggagttttcccaagccttgcgcgcagactccatcttcagagtaaggtcggcggtggggaaggacattggggagagaccgatggccctctggatgtgatggtcccgccgcaggatggggatactctgtgttaaccctgcattactggccaaggcatcctgaagtttaacaactggactcccagtaggaccagaggcagaaccaggtggcaagctgaaatcggagtcttttggactgactccaaattcaatgggtggcacaggcagcacggagtccacgtgaatctccaccccgttaacaggcgggacgacagccccttgcagccgctcggccccctccgagccctttctgtttttcagagaacgctcgttgccgatgggtcctggtctgtgctccttgctctgtccagagccttgttctgaatccttctgctcagatggctttggagcctgctccttgtggctgtcggccttgggttccgccaggccgggcccgctcatctcctctggcttcagagtcccatatggggagctgcgctgcgaggaggtcgcagacgactcccgagactcggcactcaagtcaacgccactatctccctggctgctcttaaaaccctgctccgcagagccagtctcggtgctgctgaaggcagtgacagctttcctccaggagtcgttggctggggcctgcacagggagagcctggctgctgctctcccagatctcagtgcccaggctgctgccaggcacggtcacgtcaccttgctccagacataagttgttctgcttttttgcaaatcgaggaggaatacgggaggaaaggcctcgacctttgacaggcacctgcacggcctgctccttctttcttctctcttcctccagcaggcggcgctgcttcttggtcaggacttcgatgaagccttcg

SEQ ID NO: 151312 - DNA, 431 bp, Homo sapiens
aaggtgaccttgaggatccctgggagctcaggaaggtaggagagcccagaagcagggacagggagctggttggggaggaccagaaatcagggtatcaatactctggctgaccatcgtcatcgtgagactgactttggcggaagtccttggataattatcattattgagtttctgggacgttacaaatttaccattctcttctgcacaatttacctttgggagcctttcctgaagactatcttctggtctcgaaatggacatgatagatccagggatgtacagcaaagagctatgaggtccaaccgctgtctacaggaaggaattaaaattggccctgaagacatctgtactttatggaaacaggcggaaacaaaagttcaagctaaaatccgtaagatgaaggtcacaaagaaagtcaaccatcattacaa

SEQ ID NO: 151313 - DNA, 341 bp, Homo sapiens
gtggactggattagctgcggagccctggaagctgcctgtccttctccctgtgcttaaccagaggtgcccatgggttggacaatgaggctggtcacagcagcactgttactgggtctcatgatggtggtcactggagacgaggatgagaacagaccgtgtgcccatgaagccctcttggacgaggactccctcttttgccagggccttgaagacttctactcatagttggggaccattgattgccagggtgatcttgagagtagcaactacagcccgtggataccgtgctatgattcgtgccaaattccgaagcattcttcctgctaacgccattggacacg

SEQ ID NO: 151314 - DNA, 419 bp, Homo sapiens
aattcttctcgggaggcagtgatgggacctttccaccatggaacctaagaaagcaatgaagagagccgggggcgccaactccaacggggtgtccatgttcgaacagacccaaatccaggaatttaaggaggccttcactatcatggaccagaacagggatggcttcattgacttgaacgatctgagagacacctttgctgcccttgggcgagggaacgtggataatgaagaaattgatgaaatgatcaaggacgctccgggtccaaataactttactgcgatcctcacaatgtttggggagaaacttatgggagcggaccctgaggaaaccattctcaacgcattcaaagtgtttgaccctgtcctcaaaagggagctgaaggctgattaccttcggaaaatgctgaccacgcaggcgg

SEQ ID NO: 151315 - DNA, 843 bp, Homo sapiens
ctcgcacggaaccccgggtcgacccacgcgtccggtggaattcttctcgggaggcagtgctgggtccttttcaccatggctcctaagaaagcaaagaaaagagccgggggtgccaacctccaacgtgttctccatgttcgaacagacccaaatccaggaatttaaggaggccttcactatcatggaccagaacagggatggcttcattgacaagaaccgatctgagagacacctttgcttgcccttggcggaagttgaacgtgaaaaatgaagaaattgatgaaatgatcaatggaggctccgggtccaattaactttactgtgttcctcacaatgttttgggggagaaacttaaagggagcggaccctgaaggaaaaccatttctcaaccgcatttcaaaagtgtttgaccctgaaggcaaaggggttgctgaagggctggattacgttcgggaaatgctgaacaacgcagggcggagaggttttccaaggaaggaggttgaccagatgttcgccgccttccccccctgacgtgactggcaacttggactacaagaacctggtgcacatcatcacccacggagaagagaaggactaaggagggggctcgctgctggcccctgggctctgtctttgcagagtggtccctgccctcatctctctcccccgagtaccgcctctgtccctaccttgtctgttagccatgtggctgccccatttatccacctccatcttctttgcagcctgggtggctatgggtacttcgtggccgcacatcctacagttggaaatccatccagaggccatgttccaataaacaggaggtcgtgatattggtcacga

SEQ ID NO: 151316 - DNA, 452 bp, Homo sapiens
cccccttttctctttaaaaagggcccccttgtgagaccggggcgcgtctttttttttctcggccccccctccatgcttttttctttaaggtttgggggggggaaaaagaaacctttttgtgtgcccgggggggttttttttaaccccccccgccccccccctttcccctttaagaaaggaaccccccccgggggggggggggggggtttcccaggggggcccttttttttttttcccccccctttttaaggggggggttttcgggggggccccccaaacccagggccccgcccccccccccttttttaaaggggggcccccccccggggggcccggggggggtggccccccttttttttcccccctgcccgggggggggggggggttttttgaaaataaaacccccccccccttccgggcccccccccaataaacccttttttttggggggg

SEQ ID NO: 151317 - DNA, 245 bp, Homo sapiens
  misc_feature (1)...(245): n = a,t,c or g
cctttaccngggncccggggnttgcacctttnttgccggtnttcnccgntnattgggnnatggcgnttcccgnnggaccgntcttgttttattcccccnggttacncnccnttcaaacngggttttngcctnnttgggcaaancngggtggnccgcctttnttgcaantttntcagggccnggcggtnnagggcnatcaantttttcccgtttcanttgtngaaaggaaaaccccccttgggccc

SEQ ID NO: 151318 - DNA, 2303 bp, Homo sapiens
ccctgccccgcgccgccaagcggttcccgccctcgcccagcgcccaggtagctgcgaggaaacttttgcagcggctgggtagcagcacgtctcttgctcctcagggccactgccaggcttgccgagtcctgggactgctctcgctccggctgccactctcccgcgctctcctagctccctgcgaagcaggatggccgggaccgtgcgcaccgcgtgcttggtggtggcgatgctgctcagcttggacttcccgggacaggcgcagcccccgccgccgccgccggacgccacctgtcaccaagtccgctccttcttccagagactgcagcccggactcaagtgggtgccagaaactcccgtgccaggatcagatttgcaagtatgtctccctaagggcccaacatgctgctcaagaaagatggaagaaaaataccaactaacagcacgattgaacatggaacagctgcttcagtctgcaagtatggagctcaagttcttaattattcagaatgctgcggttttccaagaggcctttgaaattgttgttcgccatgccaagaactacaccaatgccatgttcaagaacaactacccaagcctgactccacaagcttttgagtttgtgggtgaatttttcacagatgtgtctctctacatcttgggttctgacatcaatgtagatgacatggtcaatgaattgtttgacagcctgtttccagtcatctatacccagctaatgaacccaggcctgcctgattcagccttggacatcaatgagtgcctccgaggagcaagacgtgacctgaaagtatttgggaatttccccaagcttattatgacccaggtttccaagtcactgcaagtcactaggatcttccttcaggctctgaatcttggaattgaagtgatcaacacaactgatcacctgaagttcagtaaggactgtggccgaatgctcaccagaatgtggtactgctcttactgccagggactgatgatggttaaaccctgtggcggttactgcaatgtggtcatgcaaggctgtatggcaggtgtggtggagattgacaagtactggagagaatacattctgtcccttgaagaacttgtgaatggcatgtacagaatctatgacatggagaacgtactgcttggtctcttttcaacaatccatgattctatccagtatgtccagaagaatgcaggaaagctgaccaccactattggcaagttatgtgcccattctcaacaacgccaatatagatctgcttattatcctgaagatctctttattgacaagaaagtattaaaagttgctcatgtagaacatgaagaaaccttatccagccgaagaagggaactaattcagaagttgaagtctttcatcagcttctatagtgctttgcctggctacatctgcagccatagccctgtggcggaaaacgacaccctttgctggaatggacaagaactcgtggagagatacagccaaaaggcagcaaggaatggaatgaaaaaccagttcaatctccatgagctgaaaatgaagggccctgagccagtggtcagtcaaattattgacaaactgaagcacattaaccagctcctgagaaccatgtctatgcccaaaggtagagttctggataaaaacctggatgaggaagggtttgaaagtggagactgcggtgatgatgaagatgagtgcattggaggctctggtgatggaatgataaaagtgaagaatcagctccgcttccttgcagaactggcctatgatctggatgtggatgatgcgcctggaaacagtcagcaggcaactccgaaggacaacgagataagcacctttcacaacctcgggaacgttcattccccgctgaagcttctcaccagcatggccatctcggtggtgtgcttcttcttcctggtgcactgactgcctggtgcccagcacatgtgctgccctacagcaccctgtggtcttcctcgataaagggaaccactttcttatttttttctatttttttttttttgttatcctgtatacctcctccagccatgaagtagaggactaaccatgtgttatgttttcgaaaatcaaatggtatcttttggaggaagatacattttagtggtagcatatagattgtccttttgcaaagaaagaaaaaaaaccatcaagttgtgccaaattattctcctatgtttggctgctagaacatggttaccatgtctttctctctcactccctccctttctatcgttctctctttgcatggatttctttgaaaaaaaataaattgctc

SEQ ID NO: 151319 - DNA, 4443 bp, Homo sapiens
gggcagggaaggccaaaggtccaagggagccggcccagggagccctggccctgacctcccagaggctctagctctgtgggtgaaggctgctgtggcaccagccgggggcaggtctgcacagtggacagactctggtggaagcatcctggatcccagggccaggtcaggcccccagacaggggtgtagacatgctttataagtggggaagggcctgcttcctgagtcggaggctgagaggatggagggtgcagctttagtactgggcacctcagtgacttatatcacacccatgccctgcagcctaccccgtgcggtgcctgctgcccagtgcccatggctcttgcgcagactgggctgcccgctggtacttcgttgcctctgtgggccaatgtaaccgcttctggtatggcggctgccatggcaatgccaataactttgcctcggagcaagagtgcatgagcagctgccagggatctctccatgggccccgtcgtccccagcctggggcttctggaaggagcacccacacggatggtggcggcagcagtcctgcaggcgagcaggaacccagccagcacaggacaggggccgcggtgcagagaaagccctggccttctggtggtctctggcggcaagaccaacagcctgggccaggggaggccccccacacccaggcctttggagaatggccatgggggcaggagcttgggtccagggcccctggactgggtggagatgccggatcaccagcgccacccttccacagctcctcctacaggtgaggcccaccttccccaggtgagggggttaggacgcccagacaaggagcatgccagttggagctaaacccctgaagtcagccggccctccctccccatccctaacttctgtttctcccgagagccctgcctggtgggccttgttgccatcattctacagatggagaagctggggcttcagagacttgaggctactctgatgtctaatagacatctgtgcagatggtggctccggggttctccatcagatctcgccagtataccccggggcctgtctggctggaaaagtttattggcttcgtgacctttggcaagtcacccaacttctccaagcctcagtttcttgacctgtaaaatggtggcattaccttctgccctgtatacctcacaggtgtgggttctggtcaagatgactcctgggactggatcatattaatgaaggatttgggaaggttaaaaacaaaattaaaagcgttgtgttccacatgggtcgagcgtgtagtttagcccccacatgaacctggtgtgtgccgtccctcccgacctctccccaccccttgggctttgcacctaccttgttgctgctacaagaacaggttgaggcagtgatgcttgggggagccgggggcaggttggggagggtagattcctgaatccatgggcttctggggctctgcctcccatagggaccctctagccccaaaagtgcctgtgacaggatgggccccaagctgtctgtcatggaacacactgattagggtggttctggtcctggcgctcatgccagtcagcagatctcacttcccacctctccaggattagcttggcaggtgtggagccctcgttggtgcaggcagccctggggcagttggtgcggctctcctgctcagacgacactgccccggaatcccaggctgcctggcagaaagatggccagcccatctcctctgacaggcacaggctgcagttcgacggatccctgatcatccaccccctgcaggcagaggacgcgggcacctacagctgtggcagcacccggccaggccgcgactcccagaagatccaacttcgcatcatagggggtgacatggccgtgctgtctgaggctgagctgagccgcttccctcagcccagggacccagctcaggactttggccaagcgggggctgctgggcccctgggggccatcccctcttcacacccacagcctgcaaacaggctgcgtttggaccagaaccagccccgggtggtggatgccagtccaggccagcggatccggatgacctgccgtgccgaaggcttcccgcccccagccatcgagtggcagagagatgggcagcctgtctcttctcccagacaccagctgcagcctgatggctccctggtcattagccgagtggctgtagaagatggcggcttctacacctgtgtcgctttcaatgggcaggaccgagaccagcgatgggtccagctcagagttctgggggagctgacaatctcaggactgccccctactgtgacagtgccagagggtgatacggccaggctattgtgtgtggtagcaggagaaagtgtgaacatcaggtggtccaggaacgggctacctgtgcaggctgatggccaccgtgtccaccagtccccagatggcacgctgctcatttacaacttgcgggccagggatgagggctcctacacgtgcagtgcctaccaggggagccaggcagtcagccgcagcaccgaggtgaaggtggtctcaccagcacccaccgcccagcccagggaccctggcagggactgcgtcgaccagccagagctggccaactgtgatttgatcctgcaggcccagctttgtggcaatgagtattactccagcttctgctgtgccagctgttcacgtttccagcctcacgctcagcccatctggcagtagggatgaaggctagttccagccccagtccaaaatagttcatagggctagggagaaaggaagatggactcttggcttcctctctctggctggcaaagggagttatcttctggaatacattagctctttcaaaacccacccagtgtttagcctcaacggcagccagttaccagcttctctctgtagccttcagcagtgtttgcatctctgacataaccacaggctgctgttttcaagaagagcaatctgtttggataagaaaaacctttactttacagcttccctttataatttgttacacaggaatagttaaatgcatttgtttgtttgttttttgagacagagtttcactcttgttgcccaggctggagggcaatggcgcgatctcagctcactgcaccctctgcctcccaggttcaagcgattctcctgcctcagcctcccaagtagctggtactacaggtgcgtgccaccacacctggcttattttagttattttagtagagatagggtttcaccatgttggccaggctggtctcggaactcctgactgcaggtgatccgtcctccttgggctcccaaagtgctgggattacaggcatgagccaccacgcccagccatcaatgcattttttttattttttttttgagacagagtttcgcacttcttgcccaggctggagtacaatggtgcgatcttggctcactgcaacctccacctcctgggttcaagcgcttctccagcctcagcctcctgagtagctgggattacaggtatgtgccaccatgcctggctaatttttaggtttttctttcacatagacggggtctcactctgttggccaggctggtttcgaactcctggactcaagcagttccccccacctcagcctcctaaagtgctgggattacaggtgtaagccatcaggcctggcctccggtacactgtactttgaaattagaaaaacggttaacagatccagctctgactccagccccacaaggacacagggttcctttccctggagcagatgcccctagctcccctactgggggccctctattgcttagggagcaatggacctttagacagcggccaaggtgacaggcaccttggaagaggcacttagagtgagcagtcttgggtcatcatcaaggaggtaccagtcttgggctggctgaggggtgaggccagaaggaaccatcgggaactgaccggtgagctgagtcaagcggagctggcgcagagcgtggctggagttggtgttatagttcaacatgacgaagatggcaaacttcccatcgtagacctgggtccctcgcaccacgcggaggttgggcaatggtagagtagagaattcattcatggccacgaggacatagcctgtcacttctcgaatccactgcaggaaggagaggtcggcattgtgtcccgtgagcacaatctcaaggttccccatcaccacctcacacctctcgtagagcttgtacagtgtctggtattggttctcagcatcgccggtcacactcaggccattcagagtcccaggacacactgcctgagagttgcccacctcggagccccgggccaggctgaaaagcaagcccagcacctgcagagcgtcgttcgccctcatgactccgcagagggtgaagggagcccagccaagtccggcccgggggcccctaggctaggacatcgaggcaagagccacctgaaccgctggcgaattggt

SEQ ID NO: 151320 - DNA, 1236 bp, Homo sapiens
tttttttgcctgggccccagacagagacagaagtcagtaccactccctcagtttgctagggaagaagtacagacaacttctactttatctgaaactagaagtcaccctcttaggattagcaggtgtgattactggtgaacgagctatgttcctaccatgtgtcagtccgcttccttcttgtcactgtcactggcaggagaggcattccgatggcatcccaagggacagatgtcatggaagcaaggccctctaaatgcttgagctctttggaagagagggctttggtcatccaggtaacattccaggaaaacgtgatccttgatagaaacagttctgagtggctgcaaaagtctaccttacataaagagtcagcaagattcaataataatgactgcaaggctgtcactagctcatctgcctttgccttccttacacaaggcactgtttgtcagagaaatgtcgtgaccaaatacacgacctcctgtttattggaacatggcctctggatggatttccaactgtacgatgtgccgccacgaagtacccatagccaccctagctgcaaagaagatggaggtggataaatggggcagccacatggctaacagacaaggtagggacagaggcggtactcgggggagagagatgagggcagggacccactctgcaaagacgagccccagggcgccagcagcgaagcccccctcctagtccttctcttctcccgtggggtgatgatgttgcaccaaggttcttgtagtccaagttgccagtcacgtcagggggggaaggcggcgaacatctggtcaacctcctccttggaaaacctctccgcctgggtggtcagcatttcccgaacggtaatcagccttcagcacccctttgccttcagggtcaaacactttgaatgcgttgagaatggtttcctcagggtccgctcccttaagtttctccccaaacattgtgaggaacactgtaaagttaattggacccggagcctccttgatcatttcatcaatttcttcatttttcacgttcactcgcccaagggcagcaaaggtgtctctcagatcgttcttgtcaatgaagccatccctgttctggtccatgatagtgaaggcctccttaaattcctggatttgggtctgttcgaacatggagaacacgttggagttggcgcccccggctctcttctttgctttcttaggtgccatggtggaaaggacccagcactgg

SEQ ID NO: 151321 - DNA, 334 bp, Homo sapiens
  misc_feature (1)...(334): n = a,t,c or g
tcagtatttaaacagatcacatcatgcgtgagtacaagctagtggtccttggttcaggaggcgttgggaagtctgctctgacagttcagtttgttcatgtaatttctgttgtactatattacctattgatcttatgatctctacatatatcatcttctatactattgtttatactctattctctcattttctcttatctgttatttccttcttctcttttattctatatttatttcttttatctgcttcttttcttttctatgtttttatcttttctannnnnnnnnnnnnnnnnnnnnnnnnnnnnnnnnnnnnnnnnnnnnnnnnnnnnnnn

SEQ ID NO: 151322 - DNA, 1005 bp, Homo sapiens
atgaagaggccagatgtaggtgttctgcttgataacgcagctgaggcccagctggacagccacatgaagcccaaacatgggagaaaccccttgtcctccttgatgcggaaggcttgttcaagagggaaagctatgacagagcagtgtatggaggttcgcatcatgaacttttgctccagaacgattgcaggaataaatcaggaaagccaagagaacccacagcgctctgaaggaagcagattgctcctgcaggacccaggggacaccccaaatactggatccttgaggaaagctgccagaggcactggaaaaggccactgcagaagaaaacctccagctgaagtttgtaacaatttgaaccgacagagaatctcctggccagaactcgggggagggcatgaatccagtgtgcagacttcacaggaagccacatccctaggaaaagagggagagtactacatcaagggaacaccctgtgggacaaaagaatctgaacaacagccttcagccctagaccttccctctgacaaagcctacccaaatgagaaggaaccagaaaaccaactctgctcaccagcaatggatccaaatcaagaagaaatccctgatttatctgaaaaagaattcaggttagttaataagctaatcagagaggcaccagagaaagtaattgctattaacaccaagaggacctacattaataactttctaaaagaacagcttattatcaaccattcaaaaggcctgggtgctaccaacactacctgtgggcaagcagtatttcagatcatggcctgctttggactgaaagtcggcagtgaaaaagctgggactggtcgggcagatttcttccctctagctctccatgagtcttatttcagagttggagttgggtgccttgcattggccaagtctgatacacctgccatgggagccagggaaacagcctacggggatcagccctttgagacactgaggagactaggagaagaacatagaacgtga

SEQ ID NO: 151323 - DNA, 293 bp, Homo sapiens
cagagttggttttctggttccttctcatttgggtaggctttgtcagagggaaggtctagggctgaaggctgttgttcagattcttttgtcccacagggtgttcccttgatgtagtactctccctcttttcctagggatgtggcttcctgtgaagtctgcacactggattcatgccctcccccgagttctggccaggagattctctgtcggttcaaattgttacaaacttcagctggaggttttcttctgcagtggccttttccagtgcctctggcagctttcctcaaggatcc

SEQ ID NO: 151324 - DNA, 2335 bp, Homo sapiens; identical to SEQ ID NO: 126932

SEQ ID NO: 151325 - DNA, 969 bp, Homo sapiens; identical to SEQ ID NO: 130289

SEQ ID NO: 151326 - DNA, 1776 bp, Homo sapiens
tcattctcttctcagttctaggagctttctggagtctttagggttttctacataaacaatcatatcatcagcaaacagcaacagtttgactttcgctttaccgatttggatgccctttatttctttctctttgctgattgctctggctaggacttccagtactaagttgaagagaagtagtgagaatgggcatccttgtcttgttccagtttccagagagaatgctttcaacttttccccattcagtatattggctgtgggtttgccatagatggcttttattacattaaggtatgtcccctgcatgccgattttgctgagagttttaatcataaagggatgttggattttgtcaaatgttttttctgcatctttctctgttgcctctctgattagcttattaactaacctgaattctttttcagataaatcagggatttcttcttgatttggatccattgctggtgagcagagttggttttctggttccttctcatttgggtaggctttgtcagagggaaggtctagggctgaaggctgttgttcagattcttttgtcccacagggtgttcccttgatgtagtactctccctcttttcctagggatgtggcttcagtatttggggtgtcccctgggtcctgcaggagcaatctgcttccttcagagcgctgtgggttctcttggctttcctgatttattcctgcaatcgttctggagcaaaagttcatgatgcgaacctccatacactgctctgtctgtaaccttcgcctattcataggggtaggtgtgggatcagtgcaccaggggtaccatcctggctttgcagtgccactcagtttattctcttcttgttctaagtagaaagctttttgtttggtttccttccctgcagccgcccatgctctttcttgcttctgctgttttatagcacttgtctctgtccgaagttctcgtctgtgtttgctaaatctgtgtttaccaaaagtaagtttcatgagagcatgggctttctttgctaaatctctgcttcctagttcagtgcagggcaaaaataaaggatcagaagtgaggattctagttctggttcctggctcctccagctcattcttgtaatgccctggtgtttccttttcctttttctgatcaggagtcatgcttttctccccatcattccaaacacccagagaggtcagcatagctttccttcttgaacaagccttccgcatcaaggaggacatctctgcttgcctgcaggggacccatggctttcgaaaagaggaatcgctcgccaggaagttactggaagcggggcatggcccactccctgtgctgcttggcagatgtctgctggcaaacccaatccttgtcctctccttacccatctcagactgctggctctctgtcagcaagcatccaactgggctcagccatgggaggagagttgtgtcgttagctgggagttttggcacagttgggcaaaaatggaggattgtggtcccaagccatggagtttcagaccatgcaagctcaggccctcctttgcctccctcgatggctcggctcttccctcccgcctcttgtctgcctcgctcctcaggcttgaggaagagaatcaggatttcctccaggccccaggatggctctttcagttgaagcgccagcaaaaggccaggcgcggtggctcgtacctgtaaccccagcacttcgaccgaggcgggaggatcacctgaggccaggagtttgagaccagcctgggcaacatagtgagaccccat

SEQ ID NO: 151327 - DNA, 810 bp, Homo sapiens
  misc_feature (1)...(810): n = a,t,c or g
cccacgcgtccggatgacccgagtccaattagctgaaaaccttctgtagaaaggtgattgtatgaaaaattcaatcaacattaaaaaagggaagtgaggaggttaatacttacttgaacaaaatattcttaaatgaagttgcatctctttttaaaattaagatatcattcatgcaccatacggtttatcctattaaggtgtaaacttcaatgtttttaatcatattcactaagttgtgcaacatcaccactccctaacttcagaacactttcatcacctccaaaaganaccccataccatttgcaatcactcctcctcctccttcccccagcatccggcaaccactaatctactttctgtccctatgcntgttgcctatcctggacatttcatatagtcaaacaacatgtgggccttttgtgtctgggttctctaagtcaaggagccacaattggagttgattttatgattaagacagtggagattaatggtgaaaaagtaaaggaaaaggggggagagtatcacatcaagggaacatcctgtgggacaaaagaatctgaacaacagccttcagccctagaccttgcctctctgacagagcctacccaaataagaaggaaccagaaaaccaactctggtaatatgacaaaacaaggctctttaacacctccaaaaaaaatcacactagctcaccagcaatggattcaaaccaataagaaatccctgatttacctgaaaaagaattcagcgaggcaccagagaaaagcgaagcctgacgcaaggaaatccaaaaaacaatacgagaagtga

SEQ ID NO: 151328 - DNA, 1551 bp, Homo sapiens
atgttaccagaaagggttcctgatccagaccccaagaaagggttctgggatcttgtagaagagagaattcaaggcgaatccataagctgtaggaaaagaatacagcgggcaagtgtagaagcaggaggctattgcaaggtccagtcaaaagatgatgagggccagaggaggggtggtaaaggcggaaatggtgagaagctgtcagattctgctctgttgcccaggctggagaagctgtcagatattaggaagaagccgccgcggtacccgcttcaccgggcatgctcagtcctccggccaggctttgactgcgggacgccagcgtccggccccctgcgcgcgtccggagtccgggtccctttaaatcgggcaggctcgttgctaggcaaccgcgcggcccgcgctggcgctgcactgcggtggctcagcccggagccggcccggcggggtcgcggtggccagagccgaacggggggctgccgcgcgcgggtggtggttgtctttgaggaagagaggttcgggctctccagacggcatccacgcttccagatattggaagaggtgcctggagaaatggatgctagaagaaaacactggaaggagaatatgtttactcctttttttagtgcacaagatgttctagaagagacttctgagcctgaatcttcttctgaacaaacgactgcagatagcagcaagggaatggaagaaatttataatttgtccagtagaaagtttcaggaagaaagtaaatttaagaggaaaaaatatattttccaactaaatgaaatagaacaagaacaaaatttaagagagaacaagagaaacatttcaaagaatgaaacagacacaaattctgcatcctatgaatcatctaatgtggatgttacaacagaagaaagctttaacagcacagaagataactctacctgcagtacagataacttaccagctctactaagacaagacataagaaagaaatttatggaaagaatgtctccaaaactttgcctgaatcttttgaatgaagaactggaagaacttaatatgaaatacagaaaaatagaagaggaatttgaaaatgctgaaaaagaacttttgcactacaaaaaagaaatattcacaaaacccctaaattttcaagaaacagagacggatgcttcaaaaagtgactatgaacttcaagctttaagaaatgacctgtctgaaaaagcaacaaatgtaaaaaacttaagtgaacagctccagcaagccaaagaagtcatccacaaattgaacctagagaacagaaatctaaaagaagctgttaggaagttaaagcatcaaaccgaggttggaaatgtgctcctaaaagaagaaatgaaatcatattatgaattagaaatggcaaagatccgcggagagctcagtgtcatcaagaatgaactgagaactgagaagaccctacaagcaagaaataacagagccttggagttgcttagaaaatactatgcttcttcaatggtaacatcatcaagtatccttgaccactttactggggattttttttaa

SEQ ID NO: 151329 - DNA, 1088 bp, Homo sapiens
ctgtcttgtgccaattttcaaagggaatgcttccagtttttgcccagtcagtatgatattggctgtgggtgagatatgtcccatcaatacctagtttattgagagtttttagcatgaagggctgttgaattttgttgaaggccttttctgcatctattgagataatcatgtggtttttgtctttggttctctggtagaattcagctgtgaatccatctggtcctggactttttttggttggtaggctattaattattgcctcaaattcagagcctgttattggtctattcagggattcaacttcttcctggtttagtattgggagggtatatgtgtccaggaatttatccatttcttctagattttctagtttatttgcgtaccagtaccaaataatataaacagtagtttgtatttctgtgggatcggtggtgatatcacctttatcattttttattgtgtctatttgattcttctctcttttcttctttattagtcttgctagtgttctatcaattttgttgatcttttcaaaaaaccagctcctggattcattgattttttgaagggttttttgtgtctctatctccttcagttctgctctgatcttagttgtttcttgccttctgctagcttttgaatgtgtttgctcttgcttctctagttctgttaattgtgatattagggtgtcaattttagatctttgctgctttctcttgtgggcatttagtgccataaatttcccactatacattgctttaaatgtgtcccagagattctggtatgttgtgtctttgttctcattggtttcaaagaacatctttatttctgccttcatttctttatatacccagtagtcattcaggagcagattgttaagtttccatgtagttgagcggttttgagtgagtttcttaatcctgagttctaatttgattgcactatggtctgagagacagtttgttataatttctgttcttttacatttgctgaggagtgctttacttccaactatgtggtcaattttagaataagtgggatgtggtgctgagaagaatgtatattctgttgatttggggtggagagtt

SEQ ID NO: 151330 - DNA, 1926 bp, Homo sapiens
  misc_feature (1)...(1926): n = a,t,c or g
atgttctctgattccttgacgccgatgcataaagaacgcattgtgaccttactgaagcgcgaagggcatgtggttggctttatgggcgatggtattaatgatgcgcccgccttacgcgctgcggatatcggcatttctgtggacggcgcggtagatattgcccgtgaagcggctgatatcatcctgctggaaaaaagcctgatggtgctggaagagggggttattgagggacgtcgcactttcgccaacatgctgaaatacatcaaaatgacggcgagctctaacttcggtaatgtgttcagcgtgctggtagcgagtgctttcttgcccttcctgccgatgttgccgttacacttgcttattcagaacctgctgtacgatgtgtcacaggtggcgatcccgtttgataacgtcgacgacgagcaaattcaaaagccgcagcgttggaatccggcggatctggggcgctttatgatcttcttcggaccgatcagctcgatcttcgatattttgacgttttgcctgatgtggtgggtattccatgccaacacgccggaaacgcaaacgctgttccagtcgggatggtttgtggtgggcttactgtcgcaaacgctgattgtgcatatgatccgcacccgccgtgtgccgtttattcagagctgtgcatcgtggccgttaatgatcatgaccgtgatcgtgatgattgtcgggatcgcattgccgttttcaccgctggccagttatctgcaattacaggcgctgccgttaagctatttcccgtggctggttgcgattctggcaggattagcgacgaacagcgatcgcttcgatctcaatcttcacgtctttcggcagacgggcaacttcaacgcaagaacgtgccgggaaggtggcgttgtgttcggtgaagaaggcttcgccagcggcttcgacgatcgcttttacgttatccagcgactgacgtgcctgtgcagcgacgtctgccggtacttcgcccgttttcggatttaccgggatctgaccggaggtgatgatcatattgcccagatcaacgncctgtacgtaaggccgatagctgccggtccggcacccggtacctttcgattatggcattcacgtcgggcaatgctgctgacccgtgctgatatggaagaccgtgaacgcttcctgaacgcccgcgacaccctgcgagcgttgctcgataacaatatcgttccggtaatcaatgagaacgatgctgtcgctacggcagagattaaggtcggcgataacgataacctttctgcgctggcggcgattcttgcgggtgccgataaactgttgctgctgaccgatcaaaaaggtttgtataccgctgacccgcgcagcaatccgcaggcagaactgattaaagatgtttacggcattgatgacgcactgcgcgcgattgccggtgacagcgtttcaggcctcggaactggcggcatgagtaccaaattgcaggccgctgacgtggcttgccgtgcgggtatcgacaccattattgccgcgggcagcaagccgggcgttattggtgatgtgatggaaggcatttccgtcggtacgctgttccatgcccaggcgactccgcttgaaaaccgtaaacgctggattttcggtgcgccgccggcgggtgaaatcacggtagatgaaggggcaactgccgccattctggaacgcggcagctccctgttgccgaaaggcattaaaagcgtgactggcaatttctcgcgtggtgaagtcatccgcatttgcaacctcgaaggccgcgatatcgcccacggcgtcagtcgttacaacagcgatgcattacgccgtattgccggacaccactcgcaagaaattgatgcaatactgggatatgaatacggcccggttgccgtcaccgtgatgcatgattaccgttaa

SEQ ID NO: 151331 - DNA, 1605 bp, Homo sapiens
atgttctttgaaaccaatgagaacaaagacacaacataccagaatctctgggacacattcaaagcagtgcgtagagggaaatttatagcactaaatgcccacaagagaaagcagaaaagatctaaaattgacaccctaacatcacaattaaaagaactagagaagcaagagcaaacacattcaaaagcctacaggagtctagaaataactaagatcagagcagaactggaggagatagtcaaacaaaaaaccattcaaaaaatcaatgaatccaggagctggttttttgaaaacatcaacaaaattgatagaccactagcaagactaataaataagaaaagagacaagaatcaaatagacgcaataaaaaatgataaggagaatatcaccaccaatcccacagaaatacaaactaccatcagagaatactataaacacctctatgcaaataagccagaaaatctagaagaaatggataaattcctggacacatacaccctcccaagactaaaccaggaagaagctgaatccctgaatagaccaataacaggctctgaaattgaggcaataattaatagcctaccaaccaaaaaaagtccaggaccagatggattcacagctgaattctaccagaggtacaagaaggagctggtaccattccttctgaaactattccaatcaatagaaaaagagggaatcctccctaactcattttatgaggccagcatcatcctgataccaaagcctgacagagacacaacaaaaaaagagaattttagaccaatatcctcgatgaacatcgatgcaaaaatcctcaataaaacactcacaaaccaaatccagcagtacatcaaaaagcttatccaccatgatcaagtgggcttcatccctgggatgcaaggctggttcaacatacacaaatcaataaatgtaatccagcatataaacagaaccaaagacaaaaaccacacgattatctcaatagatgcagaaaaggcctttgacaaaatccaacagcccttcatgctaaaaactcttaataaactaggtattgatgggacgtatctcaaaataatgacagctatttatgacaaacccacagccagtaccatactgaatggacaaaaactggaagcattccctttgaaaactggcacaagacagggatgccctctctcaccactcctattcaacatagtgttggaagttctggccagggcaatcaggcaggagaaagaaataaagggtattcaattaggaaaagaggaagtcaaattgtccctgtttgcagacgacatgattgtatatttagaaaaccccattgtctcagcccaaactctccttaaactgataagcaacttcagcaaaatctcaggatacaaaatcaatgtgcaaaaatcacaagtattcccatacaccaataacagacaaacagagagccaaatcatgagtgaactcctattcacaattgcttcaaagagaataaaatacgtaggaattcaacttacaagggatgtgaaggacctcttcaaggagaactacaaaccactgctcaaggaaataaaagaggacacaaacaaatggaaggacattctgtgttcatga

SEQ ID NO: 151332 - DNA, 975 bp, Homo sapiens
atgccctgggctgacaaaagaaatccctctggagcccaatccctgaatggttatgccccgccagacctcatctggggacccagtcatcgggcctttagagcgcaggtcgagtattcaattgggatcagtagcatctacaattctggaacacacaccctcccaatactaaaccaggaagattttgaatccctgaatagaccaataacaggctctgaaattgaggcaataattaatagcctaccaagcaaaaaaagtacaggaccagaccgattcacagctgaattctaccagaagtacaacaaggagctgccgctgtgggatatttttgccaaaatctgttctattcctcacccgtcctatcatgaagagcaactcgctgaatacattgttggttgggcaaaagagaaaggtttccatgtcgaacgcgatcaggtagtgttccaggccttgattcacttggtgaaaggcaacatgggcacagggatcctgggactaccccatcgctgtgaagaacgcgggcatcctgggcagagtcgactgattcaactgtgggaacagctgttttcgatttatggcattcacgtcgggcaaatgctgctgacccgtgctgatatggaagaccgtgaacgcttcctgaacgcccgcgacaccctgcgagcgttgctcgataacaatatcgttccggtaatcaatgagaacgatgctgtcgctacggcagagattaaggtcggcgataacgataacctttctgcgctggcggcgattcttgcgggtgccgataaactgttgctgctgaccgatcaaaaaggtttgtataccgctgacccgcgcagcaatccgcaggcagaactgattaaagatgtttacggcattgatgacgcactgcgcgcgattgccggtgacagcgtttcaggcctcggaactggcggcatgagtaccaaattgcaggccgctgacgtctttagagcacagtga

SEQ ID NO: 151333 - DNA, 358 bp, Homo sapiens
atcagtgttctaggccattctagtcatttttcttgtttctttagactgttaatttatgttcctcatcttgctcatactcattatcatattatttataaatgaatttggattagaaggggaatgatatgttactatggcgtagatacaatgtagatattgttacatggtgacttttttcttgttatttttcagtgttccattggcaagctacaataatggggccagtaagtattcagattaatttcagaataaacagtttatgtaatttactcattttaatcccacttttcttgttatcaacagaatgacagtccctatcagggtggagtatttttcttgacaattcatttcccaacag

SEQ ID NO: 151334 - DNA, 425 bp, Homo sapiens
ggtggaattccaggggcctgggcccagggccatgtcccacccggctgcagccaaggcctcaaccccctgtactacaacctgtgtgaccgctctggggcgtggggcatcgtcctggaggccgtggctggggcgggcattgtcaccacgtttgtgctcaccatcatcctggtggccagcctcccctttgtgcaggacaccaagaaacggagcctgctggggacccagctaagaggccggtgtcaccatacagcgggtacaatgggcagctgctgaccagtgtgtaccagcccactgagatggccctgatgcacaaagttccgtccgaaggagcttacgacatcatcctcccacgggccaccgccaacagccaggtgatgggcagtgccaactcgaccctgcgggctgaagacatgtactcggcccag

SEQ ID NO: 151335 - DNA, 515 bp, Homo sapiens
gttaataaagcatgaaatgtatttattaggcacccttggtggtcacagaggagcaagatccaggcctgagcgcctgggaagtctcttgaggttgcaggaatctccagagaaacataggcgctgcccagccaccaccccgagaacactatttggctggagtgtgaccgccgaggtgatcctggcaggaggctggggccaggtcctcagggccctccccaaatccgaccgcctctcctcgccaccgctgactcagtcccacacgtaggggtttctaaagacctgagagttcttgccgtctttcggcggtgtggccgcctggtggctctgggccgagtacatgtcttcagcccgcagggtcgagttggcactgcccatcacctggctgttggcggtggcccgtgggaggatgatgtcgtaagctccttcggacggaactttgtgcatcagggccatctcagtgggctggtacacactggtcagcagctgcccattgtacccgctgtatggtgacaccg

SEQ ID NO: 151336 - DNA, 737 bp, Homo sapiens
ggcacgaggggccgtcagccttgccggagccagacgtccgctgtgccgtcctcacagcaaggcctgctccgaggccccggggtgcgtcagcagccctcctcaaacaccctgggagtgcccagcagggcggaacacaccgggaaaccaacaccccaaaggcacaaggaagtatccctggagctaaaaatagttctggaaacttgccacggggccacaggctgggacgtgcgttaaggctccctggccaggctctgggttggtgtaatgtggaaggggcgcccaggtcggccctgggaggacatgaacaggcttatgccgagggctctcagatgtatttacctctgtgcctggcagctggcccgtggtgacaggcagagctggaggctggccatcttggaaggcggccgaaggcccatgtgtcctcttggcctctggccccggagggcggatggggatgtggaagttgctgacagagcattttctgagctgttgggtcaggggctggggggtctacagtgcacggaagctcagcagagttgttcactcccatgcatctgcacaaaggggagctaggcttgggagggggcccacgtgttcacaacctcaccctcaagttgccactcctgggttagagactatgccagggttggcctgccccctttacctcttccctgcccccagagagccttgcttggattgtgggaggtgtggaaaggagcttatagccctgcgatctc

SEQ ID NO: 151337 - DNA, 1808 bp, Homo sapiens
ttaataaagcagaaatgtatttattaggcacccttgttcctcacagaggagcaagatccaggcctgagcgcctgggaagtctcttgaggttgcaggaatctccagagaaacataggcgctgcccagccaccaccccgagaacactatttggctggagtgtgaccgccgaggtgatcctggcaggaggctggggttggctcctcgactccacaaacactgaggagtgggtggggacacccatgacacccacccaaacactggcagagagggaggcccttccagatctggggcacatgttgctgggcctgccagggggaggaggagcctggagagtcccttgcccggggccaggtcctcagggccctccccaaatccgaccgcctctccatcgccaccgctgactcagtcccacacgtaggggtttcctaaaagacctgagagttcttgccgtctctctcgcggtgtggccgcctggtggctctgggccgagtacattgtcttcaagcccgcagggtcgagttggcactgcccatcaccctggctgttggcggtggcccgtgggaggatgatgtcgtaaagctcttcaggacggaactttgtgcatcagggccatctcaagtgggctggtacacactggtcagcagctgcccattgtacccgctgtatggtgacaccggcctcgttagcgtgcaaccggctcatccatggaaaaggccttgttctccacgaacatgctctgacccttctgctctttcaggatggtctcatagcccacggccccgggtggggtacatgtccccctggtagctttgctctgggctggacttggtcacctgggagacctcggggatgacgtagaagaggacgaaggcccaggcattggcggcgagggcgatggccagcgtggggtcatcccaggtgggactgttgtgctgcttgttgccgtaagtatacatgacgatccacaccacccatatggcaacggaggtggctgtggtgaggagcacaaagaccccatgcttacgccagcgcttgtagcggccacacagggcgggccaggcccccaggaaggcacccagcagcagcagcatgacgtagatgagtgccatgacaaagtccatgttggcgacggcacagggggaggccacggcccagcctgcgctgctgttgccctgagggccgccctcgccactgccccgaaccagggtgatgatcagccactctgtattgatgatgacctctaccagggtcagcagcagagccacagtgaagatcacccagccccggggcccgtggttcttccgggccaggaagttgagggcaaagacgtgagccgccagacaagagaagcagatggcgaacagaaccccaaagaggaagcgccgagaggcacaggtggagaagtcgggcttcaccacacaggcaaacacgaggcagaagaggcccagggtccccagaaggaagaatacctgggtccccagcaggctccgtttcttggtgtcctgcacaaaggggaggctggccaccaggatgatggtgagcacaaacgtggtgacaatgcccgccccagccacggcctccaggacgatgccccacgccccagagcggtcacacaggttgtagtacagggggttgaggccttggctgcagccgggtgggacatggccctgggcccaggcccctgggaacaggaagagaggcagtcccaggcacatcaccaaggctttgtggaatgccaatctggctcccaggccaggctctggttgggtccctccaggctgagccgactcgtactttccggctggtga

SEQ ID NO: 151338 - DNA, 389 bp, Homo sapiens
actaagacatggaccctgaagaagcactttgttggctatcctactaatagtgactttgagttgaagacagctgagctcccacccttaaaaaatggagagtggcagccaaaagattgaaggaaggtgatacaatgatggggcagcaagtggccaagtaattatttccatttgtcccagtgcttggaaaatatgtctcctctttacctcctgctgggtcctgtctctgtccattgctcctacaatttcttcagcctatgttgttgactcactgtgtgatcttggaatcaacttgggaaattctgtctccttcctaactagctggaaaggagggaaggatgtgaaattgtcattttttcagcttcactttgccatccttacttttaattact

SEQ ID NO: 151339 - DNA, 493 bp, Homo sapiens
  misc_feature (1)...(493): n = a,t,c or g
tggtacggctgcgagaagacgacagaaggggaccctctcttgggacctgtcataagtcggaccccgggcgcccggctgcgcagtcccagccgccttccccaggcagtggaaccttcgggctcctgagcttcaggatggttcgtactaagacatggaccctgaagaagcactttgttggctatcctactaatagtgactttgagttgaagacagctgagctcccacccttaaaaaatggagaggtcctgcttgaagctttgttcctcaccgtggatccctacatgagagttgtggaaagtaaaaatgtagccctaccaaaaggaactattgtactggcttctccaggctggacaacgcactccatttctgatgggaaagatctggaaaagctgctgacagagtggccagacacaataccactgtctttggctctggngacagttggcatgccaggcctggactgcctactttggcctacttgaaannggtggng

SEQ ID NO: 151340 - DNA, 1147 bp, Homo sapiens
atgctactatgccagaaggcaccatctctgaaaacaacctacaatcatcctcctgcggcagattccgctgggactgcattaaacttagagacgactgttaaacaaaccagggaaacacagttggaatacaacaacgtgggcactgacctgtcccccgaacccaaaagcttcaattacccattgctctcatcctcaggtgaccagtttgaaattcagctaaaccagcagctatggtccctcatccccaacaacgatgtgagaaggcttgtttctcatgttatccggaccttgaagacggactgcactgagacccatttgcaactggcctgtgccaagctcatctctaggacaggcctcctaatgaagcttctcagtgagcagcaagaattgagaactgtatcaatgacagcatggaagcccagaatgaacagaaagagcagaagtcgaatgagacagtctcactttgccagccatgctggaaggtggtggcacaatcatagcacactgcagccacaatctcccaagcttcagatggctgaactgagtgaggcaaggagaaggagcttcaggatggttcgtactaagacatggaccctgaagaagcactttgttggctatcctactaatagtgactttgagttgaagacagctgagctcccacccttaaaaaatggaggccttgagtttctaattgcctatggaatgctttattttgtagaggtcctgcttgaagctttgttcctcaccgtggatccctacatgagagtggcagccaaaagattgaaggaaggtgatacaatgatggggcagcaagtggccaaagttgtggaaagtaaaaatgtagccctaccaaaaggaactattgtactggcttctccaggctggacaacgcactccatttctgatgggaaagatctggaaaagctgctgacagagtggccagacacaataccactgtctttggctctggggacagttggcatgccaggccctgactgcctactttggcctacttgaaatctgtggtgtgaagggtggagaaacagtgatggttaatgcagcagctggagctgtgggctcagtcgtggggcagattgcaaagctcaagggctgcaaagttgttggagcagtagggtctgatgaaaag

SEQ ID NO: 151341 - DNA, 1074 bp, Homo sapiens
atacgcgcacacacacacacaaacgcactcagatttcccggaccctggttttcctcctgtgaccctttcggggccgggctctcaccctaaagaagcagccccgccctggggtggccccaccctctcttgggacctgtcataagtcggaccccgggcgcccggctgcgcagtcccagccgccttccccaggcagtggaaccttcgggctcctgagcttcaggatgggttcgtactaagacatggaccctgaagaagcactttgttggctatcctactaatagtgactttgagttgaagacatctgagctcccacccttaaaaaatggagaggtcctgcttgaagctttgttcctcaccgtggatccctacatgagagtggcagccaaaagattgaaggaaggtgatacaatgatggggcagccagtggcccaagtaattatttccatttgtccccagtgcttggaaaatatgtctcctctttacctcctgctgggtcctgtctctgtccattgctcctacaatttgttcagcctatgttgttgactcactgtgtgatcttggaatcaacttgggaaattctgtctccttcctaactagctggaaaggagggaaggatgtgaaattgtcattttttcagcttcactttgccatccgggcttttaataactaaaaaaaaataagtatttgcccaggtcatgatttattgcgggatctggccagcagcccacaatgcaacagggttctctctttgttcccaggtggatcggcaggttgaaaaataatagacccacccaatatagggaaagctgggtccaggggcgtaaccgccttttggatccgtggggccaccaaagcactgaatatacccccatttattattaaggttaaagaaggcgggggaagggtaatgagggattttagggcatttgattattaggggagaaggccccatggggatgaaatatatctttaaccaacatctggatccaaaaatacatgtttcacagataagaattttcccatataaagggggcctaataaaatttttttaaaaggccttaaaaataaaaaaaa

SEQ ID NO: 151342 - DNA, 684 bp, Homo sapiens
gtgtctttgctttcctgaccacagcctctctgcccaagcctgtgtcctctccttccgttctggtctccttcatctcacggttccccagcctccaagctcttgaagagccgtgtcacactgagagcttccctgacctggtctcatttccctctgacagtgacctccagtgtgctgggttgaccaatgccaagcctctttttaaaccaaagtagttcaccatgggttgggatgatgtcaacaagcagtattcatgttaaaaagcaatgagggactccttccctggtgcacaattttcttcacttgtgatctctaaactgttttcaaattggaagactgggaagcattgctacagccccagccagtctcagccactgctcagcccagtggtggaaagctgagcacacagcgggtgcttactgcccccacttgccgtctgctctccagtagatcaagggacctcagacagggatctgagaagtggcaggttccaataaactgatcaacagaatgaagtcactctgggaagccatgaggtgactttacagcccaagcatgtaaatatacacacacacgatactatatatcctcttttcgggtttttttttgagacacagtctcgctctctcagccaacctggactgcagtggcgcaatcacggcccattgcaacctccgcctcctgagg

SEQ ID NO: 151343 - DNA, 1914 bp, Homo sapiens; identical to SEQ ID NO: 130466

SEQ ID NO: 151344 - DNA, 1382 bp, Homo sapiens; identical to SEQ ID NO: 130467

SEQ ID NO: 151345 - DNA, 1194 bp, Homo sapiens; identical to SEQ ID NO: 130468

SEQ ID NO: 151346 - DNA, 359 bp, Homo sapiens
ggcacgagggacccaggagtctgggtgcacagcctccttctctctgagagtcaagagtctgatcagcagcctcttcctcctccaggacccagaagccctgagcttatccccatggagctctgccggtccctggccctgctggggggctccctgggcctgatgacctggctgattgcttgcggcaccgatcacctgccttggacctcgttgtctctcgtgcgcctatgatttgtggattgtaggttgatcggctcggtatctacctcatcctttcttctactgttgcgctgcttggcccgtccagcttcattcgcgcgccgctccgctgatctccttcttgcgttgatttgggggatggg

SEQ ID NO: 151347 - DNA, 392 bp, Homo sapiens
tgcacgagcgggactatgccgctcgtgtcagtctttatggaggcagatgaatcggagaaggccgcaagagagcaagagccgctggaagggacagaacagacactagatgcggaggaggagcaggaggaatccgaagaagcggcctgtggcagcaagaaacgggtagtgccaggtattgtgtacctgggccatatcccgccgcgcttccggcccctgcacgttcgcaaccttctcagcgcctatggcgaagtcggacgcgtcatctttcatgctgaagaccggttcctgagacgcatcaaaaatgcatatagtatctgccgtagaataatagcgttctacacctatgacttcacaaatcaattatatatttatattatatattttattaaatc

SEQ ID NO: 151348 - DNA, 388 bp, Homo sapiens
  misc_feature (1)...(388): n = a,t,c or g
ggcacgnnnnnnnnnnnnnnnnnnnnnnnnnnnnnnnnnnnnnnnnnnnnnnnnnnnnnnnnnnnnnnnnnnnnnnnnnnnnnnnnnnnnnnnnnnnnnnnnnnnnnnnnnnnnnnnnnnnnnnnnnnnnnnnnnnnnnnnnnnnnnnnnnnnnnncccttaatgcatattctcaaatatactatggtatatctggtctgtcctctgctttcttcttctcataaccttccttttactcctgtcaaactgctctcctactcgttattctatccctactttcacttctcccgtttccttcgtctctgctgccttcgcttatttctctctttcttctactcttcttccctcttgcactcactttattctttcccctttcttctctcccccc

SEQ ID NO: 151349 - DNA, 593 bp, Homo sapiens
  misc_feature (1)...(593): n = a,t,c or g
ttttttttttttttttgacagcaagggatgtgcgctggctgctttatttaagggcttgtgattgacagctgtccccatcccagcccttgcttcctcttacaaaagcaaactgaacatgaaacgggcttcctggttaccatggggagggggggcggcttcccttgtcagggcccagcccagggacctggggaacggcggcttttgaatccccggccacgggcactagaaggtggagaaggagggcggggaagtccagttgagatgggcacggtgctggtgaggaggtggnaanaaaagggtcctgttccagccttctagtgggcttccccttgtccaaggatgtcaagaaaacagtcccccaattccgccggggggaagccagaagccccaaggttgggggggccagggggctgcaagggaacacagcaaaggcttttcggagccaagtgagatcagttcaggcccctcaggcccaagaacccgacaccaccgcgtacctgtgagcacacactcacggccaccccagtgacacgtgcagccacacacacccacactcactcacacccacacccacacgcacacccacgtcgagc

SEQ ID NO: 151350 - DNA, 1550 bp, Homo sapiens
atggcaactccttatgtcccagttcctatgcccataggaaactctgcttccagttttacaacaaacagaaatcaaagaagttcttcttttggcagtgtctcaacaagctcaaattcttctaagggccagttagaagactcaaatatgggtaattttaaacagacaagtgttcctgatcaaatggataatacttcatctgtctgtagcagtcccctcattaggactaaatttacaggtacagcttcttccattgagtattctactagaccaagagacactgaagaacaaaatccggaaacagtgaattgggaagatagaccatctacacctactatactgggttatgaagtgatggaagaaagagctaaatttactgtatataaaatactagtaaagaaaaccccagaagaaagctgggtagttttcagaagatacactgacttctctaggcttaatgacaaattaaaagagatgtttccaggttttcgactacgcacttcctccaaaacgctggtttaaagataattacaatgctgactttttagaagacagacaattaggattacaagcgtttcttcaaaatttagtagctcacaaggacattgctaactgccttgcagtgagagaatttctttgtttggatgatccaccgggtccatttgatagcctagaagaaagcagggcattctgtgaaactttagaagagacaaactaccgctttacagaaagaactacttggaaaaacaaaaggaggtggattcacttaaagaaactgctcagtgagaagcaacttcatatagacactttagagaacagaatcagaacattgtctttagaacctgaagaatcactggatgtgtcagaaacagaaggtgaacagatcctaaaggtggagtcctctgcacttgaggttgatcaagatgtcctggatgaagaatctagagctgataataaaccatgcttaagttttagtgaacctgaaaatgctgtatcagagatagaagtagcagaagtggcatatgatgctgaagaagactaatgtatcacaagcagttccctccatttagactattcaaaaatttagaagagtggcaaatactattttaaaagaagaaccaagaactgtaaaacatatagaaaagagcaagaatgcacatgtataaagtttacataaagaagtttttttaagttattgagatagagaaatatattcactgctgcttttaattgtgttttatccaattgcatttaatacactaaaaaaaatcttgttggaattctgttatcaaggcccacattcttaaatactgtgcataaattattatggtgttttgcctatatattgctccaaactactgtgtatatatgtatgtgtgttaaatcaccaattatattaatcaaatggaaattaattgcatgttactatctgggtgatatattcttctttatatctctgacatgacatattttcattaatagtttaaatcagtgaccatcataataaagataaaatttagttgagtttttaaaaaaaaaaaaaaaaaaaaaag

SEQ ID NO: 151351 - DNA, 345 bp, Homo sapiens
gtctgtagtaggctggaccaaatcctaaattattctaggttcctctttccaactttatttcacaaaattactaaaaatgaaagcttctgtttctgaagccctattagctgaagctagataaattttaagaggcaagtcttgtgcctgatgtatgcctcatacaaaacgttcaccaaactgcttaatgacataaccagagacattcaaactgcaagccagtataagaacttgacagcttcacactctagacagcttttctcaagatgtcaaaataagattccacatcataatgagactctttcctctcttaatgcctatctttttcacttggcaggataatgttca

SEQ ID NO: 151352 - DNA, 1389 bp, Homo sapiens; identical to SEQ ID NO: 125531

SEQ ID NO: 151353 - DNA, 1257 bp, Homo sapiens; identical to SEQ ID NO: 125428

SEQ ID NO: 151354 - DNA, 695 bp, Homo sapiens; identical to SEQ ID NO: 151072

SEQ ID NO: 151355 - DNA, 895 bp, Homo sapiens; identical to SEQ ID NO: 150525
  misc_feature (1)...(895): n = a,t,c or g

SEQ ID NO: 151356 - DNA, 1838 bp, Homo sapiens
  misc_feature (1)...(1838): n = a,t,c or g
gcttttttttttttttcgcaacgggtttgccgccagaacacacggtgtctgtgaaaaactaacccctaaaagccaaaatgggaaaggaaaagactcatattcaacattgtcgtcattggacacgtagataacgggcaagtccaccactacttggccatctgatctataaatgcggtggcatcgacacaaagaaccattgaaaaatttgagaaaggaggctgctgagatgggaaagggctccttcaagtatgcctgagtcttggataaactgaaagctgagcgtgaacgtggtatcaccattggatatctccttgtgggaaatttgagacccagcaagtactatgttgactaatcattgattgccccagggccacagagacttttattcaaaaacatgatttacagggaccatctcaaggcttgacntggtttggggggccccctttttgggggggttntcccctgattgtttgctgctggtgtttggtggaatttgaaagctggtatctcccaagaatggggcagaacccgagagcatgcccttttgggcttacacactggggtgtggaaacaaactaaattgttcggtgttaacaaaaattggatttccacttgaggccaccctacagcccagaagaagatattgaaggaaattgttaagggaaagtcagcacttacattaaggaaaattggctacaaccccgacacaagtagcattttgtgcccaatttctggttgggaatggtgacaacatgcctggagccaagtgcctaacatgccttggtttcaaggggatggaaaagtcacccgtaaggatggcaatgccagtggaaccacgctgcttgaggctctggactgcatcctaccaccaactcgtccaactgacaagcccttgggcctgcctctccaggatgtctacaaaattggtggtattggtactgttcctgttggccgagtggagactggtgttctcaaacccggtatggtggtcacctttggtccagtcaacgttacaacggaagtaaaatctgtcgaaatgcaccatgaagctttgggtgaagctcttcctggggacaatgtgggcttcaatgtcaagaatgtgtctgtcaaggatgttcgtcgtggcaacgttgctggtgacagcaaaaatgacccaccaatggaagcagctggcttccctgctcaggtgattatcctgaaccatccaggccaaataagcgccggctatgcccctgtattggattgccacacggctcacattgcatgcaagtttgctgagctgaaggaaaagattgatcgccgttctggtaaaaagctggaagatggccctaaattcttgaagtctggtgatgctgccattgttgatatggttcctggcaagcccatgtgtgttgagagcttctcagactatccacctttgggctgctttgctgttcgtgatatgagacagacagttgcggtgggtgtcatcaaagcagtggacaagaaggctgctggagctggcaaggtcaccaagtctgcccagaaagctcagaaggctaaatgaatattatccctaatacctgccacccaactcttaatcagtggtggaagaacggtctcagaactgtttgtttcaattggccatttaagtttagtagtaaaagactggttaatgataacaatgcatcgtaaaaccttcagaaggaaaggagaatgttttgtggaccactttggttttcttttttgcgtgtggcagttttaagttattagtttttaaaatcagtactttttaatggaaacaacttgaccaaaaatttgtcacagaattttgagacccattaaaaaagttaaatgag

SEQ ID NO: 151357 - DNA, 425 bp, Homo sapiens
agtgaccaaggagctcttacagatggacctgtacgcgctgctaggcattgaggagaaggcagcggacaaagaggtaaagaaggcgtataggcagaaggccctctcctgccacccagacaaaaatccagataatcccagagcagctgaactcttccaccagctttctcaggccttggaggtgctgaccgatgctgcagccacggctgcatacgacaaggtcatgtacgcctctatgcatgtcacataattgactcagattacttgcgagtattggtataatgttctcctatacttggcggcttcgaatctcatatcttcactctactactattctaatagctcttactcttctcgtatactattaccttttatattcatatactcgtatcatcacctgcacgttgctcatttaatcctatctctct

SEQ ID NO: 151358 - DNA, 420 bp, Homo sapiens
tgaaaatttgatgctgaccctttcgttcttccatagtgggttataaattttagcagtcagtacaaactttttcctttaagttttgttttcttgatggactgtattcaaaataaatacctgaacaaataccaactatataacatgaagccataaaacttggtctttatatataaataaagtttatcttggggtcagatgtctgtgctgttttctatattatcttatatccaatagtatggtctttttcctttcagttttgtatgcttttcttgtaatcgagccttggaagagacagagccactgagcccaaaacctagctttgtggtcggctgtggtggctcatgcctgtaatcccagcactttgggaggctaaggcgggaggattgcttaaactcaggagtatgagaccttgtctctatt

SEQ ID NO: 151359 - DNA, 631 bp, Homo sapiens
ctggggcaaacgacacaagtcagcatttagtttcttgctttaggaagcggaagactaatgaccgaagcttcaagactttgacatgtgtgaaaacatgaaatgacccttggcgtcttattgttcttgctggtgtggtatgttcacggctgaaaagatggtcagaaggggaaaggaggaagtgagaagaaagaaacagggaaatgacagagtgttgctcagttacccaggctggagtgcaatggcatgatcttggctcactgcagcctccacctcctggggttcaagcggttctcgtgcctcagtctcccaagtagctgggattacagcaggctgagggaattaccaagggagggcagggaggtgggagcaaaacacaccaagcctgggtgcccaatcatttgacaatatttatgggaacttgacttcagccgcaaggaagacagcttcgactccttgtgatttcatccctaaccaatcagcactcctggctcactggcttcccccaacccaccaaattgtccttaaaaactctgctctccaaacgctgggggagactgatttgagtaataataaaaccctggtctcctgcaaaaaaaaaaaaaaaaaaaaaaaaaaaaaaaaaaaaaaaaaa

SEQ ID NO: 151360 - DNA, 425 bp, Homo sapiens
tttcgtggaaagagctgctggtggtcgggagagcggcggcatcgagaggcgagccagcggcgacgaatgaagaactgtttcacttactgcaggattttcagcttcagcaagcaggttctcatggagaactgttattgaagagagatccatttggtgggatataattaaaaaaaatgaatcaaaagaaaatctctaaatgcagattccagaaaaattacagcacatctcagtgaatttgcaagtggatcatccttccttgtgggttagcaggcagttataagattgcaaaatgggtctccggattcactttgttgttgacccacatggttggtgctgcatgggtttgattgtctttgtttggttatacaatattgttttaattcccaaaaatgtcctctttcctcactatgaagaaggacatattc

SEQ ID NO: 151361 - DNA, 1169 bp, Homo sapiens
agactttccgggtcgacgatttcgaggcggcggcgccggaggaggcggaggtggcgcggcaggatgaggtgaaagagctgctggtggtcggcagagcggcggcagcgagaggcgagccagcggcgacgaatgaagaactttttcacttactgcaggattttcagcttcagcaagcagttagcattttggaggcgctgctttgccagtcaatttctcatttaagcgtgacagcaactgtgttctcatggagaactgttattgaagagagatccatttggtgggatataattaataggaatgaaccagaagaaaatctctaaatgcagattccagaagaattacagcacatctcagtgaatttgctagtggatcatccttccttgtgggttagcaggcagctataagattgcagaatgggtctccggattcactttgttgttgacccacatggttggtgctgcatgggtttgattgtctttgtttggttatacaatattgttttaattcccaaaattgtcctctttcctcactatgaagaaggacatattccaggcatattaataataatattctatggcatttccatattctgtctggttgccttagtgagggcctccataactgatccaggaagactccctgagaaccccaagatcccacatggagaaagggagttctgggaattatgtaacaagtgtaatttgatgagaccaaagcgttcccatcactgcagccgctgcggccactgtgtgaggagaatggatcatcactgtccatggattaacaattgtgttggtgaagataatcattggctctttctgcagttgtgtttctacactgaacttcttagctgtacgcactgatgttttctttctgccactattactattttcttccactaaaaaagcgtaatttggacctctttgtttttagacatgaattggccataatgagactagcagcctttatgggcattactatgttagttggaataactggactcttttacactcaactaattggcatcatcacaccatgtgacatgcctgctcctactctgccttccatcatgaataaaagcttcttgaggcctcaccagaagccaagcagatgctggtgccatgcttatacagcctgcagagccatgagccaaataaaccttcttcttt

SEQ ID NO: 151362 - DNA, 412 bp, Homo sapiens
cccacgcgtccgcccacgcgtccgcttgttaattctacttttggaaaatgtcagtggctatcgctttccggtaattttccagcttgatgcatcccctggccataagatacttccagactgtatgatatattctatcactgtcagccttatgttccctgtggttgactatataagcacgctttatggtttgggattgcatttaggaatgtccctacgtattgtctatgctcttattgttctgaatctatgtagtgtttcttactcaacactgtctttctattatcgatccatatcctattatactcttacgatcgactatatatatattactatattgtcagtctggatatggttcttcttcttctttttttatcttgatttgttcctgtttcacttttctcttacctcttcc

SEQ ID NO: 151363 - DNA, 571 bp, Homo sapiens; identical to SEQ ID NO: 145311

SEQ ID NO: 151364 - DNA, 1748 bp, Homo sapiens
tttttttttttttttttttttttttttcaacaaacaagtatttattcgagcgcctactatgtgccaggcactcgttctagacccccccccagaagaaaaaacaaaaaacaagatagaggcagcaaacacaaattctgagggagaggaaagggggcagttgagtaagacggctaagggaactgagaagcctgaggtgatgggggctctgccttaggcctcctcttcggcctcctcaccgaaatacatcctcctcttctgcggtggcatcctggtaatggtgataatcacagaagaaggggtgtttatgttggccccaacctcggtgaaacccatctcgtccatgccctcggcctgtgtaccagtggaggaaggccttccgggcggaaacatggcagtggaacttgctccgaagatgcgctttgaagagctcctgggatgggctgtgctattggccaatgaagggtgactgccatcttgagggccacgaggtgggaatgtcacagacggctgtctttgacattgtttgggggatccattcccacaaagtagctgctgtttcttgttcttgcacgttaagcatctgctcaatggacctccttcatgggacatcccgaccacgggaagacagcaagccacggtgaggttatcggcgcgtgggcggggtcacaggcagcccatcatgttctttggatcgaaagaccttgctgggtgagttccggcactgtgagagctcgatactgctggctttccacggctggggagaagggcaaagccaggcattaaaaaaatggagacgtgggaaggggaccatgttgactgccaacttgcggaggtcagcattgagctggccagggaaacggaggcaggtggtgacaccactccatggtgcctgagacaaggtggttcagatccccgtaggttggtgtggtcagcctcagagtgcggaagcagattatcatagagggcctcgttgtcaatgcaataggtctcatcagtattctctaccaactgatggacggagagggtggcattgtagggctcgaccacggtgtccagacatttgggggaagggcaccacactgaaggttattcatgatgcgaatcagggtattctttctcgaatccttgctgataaaggagagtgcccattccagagcctgtgcccccgccccagtgagtgggtcagctggaagccctgcaggcagtcacagctctctgcctccttccgtaccacatccaggacaggaatcaaccaagctcggcgcccttctgtgctagtggccttttggcccaagttgttacctgcccccagacttgaccaaatacaaagttgtctggtctaaagatctggcccaaaaggacctgagcggaacagagtccatggtcccaggttctagatccacccaggatggcacggaggaacatatttgccaccttgtggcttcattgtagtacacaggagatgcgggtccagcttgcaggtcgcttgtccccgtgggtagggtgccggtggggtcgataccaatgttcatcactggatcacctcccagaacttggcaccgatctggttgccacactgaccagcctggatgtgcacgatttccctcatggttaaaatttaattttttttgctcgcctccaaggtatgtatggggcaagaaaataagtaattttttttctccgcagggtcgccaggctggaaggttggaattgcgccccagatggctggagcagcgaggtgcaaacgc

SEQ ID NO: 151365 - DNA, 451 bp, Homo sapiens
aatcaaatgacctccaaacaatacactggaaattccaacatgcctggggggctcccaaggcaagcttacacctttaaaacatcacagctggagcacaagtcacaaatgtaccaagttgaaatgaatcaagggcagtcccaaggtacagtggaccaacatctccagttccaaaaaccctcacaccaggtgcacttctccaaaacagaccatttaccaaaagctcatgtgcagtcactgtgtggcactagatttcattttcaacaaagagcagattcccaaactgaaaaacttatgtccccagtgttgaaacagcacttgaatcaacaggcttcagagactgagccattttcaaactcacaccttttgcaacataagcctcataaacaggcagcacaaacacaaccattccagagttcacatcttcctcaaaaccaacaacagcagcaaatat

SEQ ID NO: 151366 - DNA, 654 bp, Homo sapiens; identical to SEQ ID NO: 136496

SEQ ID NO: 151367 - DNA, 1907 bp, Homo sapiens
ccgtaacatatgttgaattgtgtgaccttgcctcaccaactgcacttctgattatgagaactgtgttggatttgattgtagaagacttgcaaagcacttcagaagataaagaaaaacagtatactagccaaaccaccaggttgcttgctcttcttgatgctctggcttcacacaaagcttgtaaattagctattttgcatctaattaatggaactattaaaggtgatgaaagatatgcagagatattccaggatcttttagctttggtgcggtctcctggagacagtgttattcgccaacagtgtgttgaatatgtcacatccattttgcagtctctctgtgatcaggacattgcacttatcttaccaagctcttctgaaggttctatttctgaactggagcagctctccaattctctaccaaataaagaattgatgacctcaatctgtgactgtctgttggctacgctagctaactctgagagcagttacaactgtttactgacatgtgtcagaacaatgatgtttcttgcagagcatgattatggattatttcatttaaaaagttctttaaggaaaaacagtagtgctctgcatagtttactgaaacgagtggtcagcacatttagtaaggacacaggagagcttgcatcttcatttttagaatttatgagacaaattcttaactctgacacaattggatgctgtggagatgataatggtctcatggaagtagagggagctcatacatcacggacgatgagtattaatgctgcagagttaaaacagcttctacaaagcaaagaagaaagtccagaaaatttgttccttgaactagagaagcttgttttggaacattcaaaagatgatgacaatctggattctttgttggacagtgtagttggacttaagcagatgctggagtcatcaggtgaccctttacctctcagtgaccaggatgtagaaccagtactttcagctccagaatctcttcagaatctgtttaacaataggactgcctatgtgcttgctgatgtcatggatgatcagttgaaatctatgtggttcactccatttcaggctgaagagatagatacagatctggatttggtaaaggttgacttaattgaactctctgaaaaatgctgtagtgactttgatttgcactcagaattagagcgctcatttttgtcagaaccatcatctccaggaagaaccaagactactaaaggattcaaacttgggaagcacaagcatgagacctttataacgtcaagtggaaaatctgaatacattgaacctgccaaaagagctcatgttgtgccaccaccaagaggaaggggcaggggaggatttggacagggtatacgacctcatgatatttttcgtcagagaaaacagaacacaagtagaccaccatctatgcatgtggatgactttgttgctgctgaaagtaaagaagtggttcctcaagatggaatacctccaccaaaacggccactcaaagtatcacagaagatttcttcccgtggtgggttttcaggcaatagaggaggacggggtgctttccacagtcagaataggtttttcacaccacctgcttcaaaaggaaactacagtcgtcgggaaggaacaagaggctccagttggagtgctcagaatactcctcgaggaaattacaatgaaagtcgtggaggccagagcaattttaacagaggccctcttccaccattacgaccccttagttctacaggttaccgcccaagtcctcgggaccgtgcttctagaggtcgtgggggacttggaccttcctgggctagtgcaaatagcggcagtggaggctcaagaggaaagtttgttagtggaggcagtggtagaggtcgtcatgtacgctcctttacacgataa

SEQ ID NO: 151368 - DNA, 651 bp, Homo sapiens; identical to SEQ ID NO: 136498

SEQ ID NO: 151369 - DNA, 2115 bp, Homo sapiens
cgtcagccaacgcgcccccgtacgtgtgtctgaatgttgatgcccaccttcttttgttgaaggtcaccagaaagatctgaagggaggtgttgccgttattcagcttttttctgctgaaggaatggacacgtttattcgagttctgcaaaaattgaacagtattctgactcagccttggaggctccatgtcaacatggggactacccttcacagagttactactatttcaatggctcgctgcacactcactcttcttaaaactatgttaacggaactcctgagaggtggatcctttgagtttaaggacatgcgtgttccttcagcgcttgttactttacatatgctcctgtgctctatccccctctcaggccgtttgaatagtgatgaacagaaaattcagaatgatatcattgatattttactgacttttacacaaggagttaatgaaaaactcacaatctcagaagagactctggccaataatacttggtctttaatgttaaaagaagttctttcttcaatcttgaaggttcctgaaggatttttttctggactcatactcctttcagagctgctgcctcttccattgcccatgcaaacaactcaggttattgagccacatgatatatcagggggcactcaacaccccgaaaattgtggagcatgcaccttcatgttcaagcaaagttgctccaagaaatagttcgctctttctctggcacaacctgccagcccattcaacatatgttacggcgtatttgtgttcaattgtgtgaccttgcctcaccaactgcacttctgattatgagaactgtgttggatttgattgtagaagacttgcaaagcacttcagaagataaagaaaaacagtatactagccaaaccaccaggttgcttgctcttcttgatgctctggcttcacacaaagcttgtaaattagctattttgcatctaattaatggaactattaaaggtgatgaaagatatgcagagatattccaggatcttttagctttggtgcggtctcctggagacagtgttattcgccaacagtgtgttgaatatgtcacatccattttgcagtctctctgtgatcagcaaagttctcatatagatgtggttcgttttccatgtgtggtttatatcaatgaagtccgagtcatacccccaggagtaagagcccatagcagtctgccagacaatagagcatatggatatcttcacagtcatcacttcttggagttggttaccttgcttctgtcaattccagtaacaagtgctcaccctggtgtgctgcaagccacaaaagatgttttgaagtttcttgcacagtcacagaagggtcttcttttttttatgtcggaatatgaagcaacaaatttattgatccgagctctgtgtcacttttatgatcaagatgaggaggaaggtctccaatctgatggtgttattgatgatgcatttgccttgtggctacaggactcaacacagacattgcaatgtattacagaactgttcagccattttcagcgttgtacagccagtgaagaaacagaccattcagatctcttgggaaccctgcacaatctttatttgattacttttaatcctgtgggaagatcagctgttggccatgtttttagtctggagaaaaatctccaaagtcttattactctaatggagtactattccaaagaagccttgggtgattccaaatctaagaagtcagtagcttataattacgcatgcatacttattttggtggtggttcagtcttccagtgatgttcaaatgctagaacaacatgcagcatctctcttgaagctttgtaaagcagatgaaaataatgctaaattgcaagaacttggcaagtggcttgaacctctgaaaaaccttagatttgaaattaactgcatcccaaacttaattgagtatgttaagcagaatatcgataacttgatgaccccagaaggagttggccttaccactgccttacgtgttctctgtaatgttgcatgcccaccacctcctgttgaaggtcaacagaaagatctgaaatggaatcttgccgttattcagcttttttctgctgaaggaatggacacgtttattcga

SEQ ID NO: 151370 - DNA, 477 bp, Homo sapiens
tatcgtgtcgccggaagttcggtgggctccaggcgtcgcgatggaggagagcgggtacgagtcggtgctctgtgtcaagcctgacgtccacgtctaccgcatccctccgcgggctaccaaccgtggctacagggctgcggagtggcagctggaccagccatcatggagtggccggctgaggatcactgcaaagggacagatggcctacatcaagctggaggacaggacgtcaggggagctctttgctcaggccccggtggatcagtttcctggcacagctgtggagagtgtgacggattccagcaggtactttcgtgatccgcatcgaagatggaaatgggcgacgggcgtttatttgaatttggcttcggggaccgaggtgatgcctttgacctcaatgttgcattgcaggaccatttcaagtgggtgaaacagcagtgtgaatttgcaaaacaagcccagaacccagaccaaggc

SEQ ID NO: 151371 - DNA, 2188 bp, Homo sapiens
  misc_feature (1)...(2188): n = a,t,c or g
tttttttttttttttttttgacagaagtaaaaatatttattttatcttaaaaatctggtcccgcaaaaaaggccaacactttttttcagttcacggtcttgacctttcaaagaagaaatctttcaactgagaggtgagttaataaaaggaatgttcagaggtgctttccagatttcttataaaccagtaaaccaagcaaccctgggacttctagtttactgagctccttcttctagccgattcacagttcctgaaggagaaaaagaagttgtttgcagataagggcactttaggaaaccaccaaagaggaaaacccaagtctgccgggggctggcactgtggaacatgtgaggccgagagggcccaccaggcaggacagagtgccaacttccccacagcttccatgacaacaagcaatccacctttcctggccccaacattgtttccgtttgggcttccagcacccgccttggctctgtgttggcctacctggggctaggaatacatgggaaacccagacaactggccagagatgaacactggctggcctgaagctcatgggcagctgcccacacgtgaggatacccttcaggaggcncccagctggggcaacgcccgagggaaccagttcccttttgccaaagatgaagttagtgcgggatccagcacatttagcaaaagcaaaaatatttaaacatttttaaaagctgcctaatccttccaattttccctcctggatttgtagctcaagctgcagcctctaaacctgctaaaaatcaggaaggaaaacccctcctctgggaggggcagatggactgaagtggctacagcccagtgtgggtacggaaagcctcccggctgaaactgtgatcatgtgaacacctgcaaaacccctgggaaaagggctgaactgaaaccctggcagcaaaactcaaccctccttccttttgccttggggggccttgtgtttaatacaggtccattgcgatggaaagaagtctcagagtctctctcaacatcaaagaggacagatgggggacagggatccctggagcttttcttctcctgtgttctggttgccatacttgaatccccaggaaaacagtgtgaacacggtgcccaatttactgcccaaacatgccccggtttgtcaacagagcccagacaaggaggagaaggaagagaattcatgtccccaaacacaggtccatgctgaaggaagggtcttacgtgcctgccttgcctttggccccagatgaagggaagcgccttcccagaaagtncacatgaggaaaaaccgtgctcaggtcagaactggacccagcctgtgcctggctgggtctggctggaagttgatcctgtagatttggtaaagtctccccagatgtcagcagtggcaggattgggctgtggccagggtacaggagcacctcctgaactgggagcaactgctggctggacgagggatccccccacagccaactgctccccagggggagggatcagggtggaggttttcccccctgggggagggggaagcaggctcagccctcctgtgctggcaggccggactcggggattcccagctgctccttccttcttcttcatgtatgcgcatgttgagattgatggtctggccctccttgaagcccaggtccagtttagggccttggtctgggttctgggcatgttttgcaagttcacactgctgtttcacccacttgaaatggtcctgcaatgcaacattgaagtcaaaggcatcacctcggtccccgaagccaattccaataaacgcccgtcgcccatttccatcttcgatgcggatcacgaagtacctgctggaatccgtcacactctccacagctgtgccaggaaactgatccaccggggcctgagcaaagagctccctatcgtcgccgcacttatgactgtcttctttatcatgcaactcgtaggacaggtgccggcagcgctctgggtcattttcggcgaggaccgctttcgctggagcgcgacgatgatcggcctgtcgcttgcggtattcggaatcttgcacgccctcgctcaagccttcgtcactggtcccgccaccaaacgtttcggcgagaagcaggccattatcgccggcatggcggccgacgcgctgggctacgtcttgctggcgttcgcgactgatatggctattttt

SEQ ID NO: 151372 - DNA, 2705 bp, Homo sapiens
tttcgtgcggcggccacctggcccggaccaccgtgtgcccggagggccgtcaacaaagtggtgtacgatgaccacgagagcgaggaggaggaggaagaggaggacatggtctccgaggaggaggaggaggaggacggcgacgccgaggagacccaggattctgaggacgacgaggaggatgagatggaagaggacgacgatgactccgattatccggaggagatggaagacgacgacgacgacgccagttactgcacggaaagcagcttcaggagccatagtacctacagcagcactccaggtaggcgaaaaccaagagtacatcggcctcgttctcctatattggaagaaaaagacatcccgccccttgaatttcccaagtcctctgaggatttaatggtgcctaatgagcatataatgaatgtcattgccatttacgaggtactgcggaactttggcactgttttgagattatctccttttcgctttgaggacttttgtgcagctctggtgagccaagagcagtgcacactcatggcagagatgcatgttgtgcttttgaaagcagttctgcgtgaagaagacacttccaatactacctttggacctgctgatctgaaagatagcgttaattccacactgtatttcatagatgggatgacgtggccagaggtgctgcgggtgtactgtgagagtgataaggagtaccatcacgttcttccttaccaagaggcagaggactacccatatggaccagtagagaacaagatcaaagttctacagtttctagtcgatcagtttcttacaacaaatattgctcgagaggaattgatgtctgaaggggtgatacagtatgatgaccattgtagggtttgtcacaaacttggggatttgctttgctgtgagacatgttcagcagtataccatttggaatgtgtgaagccacctcttgaggaggtgccagaggacgagtggcagtgtgaagtctgtgtagcacacaaggtgcctggtgtgactgactgtgttgctgaaatccaaaaaaataaaccatatattcgacatgaacctattggatatgatagaagtcggaggaaatactggttcttgaaccgaagactcataatagaagaagatacagaaaatgaaaatgaaaagaaaatttggtattacagcacaaaggtccaacttgcagaattaattgactgtctagacaaagattattgggaagcagaactctgcaaaattctagaagaaatgcgtgaagaaatccaccgacacatggacataactgaagacctgaccaataaggctcggggcagtaacaaatcctttctggcggcagctaatgaagaaattttggaatccataagagccaaaaagggagacattgataatgttaaaagcccagaagaaacagaaaaagacaagaatgagactgagaatgactctaaagatgctgagaaaaacagagaagaatttgaagaccagtcccttgaaaaagacagtgacgacaaaacaccagatgatgaccctgagcaaggaaaatctgaggagccaacagaagttggggataaaggtaactctgtgtcagcaaatcttggcgacaacacaacaaatgcaacttcagaagagactagtccctctgaagggaggagccctgtggggtgtctctcagaaacccccgatagcagcaacatggcagagaagaaggtggcatctgagctcccccaggatgtgccagaagaacctaacaagacatgtgagagcagtaacactagtgctaccactacctccatccagcctaatctggaaaacagtaacagcagcagtgaactaaattcttcccagagtgaatctgctaaggcagctgatgatcctgaaaatggagaaagagaatctcatacacctgtctctattcaggaagagatagtaggtgatttcacatcggagaagtccaccggggagctaagtgaatctcctggagctggaaaaggagcatctggctcaactcgaatcatcaccagattgcggaatccagatagcaaacttagtcagctgaagagccagcaggtggcagccgctgcacatgaagcaaataaattatttaaggagggcaaagaggtactggtagttaactctcaaggagaaatttcacggttgagcaccaaaaaggaagtgatcatgaaaggaaatatcaacaattattttaaattgggtcaagaagggaagtatcgcgtctaccacaatcaatactccaccaattcatttgctttgaataagcaccagcacagagaagaccatgataagagaaggcatcttgcacataagttctgtctgactccagcaggagagttcaaatggaacggttctgtccatgggtccaaagttcttaccatatctactctgagactgactatcacccaattagaaacaacatcccttcatccttccttcatcccaactgggcatcacatagggcaaattggatcaaggcagttcagatgtgtagcaaacccagagaatttgcattggctttagccattttggagtgtgcagttaaaccagttgtgatgctaccaatatggcgagaatctttaggacataccaggttacaccggatgacatcaattgaaagagaagaaaaggagaaagtcaaaaaaaaaaaaaaaaaagagaagaaacaggccggaattccagctgagcgc

SEQ ID NO: 151373 - DNA, 1084 bp, Homo sapiens
ccggaccaccgcggcccggagggccgtcaacaaagtgttgttcgatgaccacgttagcgaggaggaggaggaagaggaggacatggtctccgaggaggaggaggaggaggacggcgacgcccaggagacccaggattctgaggacgacgaggaggatgagatggaagaggacgacgatgactccgattatccggaggagatggaagacgacgacgacgacgccagttactgcacggaaagcagcttcaggagccatagtacctacagcagcactccaggtacccacccagcccagttgctgcagactccttccccacctcctctgccctccccccttgctcactcgtgtgctgtgcatcctgctccgatctccccccaaccccgcctcccccccaaacagaggggaaatgcgagggcacatcaagtggcaaaaaactagatttacaagagggaagaggcgcattgttaaaaataggagattgcattgttgcagtttggaggctacactcgctcgctctctctccccccccccaaccccctttttttcctcttcaaaatttgtgccagtgcagtgtctccaccgggcaggattgaaactttggcaaacacatatccattgcattcatttttctccccttgttttggtgtggttttctggaatgaaagaagcctcttgttttgcaaacctctttgcatttctaatgtggtttctttcggatttttattatatatctgttacttaaaagggaattaaggatttggacagattgtggcacacaaacacacacaaaaacatgtctggtttcacatccctagctgtggttttaaaattgtgttaaggaaacggatcatttgggttagtaggggaaccttatctggtcctgtgtgtttgtttttattcttcgagtgctaatgggcccgtgcaacagttgctgttaaatggctgattaaaaagcaacgcagaaagccaaccaagacccaaccaaatttggttattcattcgattcaaaattgtttttggttaaatcaaaaatgaaagtacaaaactacaggaacgcgcgtcttaactcatttgatccgcttt

SEQ ID NO: 151374 - DNA, 1095 bp, Homo sapiens; identical to SEQ ID NO: 132084

SEQ ID NO: 151375 - DNA, 639 bp, Homo sapiens
tttttttttttcctttttccactggtttctggtgatagctcctgccattttttaatggcatcagaaaaggcctttcgggtgattgcatagtgtcctttgagctcgtgcagggcccacttgatgtcctgactactgagcactttgaagtcggccatgaggaggtcaccagcttggatgaagcagtgctggtcaagaggagtcaatttagaatagtcaaaaaagtcttattttaggcaactttgtctcatcttggctggccagcagaccgcctactgggatttataatgattccgtcttctctctttggataatctgggttttccagaagaaaattacaaagtcttgtccccgatggcagtgaaagttgttcaagtgaattacctcttcattgttgtttccctcttccattttcaaatgcagacatgcacatacgggactgctaatatctaaacatggtgaccatcgtgtttcaaaagagtcgccactcaactcgccggctagccaggcgggttcggcgaccttcgctaccacgccgcttactcctccaaagctgcagctacgagctccgtggcagccgctgcactccttccggccctgccccggcgtcacctcgcgcaagcgtacagcgcgcgctcgtgc

SEQ ID NO: 151376 - DNA, 2256 bp, Homo sapiens; identical to SEQ ID NO: 132086

SEQ ID NO: 151377 - DNA, 369 bp, Homo sapiens
agtaaagttgttctttttaaagtgtatttcctgtgctggttttctttgcttcctattaaaagactagattataataaataggctgcatgttatcagtggcattgtcgtaccttatgggtctataaaccctcatccttccctatactttgctcatcataagatttgaagtagtataaataaaacttgattagcttgtaatttagtattctgaaaggtatttttaaaaatttctatttaatgcagttagagtaacttgtaagctattaggaattacttattcttaccttaattttcttttcttttcaggaatttagtggttatgttcaacaagtaaaatatgccatgaccagaataaaagctggcatgccg

SEQ ID NO: 151378 - DNA, 440 bp, Homo sapiens
  misc_feature (1)...(440): n = a,t,c or g
tagtcttgcggtantgcagggacgacccacgcgttcgtctctcccggtcgaggcccgttggaccacattttttatcgccgaccatgttccgacgcaagttgaggggtcttgactaccacaaccccgccgccttcaactgcaaagatgaaacagaatttagaaacttcatcgtttggcttgaagacccgaaaatcaggcactacgagattgaagacagagggaatttaagaaacatccacagcagcgactggcccaagttctttgaaaagtatctcagagatgttaactgtcctttcaagattcaagatcgacaagaagctattgactggcttcttggtttatctgttagacttgaatatggagataatgctgaaaaatacaaggattttagacctgataattcaaaaactgctgacaatggcactaaaaatgcagaaccg

SEQ ID NO: 151379 - DNA, 375 bp, Homo sapiens; identical to SEQ ID NO: 145308

SEQ ID NO: 151380 - DNA, 1114 bp, Homo sapiens
  misc_feature (1)...(1114): n = a,t,c or g
gcggccaccgttttaaccacgattggcgaagcgccgtcatttcggagcgactcagcgcctgcccgccctctcgccgcgtcgccggtgcctgcgcctcccgctccacctcgcttcttctctcccggccgaggcccgggggaccagagcgagaagcggtggaccatgttccgacgcaagttgacactctctcgactaccacaaccccgccggcttcaactgcaaagatgaaacagaatttagaaacttcatcgtttggcttgaagaccagaaaatcaggcactacaagattgaagacagaggtgaatttaagaaacatccacagcagcgactggcccaaggttctttgaaaagtatttcaagagatgttaaacctgtcctttcaagattcaagatcgacaagaaagctatttgactggcttctttggttttagctgttagacttgaatatggagataatgctgaaaaatacaaggatttagtacctgataattcaaaaactgcttgacaattgcaactaaaaattgcagaaccattgatcaattttggatgtaaataatccctgattttaaggctggtgttgttggctttggctaaacctggcttcagattcagcgtcatggatggattacctgggnaaatgcttaaggcaaattcgggattttgggttcaggagcgccttgaccaccagggatgccagtttgcttaagggcaaatcaaacaaaagaggggcttacctgttgcttttagacaaacatattcttggttttgacacaggagatgcagttcttaatgaagctgctcaaattctgcgattgctgcacatagaggagctcagagagctacagacaaaaatcaacgaagccatagtagctgttcaggcaattattgctgatccaaagacagaccacagactgggaaaaagtttggaagatgaacacttgaggacttcagcttctcacctactttagtacagttgggaaccatacacttctggcatgtttggaaatcaaaatgtcacattctcgggggaggaagcccagaaaattgggtatgttctagagatttaccaccattgcttattgcttttttctttaataaagtttaggaaagtaga

SEQ ID NO: 151381 - DNA, 1429 bp, Homo sapiens
  misc_feature (1)...(1429): n = a,t,c or g
tttttttttttttttttaaccgataactttttttattgcaagcagatctaattaaataacaaagtccaagaaacacctgcctttaaggcactctccctaacaaactgagttatattccttgtaaaatataatagagaaataaaaatctatggggaaagggtcactctaaagatactttttatttaaatattttatgatgatacatatacaaatataatcttccaaaaaacaaatgtaaaactaagtgcaaatccactttttcaggaacaaagaaaatcatttagaaaatgtgattatgctaaaagaggcaggttaggtttcccaaggctgctcaaggtggaagcttaagaccaacttttggtttgagtacacaagtgatatttaccattttcatatacttagtgatatgcctgttgccatacctgggcaaaataaaactgatagtaagtcctataataataaaagaaacaacaattacctaagtaaacaattcctagatgatggaagagtaaccctcccatttaagcctacagaccttagatgtctaaaaaaatatgtgtcctgatctgtacacagttagtgggagcacacctatataaaatccctttgcatgacaccattcaacaatattttttaaaatcctacaaaaattttaaagtttcacttccctagcaaaatatcttcagtcaagaaattagtcctttgaaaaattnatgaaaattgttgtgggaaatatttatacaaattattactgataatgcacatatattttgaaacattgtttcctagaagcaataaaatataacctatttaggagataacccaaatgatttgtaaaaaaattaacttgtagaaaagggaaggatgttgtgtaaaatcaagtcaattatttgaggtatgttataatattgagtacttatgtactaagtcacacccagccagtcaataactgagaaatcagaataaaataataatttcaaagaattacataaatacagggccttttgagatttttggcaattgtaaacaaaaacgaatggtttttacaattcagtgtaattctacgaatatttatttggcacccatgttaggcactgaggctacacagcagtgaaataggcctagttgttcctcaactagagaacatagttggttaatgtagctgcactgaattgtagctgtttagaagataatataccctgaggctttttaaagtatactattactataagaagtaaaattattttatacttataaattttgttttggattattcaactgaatttggagtgttcagaattttcatggcggttgagacaaggaagaggtataatgctatttttttttccttttctttttttttttgagacggaatctcactctgttgcccagactggagtgcaatggtgcgatctcggctcactgcaac

SEQ ID NO: 151382 - DNA, 403 bp, Homo sapiens
  misc_feature (1)...(403): n = a,t,c or g
gcccacagccagagccatgcaagcgcagttctcttcggacagagccactgtctcaagactctgcccttcttcaagagaagagcccagaagaagagagaatgactgctaggccctttatggctggattcagnnnnnnnnnnnnnnnnnnnnnnnnnnnnnnnnnnnnnnnnnnnnnnnaagtttcctgaggcctccccaggtgtgcttcctgtacagcctgtggaatgttaccaaagacgttggaagaggtggctatggacatcacctgggagaagtggaagcaaatggacactgttcagaagtccatatacagaaacatgttggaaaaatatagaaacctggttttgctagagaaaccctatgaatatcatgactgggaaaactttcagttactgttcagacc

SEQ ID NO: 151383 - DNA, 2631 bp, Homo sapiens
cggggcatgctgcttcccttcaccttccaccatgattgtaagtttcctgaggcctccccaggtgtgcttctgtacagcctgtggaatgttaccaaagacgttggaagaggtggctatgggacatcacctgggagaagtggaagcaaatggacactgttcagaagtccatatacagaaacatacttggaaaaatatagaaacctggttttgctagatgggaagcttgcagctggggccaagacatcaagagtagagcagcaggacatttcaaaagaagattaatctcaaagattagagatggaagaacttgcaaagagaaagtctgtaccggaagaaatctggaaatctagaggccagtttaagaatcagcagctaaacaaggagaataatctagggcaagagatagctacctgcacaaaaattcctaccagaaaaagagacatagaatctaatgaatttgtgaaaaattttactgtaagatcaatacttgttgcagaacagatagatcctatggaagagaattgtcataaatatggtacatgttgaaagatgctcaaacaaaactcagatttaattatacaaagaaagtatgatggaaaaaaaaaaaccttgtaaatatagtgaatgtgggagaaccttcagaggccacatcactcttgttcagcatcaaataactcattgtggagagagaccctgtaaatgtactgagtgtagaaagggatttaatcagagttcccacttaagaaataatcagagaaaaactctttcaggagaaaagccctacaaatgcagtgagtgtgggaaggccttcagttattgcttagttcttaatcaacaccagagaattcacagtggagagaaaccttatgagggtactgaatgtggcaagacattcattcagtcgtacataccttactcagcatcaaagaattcacacactggtgagaagccctatacatgtcttgaatgtggaaggctttttagtcagaacacacatcttactctacatcagagaatccatactggagagaaaccttatgaatgcaatgaatgtggtaggtcctttagtcagactgcacatcttactcaacatcaaagaatgtatacaggagaaaaactctatgaatgtaatgaatgtgagaaagccttccatgatcactcagctcttattcaacatcatattgtccatactgcagagaaaccctatgatatcatgactgggaaaactttcagttactgttcagacctcattcaacatcagagaatgcacactggagagaaaccatacaaatgcaatgaatgtgggaatgcctttagtgattgttcatcccttattcagcatcaaagaactcacactggagaagagccttatgaatgtaagcaatgtggaaaagcctttagcagaagcacataccttactcaacatcagagaagtcacgcaggagagaaacagtataaatgcaatgaatgtgagaaaactttcagcctgagttcattccttacacagcatatgagggttcagactggagaaaaaccctacaaatataatgaatatggaaaagcttttagtgactgctcaggacattttcagagaactcacactggagagaagccctgtgaatgtaatgactgtgggaaacctttcagtttctgttcagccctaattcaacataagagaattcataccagaaagaagccctgactgtaccttcataccagtaaatgcactgactgtggaaaagccttcagtgattggttagcacttgttcaacatcagataactcaacactggagaaaaaccgtataaatgtactgaatgtggaaaagccttcagttggagtacagacctcaaaaatcaccagaaaactcatactagtgaaaaatcctataaatgtaatgaatgtagaaaggcctttagttactgctctggtcttattcaatgtcaggtcattcatactatagaaaaaccttatgaatacggtaaatgtggcaaagcctttaggcagaggacagaccttaaaaaacatcagaaaatgcataccgaagagaaaccctatgaatgtaatgaatgtgggaaagcctttagccagagcacatatcttacaaaacaccaaaaaattcatagtgaagagaaatcaaatatacatactgagtgtggggaaaccattagacaaaactcttctttttacaacaataaaacctcacactggagagttctctgaatgccttaagaatttggttaatatggagacccttcccagggaaacagaaggaggatcgtgaaaaccgttgactacttgaatgatcacatggtttagtggagagagcatgattctgggttttaaaagtcatggatctcaatctcagctcctattactaactagatcttttactttggggtaagtcacttcatatctttaggccttaatttcctcatctgaaaactggaaggcctgacttgacttgttgagcttaagatcctcaattattatatttactaggaattcaagtttctatagatgtggttcagaattgtgacttatttattgtacatcaggtgtgattcacaagtgagcttgtagtagttattaaggagtcaataaagatatgatataaaaaaaaaaaaaaaaa

SEQ ID NO: 151384 - DNA, 314 bp, Homo sapiens
ccgtgaagagaaagaatggcctcctcacacacagccttggtatccagaaggttgcttcaaagatggtcaacattatgaagagggatcagtaattaaagaaaactgcaactcctgatggacagcacagaattacagccaattttggggaatgactttagaagatggttttaaatttcgccttggcactttgccacctagtcccatgctcctgagcatgaatgaaatgacagtaagtgttccttctgattcacgtatgtgcatgtatttgtaaaagtgtgtttgtgtgtgcattaaaagcaattataaatcactaa

SEQ ID NO: 151385 - DNA, 1002 bp, Homo sapiens
atgtggaccggatataagttttccatcttctcttatcttactacagaaatctggatggagaagcagtatttatctcaaagagaagttgacctagaggcttatttcactaggaatcacaccgttttgcaaggtactcgattcaaaagagccattttccaagggcaatactgtagaaattttggctgttgtgaagacagagatgatggctgtgttactgagttctatgcggcgaatgcgttgtgctactgtgataaattctgtgacagagaaaattctgattgctgtcctgactacaagtccttttgccgtgaagagaaagaatggcctcctcacacacagccttggtatccagaaggatggacagcacagatttacagccaattttggggaatgactttagaagatggttttaaatttcgccttggcactttgccacctagtcccatgctcctgagcatgaatgaaatgacactggtatcccacgcatgctacccacttttcaaagaccaaaatgctaccaacaatggatgtgccatggcaagcaggtctgatgggcgaggaaaacgggatgccacgaagccatgtcccaacaacgtagaaaaatctaacaggatctatcaatgttctcctccatacagagtctcttccaacgaaactgagataatgaaagaaatcatgcaaaatggaccagttcaagccataatgcaagtccgtgaagatttcttccattataagacagggatatacagacatgttaccagcacaaataaagaatcagaaaaatatcgaaagcttcagacacatgcagtcaaactcactggatggggcacacgtagaggagcacaagggcagaaagaaaaattttggattgctgccaatttctggggaaagtcatggggagagaatggctatttcaggattcttcgaggagtaaatgagtccgacattgaaaagttggttatcgcagcttggggccaactgacgagttctgatgaaccataa

SEQ ID NO: 151386 - DNA, 1664 bp, Homo sapiens
gtacactgctcggaatttccgggacgacctccgcgtccgcggacgcgtgggcggaaagtggaagctatacctgtcttccagagaatgtggaccggatataagatcttaatcttctcttatcttactacagaaatctggatggagaagcagtatttatctcaaagagaagtggacctagaggcttatttcactagaaatcacacgtttttgcaaggtactcatttcaaaaagagccattttccaaagggcaatactgtagaaattttggctgttgtgaagacagagatgatggctgtgtcactgagttctatgcggcgaatgcgttgtgctactgtgataaattctgtgacagagaaaattctgattgctgtcctgactacaagtccttttgccgtgaagagaaagaatggcctcctcacacacagccttggtatccagaaggttgcttcaaagatggtcaacattatgaagagggatcagtaattaaagaaaactgcaactcctgcacatgctcaggacagcaatggaaatgttcccagcatgtatgccttgtttcgtccagaaattaattgaacaggtcaataaaggagactatggatggacagcacagaattacagccaattttggggaatgactttagaagatggttttaaatttcgccttggcactttgccacctagtctcatgctcctgagcatgaatgaaatgacagcttctttacctgcaacaactgatcttccagagttttttgttgcttcttataaatggcctggatggactcatggcccattggatcaaaaaaattgtgctgcatcctgggcattttccactgcaagtgtggctgctgaccgaatagcaattcagtctaagggtcgatacacggccaatctatcccctcagaatttgatctcttgctgtgccaagaaccgtcatggatgcaatagtggaagcatcgatagggcttggtggtacctgagaaaacgtggactggtatcccacgcatgctacccacttttcaaagaccaaaatgctaccaacaatggatgtgccatggcaagcaggtctgatgggcgaggaaaacggcatgccacgaagccatgtcccaacaacgtagaaaaatctaacaggatctatcaatgttctcctccatacagagtctcttccaacgaaactgagataatgaaagaaatcatgcaaaatggaccagttcaagccataatgcaagtccatgaagatttcttccattataagacagggatatacagacatgttaccagcacaaataaagaatcagaaaaatatcgaaagcttcagacacatgcagtcaaactcactggatggggcacactgagaggagcacaagggcagaaagaaaaattttggattgctgccaattcctggggaaagtcatggggagagaatggctatttcaggattcttcgaggagtaaatgagtccgacattgaaaagttgattatcgcagcttggggccaactgacgagttctgatgaaccataacatatcattaaatttccataaggtcatgcctttaagtaaccccctaaattgaagtttagcaatatgacattcttggtgacagtggaatctttgtctcttcaccgtgttaacataatctatctattttcttattttcccctctgga

SEQ ID NO: 151387 - DNA, 411 bp, Homo sapiens
  misc_feature (1)...(411): n = a,t,c or g
nnnnnnnnnnnnnnnnnnnnnnnnnnnnnnnnnnnnnnnnnnnnnnnnnnnnnnnnnnnnnnnnnnnnnnnnnnnnnnnnnnnnnnnnnnnnnnnnnnnnnnnnnnnnnnnnnnnnnnnnnnnnnnnnnnnnnnnnnnnnnnnnnnnnnnnnnnnnnnnnnnnnnnnnnnnnnnnnnnnnnnnnnnnnnnnnnnnnnnnnnnnnnnnnnnnnnnnnnnnnnnnnnnnnnnnnnnnnnnnnnnnnnnnnnnnnnnnnnnnnnnnnnnnnnnnnnnnnnnnnnnnnnnnnnnnnnnnnnnnnnnnnnnnnnnnnnnntgcagctttattcctgggatggaagatcgattcaacatacgcaaaacaataaatgtgattcatcacataaacagaactaaaaacaaaaaccacatt

SEQ ID NO: 151388 - DNA, 390 bp, Homo sapiens
  misc_feature (1)...(390): n = a,t,c or g
ctgacatactcagtgatccacatgtgcatccacacaatgagatattctacagcaggtcaaagcagcctacatgcagcgatatgaatgaatccgtgcaatatgtgatggactaacgaggagagcgtgtcaagaaccaagaaatgtgatgagttgaattctgtccatctgagnnnnnnnnnnnnnnnnnnnnnnnnnnnnnnnnnnnnnnnnnnnnnnnnnnnnnnnnnnnnnnnnnnnnnnnnnnnnnnnnnnnnnnnnnnnnnnnnnnnnnnnnnnnnnnnnnnnnnnnnnnnnnnnnnnnnnnnnnnnnnnngaatgcacattcttttcatcagtacatggaacattctccaagacagatcatataataggtcacaaaacaagtctgct

SEQ ID NO: 151389 - DNA, 1156 bp, Homo sapiens
gcgacagcaggggctggccatgctgtaaaggggcttcttgttaggttccagcctcaagaatcaaggggaactcctgagcgcgagaattctgaagatctcctccctccctgaagctgtgggctgggccatcggaaaactttcagttttgtttccttgcctgcaagaaacgaaactcaaccgaaagcctgcagagagcaaaacatggaaggagacttttcggtgtgcaggaactgttaaagacatgtagtctctgccaacttcaccctccatgaggcttactgcctgcggttcctggtcctgtgtccggagtgtgaggagcctgtccccaaggaaaccatggaggagcactgcaagcttgagcaccagcaggttagggtgtacgatgtgtcagcagatcatgcacaagtcctcgctggagtttcataaggccaatgagtgccaagagcgccctgtcgagtgtaagttctgcaaactggacatgcagctcagcaagctggagctccacgagtcctactgtggcagccggacagagctctgccaaggctgtggccagttcatcatgcaccgcatgctcgcacagcgcagagatgtctgtcggagtgaacaggcccagctcgggaaaggggaaagaatttcagctcctgaaagggaaatctactgtcattattgcaaccaaatgattccagaaaataagtatttccaccatatgggtaaatgttgtccagactcagagtttaagaaacactttcctgttggaaatccagaaattcttccttcatctcttccaagtcaagctgctgaaaatcaaacttccacgatggagaaagatgttcgtccaaagacaagaagtataaacagatttcctcttcattctgaaagttcatcaaagaaagcaccaagaagcaaaaacaaaaccttggatccacttttgatgtcagagcccaagcccaggaccagctcccctagaggagataaagcagcctatgacattctgaggagatgttctcagtgtggcatcctgcttcccctgccgatcctaaatcaacatcaggagaaatgccggtggttagcttcatcaaaaaggaaaacaagtgagaaatttcagctagatttggaaaaggaaaggtactacaaattcaaaagatttcacttttaa

SEQ ID NO: 151390 - DNA, 976 bp, Homo sapiens
  misc_feature (1)...(976): n = a,t,c or g
tttcgtgcatccccagagcctccctggacgctgtttgcaaggtcctcaccgcctggaagtccaggagccatttttagggaacagcattcaagctcaacatgaaacgaaactcaaccgaaagcctgcagagagcagaacatggaaggagacttctcggtgtgcaggaactgtaaaagacatacagtctctgccaacttcaccctccatgaggcttactgcctgcggttcctggtcctgtgtccggagtgtgaggagcctgtccccaaggaaaccatggaggagcactgcaagcttgagcaccagcaggcttatggatctggcataggcaagaggttctggtttcaggaaagactggctgttctcttgagatctgtaaagagaggatgtgaaaaaggaaggtcctggaaggcagtcagatggagccctgtttcccgcctttccatgtccattcctcctggggcccctgatctgtctctctggagatactcaagctcaggcagccggtgccaacataaaactgggcttatgaacaattcttgaacactgggcggggtgctagagagacactgaggtagccacatcggatccctgccctctgggagttcacagacccaaacccgggaacactgtgagccaaagtggatgtggggcaggccctgggtgctgggtggacccacatctnnnnnnnnnnnnnnnnnnnnnnnnnnnnnnnnngntgngtgnacnangnntnnnnagagcatgcanaagttctctctggagttttataaagaaagagccccatgtgatttctcctttacagccaaatagaccaaccggatattaggataggaaggggaaacgggaggccaataatatagaattccacctgaccactctttcacccattaagcttggggagcggtggataactatccccccgcataacacaggttctcttgtccccatatactggatanaaaggttttccatggcg

SEQ ID NO: 151391 - DNA, 408 bp, Homo sapiens
agcggctttatggaccacctggaggagaaggcagacctgagtgagctggtggagaaagaagaacttggattcttccagtactacagagagagatgccatcagaaagtttatcaccctataacaaagccagggggcagtgccaaagatgcagcaccgggaggaggacaccatcaggctggccctggacagggaggagatgaaggcatcaggatgatgttttgtgtctcacctaatcgggccacctttgttgtgagcgtggtgcctctagtgtcaatcattgatgtaatttatggacgatatctacggaaactgaccaaagtcacccaggattcgctggcacaagccactcaggaggaacgtattggaaatgttaagaactgttcgagcttttgggaaagccccccctga

SEQ ID NO: 151392 - DNA, 472 bp, Homo sapiens
ttttttagaaaagcatgcaaattgatttaaaagtttaacatgacataggagcccttggaaatgaagacccaaacaaacaaggaaacttgtgcatttttatgcttagggttgatgagtggacaacttgtggaaggatatgactggacaaaggtctgatctaacggtaacaactgggggaaattggtaaaccctgtttgttcagactcttctctgtggccctgtgtcttcagagataaagatgtttctttcctccaggtacagggaaggcatctctcaaatgagggtcttaagaccagtgtcagctttacggcttttctccgtcctcagcttggaatgaggaacatctttcatttcacaagaggttcaggaactaccagtgtgaaaagaggctacgttcaagctgctggagggccagttccacctaggcgcagtcaagaagggcgcctggctttccggcttcacgtccctggaa

SEQ ID NO: 151393 - DNA, 1140 bp, Homo sapiens
atggggcgcggggccggcgctgctctggggcgttggagccgcgcgccgctggaggagctgctgccggggcgggggtctgggcggctcggggggccacgcgggcctcggacggctcccggggctgtgggcttgggcccggcagctgcaggggaggaggcctggcggcgcgggcgggcggcgccttcccgggacgaccagcggctacgacccatggcgcccggactctcggaggccgggaagctcctggggctggagtaccctgagcgccagaggctggcagctgcggttggatttctccgatgtccgatcatcgatgccatctataccaaccccactgtggactacagcgacaacctgacccgcctctgccttggcctcagtggcgtgtttctatgtggtgctgccgccaatgccattcgtgtctacctcatgcaaacttcacgtcagcgcgttgtgaagaggctgagaacttcgttattctcctccattctggggcaggaggttgctttctttgacaaggctggcacaggggaattgattaaccgcctctcatcggacactgcactcctggggcgctcagtgactgaaaacctctcagatgggctcagggccggggcccgggcttctgtaggcatcaggatgatgttttgtgtctcacctaatcgggccacctttgttgtgagtgtggtgcgtctagtgtcaatcattgatgtaatttatggacgatatctacggaaactgaccaaagtcacccaggattcgctggcacaagccactcaggaggaacggttcaacactgtggttggagaaaagggtgttctcctctcaggtgggcagaaacagcggattgcaattgcccgtgctctgctgaagaatcccaaaattcttctcctagatgaagcaaccagtgcgctggatgctgaaaatgagtaccttgttcaagaagctctagatccactgatggatggaagaacagcgttagttattgcccatcatctctccaccattaagaatgctaatatggttgctgttcttgatcaaggaaaaattactgaatatggaaaacatgaagagctgctttcaaaaccaaatgggatatacagaaaactaatgaacaagcaaagttttatttcagcctaa

SEQ ID NO: 151394 - DNA, 451 bp, Homo sapiens
ggggatcgaccatttcgtgtttaagatccgcgcgcaggccaggctgcaactttttggacagatccctcgctgtcctagtcgctgctccttggagtcatgttcccagccgccccttctccgcggaccccgggtaccgggccccgaaggggcccgctggccggactcgggcccggctccacgccccggacggctagcaggatgggtctgcccctggggtctgcagtcagctccccagtgctcttctcgccgggcggccggcgtagctcgctaatctcgcggggaacaccaacacgaatgttaccacaccactccataactgagtctgtgaactatgatgcgaaaacgataggatcttctcttcctgttaaagtcatggaagccctaacattggctgaagtcgatgaccagctgaccattaacataaatgaaggtggatgggcttgtctggtgt

SEQ ID NO: 151395 - DNA, 1966 bp, Homo sapiens
gaggaaggggctggccagaacggttccatagttggctcccagtttttcttggtgaggaagagttgatcagactaagaagtcatcttctctgattcagatatgatcactcacttccttagtcaacctgcttgttctcacctggaaccatttggttcttcccttgagtcagagatcgaggagcaaaagggaggaaactgctagagactgagatcaacgcatactctgacaacagcttatttggcaaggaagcctcctggactcagcaccgcagcccctttgctgaagcaacctgaacattgagagtgcttgtgttttctagctgcggttggatttctcacgatgtccagggttatctccatgtctgcccctttcttcctggggaagatcattgatgtcatctataccaaccccactgtggactacagcgacaacctgacccgcctctgcctagggctcagtgccgtgtttctgtgtggtgctgccgccaatgccattcgtgtctacctcatgcaaacttcaggtcagcgcattgtgaataggctgagaacttcattattctcctccattctgaggcaggaggttgctttctttgacaagactcgcacaggagaattgattaaccgcctctcatcagacactgcactcctggggcgctcagtgactgaaaacctctcagatgggctcagggccggggcccaggcttccgtaggcatcagtatgatgttttttgtctcacctaatctggccacctttgttttgagcgtggtgcctccagtgtcaatcattgctgtaatttatgggcgatatctacggaaactgaccaaagtcactcaggattccctggcacaagccactcagctagctgaggaacgtattggaaatgtaagaactgttcgagcttttgggaaagaaatgactgaaatcgagaaatatgccagcaaagtggaccatgtaatgcagttagcaaggaaagaggcattcgcccgggctggtttctttggagcaactgggctctccggaaacctgatcgtgctttctgtcctgtacaaaggagggctgctgatgggcagtgcccacatgaccgtgggtgaactctcttccttcctaatgtatgctttctgggttggaataagcattggaggaaaacaggaatgcatccccagtcaacttgggacaaatgatttcctggtttttgtttcccttcttgtctttgaaaatcaagatggaaaggtcagaagaggctacgcagtggttgagggaaagcttggaatgaggaacatctttcatttcacaagaggttcaggaactaccagtgtgaaaagaggctacgttcaagctgctggagggccagttccacctaggcgcagtcaagaagggcgcctggctttccggcttcacgtgtttaagttccgcgcgcaggccaggctgcaacctgacggccagatccctcgctgtcctagtcgctgctccttggagtcatgttcccagccgccccttctccgcggaccccggactacgattgaccacaggtatttgaaactgcagataaaagggggaaatactgtatatgcaaaattcagtcctgtttacagagttgatcaggtttatgaagtttcccgtgaaaccccaaaactggcacctcatgttattgggtttaataatacagtaaaatcaagtcctacctccatttctggatcctatgtagcatcccagaggctaaaagatttaggtcatgctcaaatggtggttgatgagctcttttcctctcactctgatttggattctgattctgaactagacagggcagttacccaaatcagtgtagacctgatggatgactacccagcatctgacccacggtggggctgagtctgtccctgaggaaactcgaggggaactctggggtccccagataccagggaactgtctcaaacatgtttctctccctaattatcctacttcttag

SEQ ID NO: 151396 - DNA, 498 bp, Homo sapiens
aggagtgtcatattcactggggagggtttgaatatagggctgccagaaggagttagggctggctcgctcacacagcaaatgaaaggccagtgcgatgtttcccatggcttgaaggattcggtcttgagaatataagggccccaacactgaatttttagcagattcaacagtcattagcaattttcgtggaacccataaaaacaattcttctgcctttttgctttttccgtattttctcaaccagagtccggatctgcacatactcttcccactcttttcctgggccaggcgccggactgctgcatttctgcagcagctcactggtcaggttcaagatttcctttggtgacacagttgctgtagcaccagtgccagatttctgagtttttactcgactcttcttacccatttttctgactgcccgcttcccctagcgcagcgggaacgacgtactcaggcccggaccccgccgtccgcctcaacacgaaatcgtcgaat

SEQ ID NO: 151397 - DNA, 981 bp, Homo sapiens; identical to SEQ ID NO: 122167

SEQ ID NO: 151398 - DNA, 1071 bp, Homo sapiens
tttcgtgccgccgccaccgccgccaccgcctgggggttggttgaggcggacggcggggtccgggccggagtacgtcgttcccgctgcgctaggggaagcgggcagtcagaaaaatgggtaagaagagtcgagtaaaaactcagaaatctggcactggtgctacagcaactgtgtcaccaaaggaaatcttgaacctgaccagtgagctgctgcagaaatgcagcagtccggcgcctggcccaggaaaagagtgggaaagagtatgtgcagatccggacctctggttgagaaaatacggaaaaagcaaaaaggtctgtccgttacttttgatggaaaaagagaagattactttcctgatctaatgaaatgggcctctgaaaatggggcttctgtcgagggtttttgaaatggctaacttcaaagaagagggcttttggtttgagagcaacacgagatatcaaggcagaagaattgtttttatgggttccacgaaaattgctaatgactgttgaatctgctaaaaattcagtgttggggcccttatattctcaagaccgaatccttcaagccatgggaaacatcgcactggcctttcatttgctgtgtgagcgagccagccctaactcaatctggcagcccgatattcaaaccctccccagtgaatatgacactcctctctactttgaagaagatgaagttcggtatcttcagtccacacaagctatacatgatgtcttcagccagtataaaaacacagctcgacagtacgcctacttctataaagtcatccaggtgagcagctgtttgcaatttaagtatatatttcacagagtggggaggaaagaggaattgagtccataaatattccatttgatgtcttattaaggatacttaaacattttactttttaaattgaaaatataaaatacatttcatcgtttgtttttacagaaatatcaatgaaatgcggttacatatatatatctgatttcatcagtgcccagtgttaatacaagcagcagttgttcctgagttattgaaatcaccaagtttttttgtaaacaaaagatc

SEQ ID NO: 151399 - DNA, 483 bp, Homo sapiens
  misc_feature (1)...(483): n = a,t,c or g
nggaatgnaaatgacgccctaatagaggccggtagaccggccgaccacgcgtccggcggcgcttggaggaaaggaagccggttggagggcgcatcgcacccctgctgcgcggaggagggggctgagctgaactcagcagaagttacatgcacaagcaggcaaaaattctgacgttctcaagagaccagctctgcccccgtggctcaactgaccctaccatgtggacgctgctcctccaggtgggaactggagttttgaaataaaatggatgatttgacgttacttgatcttctggagtgccctgtgtgctttgagaagctcgatgtcacagccaaagtcctcccttgccagcacaccttctgcaaaccatgtctacagagggttttcaaggcccacaaagagctgcggtgccccgaatgcaggacgcctgtgttttccaacattgaggcgctgccggccaacctgctgctcgtgcgccttctg

SEQ ID NO: 151400 - DNA, 588 bp, Homo sapiens
tcaatgtatagttcctcggcgcgcctctgaccttttcccggagctcttcaatcccagaagctatagcacaacggctgaatcgccaggacccccggggaggcgtggcttcaggaccggaagaagctcctgttgccaagggaacggtgcctgccaaggcgcctgctcttcgactgatgcacagactgctgcagaggctgccgggtttcccaacttctagagacggctttgctcattaccaggcatccttcccatgtaggcatcgagaagaaggctgagggaccctcgcaccagatttccatcccggagaccgatacgagtgcgtccattcttgttgccagctcctgcgcccttcggactaacctcaaaaaccagctggtttgtaaatatttgaatcacattatgggattgctagacagactttcagtcttgcttggcctgaagaagaaggaggttcatgttttgtgccttgggctagataatagtggcaaaacgacgatcattaacaaacttaaaccttcaaatgctcaatctcaaaatatccttccaacaataggattcagcatagagaaattcacatcatccagtttg

SEQ ID NO: 151401 - DNA, 383 bp, Homo sapiens
acggcgaaggcggcgctttatcctctggttggcaaaggaggcggcgcggggggtcctgtcctcgccatgaggccaaaccaggcgccggtgtccggaagggtgtacattcaccgagactacagccgagtcacacgctgccagttccagaccaggttccctgcgcagctggacaaccggatagctgggcatccgtttgaaaaaacagttctaactctaaataacctttatgccgaagcagaaaaactaggtggccaggcatatctcgaaggttgctgggcttgtttaacaccatataccatcttcctatgcatggaaactaattatgagaaggttctgaagaaagatttccaatacattcctcagctgactgagagtatctatgc

SEQ ID NO: 151402 - DNA, 445 bp, Homo sapiens
aaggaagccaacaggatccgacccggtgttttgtgacaaaggcaagacccccaggtctacttagagcaaagttagtagaggaggcagctaggcgtggctctcattccttcccacagaatggattataagtcgagcctgatccaggatgggaatcccatggagaacttggagaagcagctgatctgccctatctgcctggagatgtttaccaagccagtggtcatcttgccgtgccagcacaacctgtgccggaagtgtgccaatgacatcttccaggctgcaaatccctactggaccagccggggcagctcagtgtccatgtctggaggccagttccgctgccccacctgccgccacgaggtgatcatggatcgtcacggagtgtacggcctgcagaggaacctgctggtggagaacatcatcgacatctacaaacaggagtgct

SEQ ID NO: 151403 - DNA, 1401 bp, Homo sapiens
atagcattgaagaaaataccgcacatcagaggaaagcttattttcctgcatggtgtcttttcaaagcatagcaatatttgaagcaggttttctagggattgtgtgaatgagggtgagctggctgaggcatcgctcaagactggggggtggtgtgtaagaagtcacgtggagccacaagaggcacctcctatagctcagctaaagggcttccctttctgcgacccagcttttgggtgaagggtgatttctactagacacatctgtgcttcagtcatagatgttaatagaggaagcagttttcctgctgcagattcctgaatagagttgctggaaagagtctacttctgggactcaggggaagttggaaggccagttctgttgtaggaaaggctgaggcaacggggaaagacctgacacgctaagttacatacagctctgacatagtactcccatgatggcttccagtggacacatgtgctgatagaattcctaaacctctggaatttccctgctggcgacttctatggccgttgactgtacagggtaacctgaatgccagatgctaatgggcgtgaatgagaacttagagcattgccagcatggaggaaactgtgaggcaccagatccctggtgcttctgcagggccattttctggaaaacccctgttaggaaggttggatttggcgtgacttgcttgagccaagagtcctggggagagattttgaagttttaatttaacggtatatcccagaggcctaacagtgactcaactcgtctaagttctgccaagtccagatgtcccactttagagtctctcctgtgaaagggtttgggtctgcagctgtggtagtatgtcaaaactgcccagtaagcccagcccctcacccatctgatagatattcctttaatgcacccagacttcatgtttggataaatggattaatggttgaaatttgtttctctctcttttgtgttttccccagttaatagatggtcactgtttcccacaatgttttatactttcagctttttgtaacttaactataattacttaattttatttttttaaagcttgttgtggtctaatgagaagtatttttcagtgcataatgtttttctgagcttctgtaaatgccatcccaatgtggtttggttttgttgaacagaaaccaaaataaatttccaaaatgttaaagcaatggatttaatacatttatttatttatttgttttattttgtttttgagacggagtcttgctctgtcgccaggctggggtgcagtggtatggtcttggctcgctgcaacctccgcctcccgggttcgggcgattctcctgcctcagcctcccgggtggctgggactgcgggtgcgtgccaccacgcccggctaatttttgcgtt

SEQ ID NO: 151404 - DNA, 406 bp, Homo sapiens
acagagcggcccggtcgccggcatggtttctccgtcctgctgcagccggcgggaggcagccagtccaggcgcccgctagcttcggcggcgacccagacggggaaagcggaaggaatgtcgcgtgcaagcaggcagctggtgtggaagaatggcggtgagccattcagtgaaggagcggaccatctctgagaacagcctgatcatcctactgcagggcctccagggccgggtaaccactgtggacctgcgggatgagagcgtggcccacggacgcatagacaatgtcgatgctttcatgaacatccgcctggccaaagtcacctacacggaccgttgggggcatcaggtcaagctggatgacctctttgtgacaggccgcaatgtccgctacgtccacatcccagag

SEQ ID NO: 151405 - DNA, 392 bp, Homo sapiens
  misc_feature (1)...(392): n = a,t,c or g
aaatttgagaccagcaagtactatgtnactatcattgatgccccaggacacagagactttatcaaaaacatgattacagggacatctcaggctgactgtgctgtcctgattgttgctgctggtgttggtgaatttnaagctggtatctccaagaatgggcagaccagaagagatatgaggaaattnttaaggaagtcagcacttacattaagaaaattggctacaaccccgacacagtagcatttntgccaatttctggttggaatggtgacaacatgctggagccaagtgctaacatgccttggttcaaggggtggaaagtnacccgtaaggntgggcaatgccagtgggaaccacggtgcntnaggctcttgactgcatcctaccaccaa

SEQ ID NO: 151406 - DNA, 1212 bp, Homo sapiens
  misc_feature (1)...(1212): n = a,t,c or g
ggggctttttcgcaacgggtttgccgccagaacacaggtgtcgtgaaacctacccctaaaagccaaaatgggaaaggaaaagactcatatcaacattgtcgtcattggacacgtagattcgggcaagtccaccactactggccatctgatctataaatgcggtggcatcgacaaaagaaccattgaaaaatttgagaaggaggctgctgagatgggaaagggctccttcaagtatgcctgggtcttggataaactgaaagctgagcgtgaacgtggtatcaccattgatatctccttgtggaaatttgagaccagcaagtactatgtgactatcattgatgccccaggacacagagactttatcaaaaacatgattacagggacatctcaggctgactgtgctgtcctgattgttgctgctggtgttggtgaatttgaagctggtatctccaagaatgggcagacccgagagcatgcccttctggcttagccagaagagatatgaggaaattgttaaggaagtcagcacttacattaagaaaattggctacacccccgacacagtagcatttgtgccaatttctggttggaatggtgacaacatgctggagccaagtgctaacatgccttggttcaagggatggaaagtcacccgtaaggatggcaatgccagtggaatccattttgttaacaccgacaattagttgtttcacacccagtgtgtaagccagaagggcatgctctcgggtctgcccattcttggagataccagcttcaaattcaccaacaccagcagcaacaatcaggacagcacagtcagcctgagatgtccctgtaatcatgtttttgataaagtctctgtgtcctggggcatcaatgatagtcacatagtacttgctggtctcaaatttccacaaggagatatcaatggtgataccacgttcacgctcagctttcagtttatccaagacccaggcatacttgaaggagccctttcccatctcagcagcctccttctcaaatttttcaatggttcttttgtcgatgccaccgcatttatagatcagatggccagtagtggtggacttgcccgaatctacgtgtccaatgacgacaatgttgatatgantcttttcctttcccattttggcttttaagggtagttttcacaacacctgtgttctggcggcaaaacccttgcnaaaaaaaaaa

SEQ ID NO: 151407 - DNA, 406 bp, Homo sapiens
  misc_feature (1)...(406): n = a,t,c or g
cggacgcgtggggaaattttgcacaactttaacaagtagcagaactaattgttcactgatggctttaaagatgaaataattctgtgaatacatgaaactgtgagggactcttcgtggttgtctaggtttatttatatgcatactcattaataaaagtttttttttgttnnnnnnnnnnnnnnnnnnnnnnnnnnnnnnntgaaaagaagnnnnnnnnnnnnnnnnnnnnngggggnnnnnnnnnnnnnnnnnnnnnnnnaacgcggcgcccaacagcccgagggatgcttgaggaaaccaatccagcagattcaaagccaggcaccattcgtggggacttctgcattcaggttggccggaccttcttttattcccccgttttttttaaaaattcttttttttattt

SEQ ID NO: 151408 - DNA, 681 bp, Homo sapiens
atgcctgagcctcccacccactccatgggctcctgtgcggcccgagcctccccgacgagcaccaccccctgctccacggcgcccagtcccatcgaccacccaagggctgaggaatgcgagcgcacggcgcaggactggcaggcagcttcacctgcagccccggtgcgggatccactaggtcttgccatctctaagctggacctggtgacctttttggagggaaagaaagagccctggactgtgaagagtgaggagaccatagctgcacagccagaggtaggtgggaagctctcagacttagtcgccagagggacagctttgggcgcgagctccacacgtggcctgcagggtggacctagtggcttcctggtcacaccatcaggtgaccagatgtgggctgagctgtggccagtacttgtggccgctggccacacgtttgggttgatcagagattcaaagcttaggaaggaagagggaattttgacatatcccttggctcagtaccaacaagtgtggttcttcttccatcataagttctgctggcaagggagatggagacatattgtggagctctatgccaatgtgacattactgtttgctttggcctggacctcaaaaggcattgtgacatattgctgggcccagcaacatggtgacatgagtctcctgtatggaccatga

SEQ ID NO: 151409 - DNA, 523 bp, Homo sapiens
cccgggtcgacccacgcgtccgatggtttccggcatttggctgggcctttgtctctcgctcccaccagagcttggaatccgtctctgctcttctgcattctccacctcgggagcccctggggactctgtgacggcctctgttgccctgtgatctgcaggtccggagagacgcacagctaagatgtcaggacatcctggaagctgggaaagggtcttgccatctctaagctggacctggtgacctttttggagggaaagaaagagccctggactgtgaagagtgaggagaccatagctgcacagccagtccagatgtataatctcatccctgaacatttctgatggtgtgattatgacatgtgactttatctggcaacagagtgagttgttgctcccgcctgagcccagcccccagaaaggattgtgacatatcgttggacccagaattgaggtgcagttttgacacacttctgtctagcagctgagtattgtgatcttcagaactggcccagcctacaaatag

SEQ ID NO: 151410 - DNA, 375 bp, Homo sapiens
cattgcagccaaggactgctccccaccccgcttctccgtgtctctacccttctctttaaacttgcctcctttactatgggcaaccttccaccctccatttctccttcttctcccttagcctgtgttctcaagagcttaaaacctcttcacctcttgcctgacctaaaatctaagcatcttattttcttctccaacaccgcttggccccaatacaaactcgacaatggttctaaatggccagaaaatgacactttcgatttctccatcccacgagacctagatactttttgtcgaaaaaagggcaaatggtctgaggtgccttacgtccaggcatttttcacactttgttccctcctgtcgtacatgacacatacc

SEQ ID NO: 151411 - DNA, 3085 bp, Homo sapiens
atggttaattttacggtggatcagatccgcgccatcatggacaagaaggccaacatccgcaacatgtctgtcatcgcccacgtggaccatggcaagtccacgctgacagactccctggtgtgcaaggcgggcatcatcgcctcggcccgggccggggagacacgcttcactgatacccggaaggacgagcagggagcgttgcatccccatcaaggtcaacgccatctcccctcttttacgagcttctcggagaatgacttgaacttcatccagcagagcaaggacggtgccggcttcctcatcaacctcattgactcccccggggcacgtcgacttctcctcggaaggtgactgctgccctccgagtcaccatgggcgcattggtggtggtggactgcgtgtcaggcgtgtgcgtgcagacggagacagtgctgcggcaggccattgccgagcgcatcaagcctgtgctgatgatgaacaagatggaccgcgccctgctggagctgcagctggagcccgaggagctctaccagactttccagcgcatcgtggagaacgtgaacgtcatcatttccacctacggcgagggcgagagcggccccatgggcaacatcatgatcgatcctgtcctcggtaccgtgggctttgggtctggcctccacgggtgggccttcaccctgaagcagtttgccgagatgtatgtggccaagttcgccgccaagggggagggccagttggggcctgccgagcgggccaagaaagtagaggacatgatgaagaagctgtggggtgacaggtactttgacccagccaacggcaagttcagcaagccagccaccagccccgaagggaagaagctgccacgcaccttctgccagctgatcctggaccccatcttcaaggtgtttgatgcgatcatgaatttcaagaaagaggagacagcaaaactgatagagaaactggacatcaaactggacagcgaggacaaggacaaagaaggcaaacccctgctgaaggctgtgatgcgccgctggctgcctgccggagacgccttgttgcagatgatcaccatccacctgccctcccctgtgacggcccagaagtaccgctgcgagctcctgtacgaggggcccccggacgacgaggctgccatgggcattaaaagctgtgaccccaaaggccctcttatgatgtatatttccaaaatggtgccaacctccgacaaaggtcggttctacgcctttggacgagtcttctcggggctggtctccactggcctgaaggtcaggatcatggggcccaactatacccctgggaagaaggaggacctctacctgaagccaatccagagaacaatcttgatgatgggccgctacgtggagcccatcgaggatgtgccttgtgggaacattgtgggcctcgtgggcgtggaccagttcctggtgaagacgggcaccatcaccaccttcgagcacgcgcacaacatgcgggtgatgaagttcagcgtcagccctgttgtcagagtggccgtggaggccaagaacccggctgacctgcccaagctggtggaggggctgaagcggctggccaagtccgaccccatggtgcagtgcatcatcgaggagtcgggagagcatatcatcgcgggcgccggcgagctgcacctggagatctgcctgaaggacctggaggaggaccacgcctgcatccccatcaagaaatctgacccggtcgtctcgtaccgcgagacggtcagtgaagagtcgaacgtgctctgcctctccaagtcccccaacaagcacaaccggctgtacatgaaggcgcggcccttccccgacggcctggccgaggacatcgataaaggcgaggtgtccgcccgtcaggagctcaagcagcgggcgcgctacctggccgagaagtacgagtgggacgtggctgaggcccgcaagatctggtgctttgggcccgacggcaccggccccaacatcctcaccgacatcaccaagggtgtgcagtacctcaacgagatcaaggacagtgtggtggccggcttccagtgggccaccaaggagggcgcactgtgtgaggagaacatgcggggtgtgcgcttcgacgtccacgacgtcaccctgcacgccgacgccatccaccgcggagggggccagatcatccccacagcacggcgctgcctctatgccagtgtgctgaccgcccagccacgcctcatggagcccatctaccttgtggagatccagtgtccagagcaggtggtcggtggcatctacggggttttgaacaggaagcggggccacgtgttcgaggagtcccaggtggccggcacccccatgtttgtggtcaaggcctatctgcccgtcaacgagtcctttggcttcaccgctgacctgaggtccaacacgggcggccaggcgttcccccagtgtgtgtttgaccactggcagatcctgcccggagaccccttcgacaacagcagccgccccagccaggtggtggcggagacccgcaagcgcaagggcctgaaagaaggcatccctgccctggacaacttcctggacaaattgtaggcggcccttcctgcagcgcctgccgccccggggactcgcagcacccacagcaccacgtcctcgaattctcagacgacacctggagactgtcccgacacagcgacgctcccctgagaggtttctggggcccgctgcgtgccatcactcaaccataacacttgatgccgtttctttcaatatttatttccagagtccggaggcagcagacacgccctcttagtagggacttaatgggccggtcggggagggggaggcgggatgggacacccaacactttttccatttcttcagagggaaactcagatgtccaaactaattttaacaaacgcattaagaggtttatttgggtacatggcccgcagtggcttttgccccagaaaggggaaaggaacacgcgggtagatgatttctagcaggcaggaagtcctgtgcggtgtcaccatgagcacctccagctgtactagtgccattggaataataaatttgataaggtggtgaaaaaa

SEQ ID NO: 151412 - DNA, 1511 bp, Homo sapiens
  misc_feature (1)...(1511): n = a,t,c or g
tttttaccatttttaaaaaattatctttatttaggtttctgattcagcacatgtatcaaagactaatcaacataaaggagtaaataagacattaattgaaagtcttacatctctctaaactctgaccaagaatgtcaagattgccactattaccagaactccaacctaagtcaagttgtagacaaggctatcatggaacaacatacagtgtgcacaggatatggcagagggcaaaagggcatgctaggcgcttgggcttctcctcttttccttgttggacatctttctgttgggacagtccactttcggctttccggggctaaggttccaaatcaaggtccaaagaagggcttcaggggtcaacctggaccaggatactcttctgggggggaatggcatttctttaaactgttgtggcctggcaactttgttttttgccaggatgaagttcagaccgagatgtacaatacaatctagatgacggtgcagactaagtcaagaacttaaagttgtgcagtaacccgagttaaggcatgaatgcagacaacaccaacatgcacacacacagcacccatgctatcaagacacagggattttttcagttgcctcatgggaggcaacctgggcttggcagttaatcagaactgcctgagcattccagaaaatgccccccacggactttatgctaacagctgtgtgtatgttttaatcaaaaaanattaaagaagaaaaaaaaaccctaaaaaacaaagaaaaaaacaaacaaaaaatcaccaaaaacctagaaaccccttaatctcttacaatggctcttgagcatggaactccatgtagcagcatcaatggctggctctttaacaatttggaaataaaaggttgttttactatgtatttctttggtagtcatcactacaaagttttcagtgttggttacctataagacaagtactagacagaagatcaagttacacagaaatatttcttctgtactgataagatacaaatattgagctctcaaagcacaagttactatgctttttcttgccttattgggcattctctaaaagcaaggctttgtgcaggaaaagttcatgtctaccctaacaaagggtgaataacatgttcctattttccctacaagtgaacaattaacaaaaattcacattatcaattatttctggttgaattctgttagaagccaattacaaagggacagtagcacttggtgtcaaagccactttctggtcacacattcattccatggttgctagtcagtatctcaggagctcagaatttaaaactcctttcagtcaacgaaggagtaagttcaattaaaggcttccactatctgccaaatttctagaattctgtctagagtgctagcatgcttgatgagagaaagcagttcagagcccaaagaggtgtcaggtgtgtgcgtgcagacggagacagtgctgcggcaggccattgccgagcgcatcaggccttcgtccaaatagggtagtcagttc

SEQ ID NO: 151413 - DNA, 969 bp, Homo sapiens; identical to SEQ ID NO: 129399

SEQ ID NO: 151414 - DNA, 1625 bp, Homo sapiens
gatgtcgcttataaatataaaatgcttcaaaattaggtttatcaaatcactttgattgcagaatatcactggaatccaactgtggtctctataaaatttgcagtcctcagacaaaatacatcattataccattctaaacctggtatcctttgatacttgaattttcaaatagaaattgtggctgaagaaactttcagaaatgagtgacagtccaaccaaaagacaagtccatgaatcttctcacgtaaatatttgtagtggtatcagatcattaacattatctttttaaaaataaaaaccaactccatcttttggtccacaaattggatgaaacattctgtgaaatgggctagtggtttaacctttcaagttctgcttctgggttttatactgctggccatttcctgccgcccctttggacaacctcaggttcccagcagcttaggaatcacctcttcattaaaggcttgaaccctgagacagacaggctgaaatggagtttggaaaatctcagttgcgcccgcggcccccttctgcagccaggacttcaacttgggtgccaggagaagggaggctgcaagggctggggtccagcccctgctcgggcggccgagggctccgaggcgttttcagctcctccaacctcccggctagaggaactgtcgggggccagccacggcggtgccttggtttcacctggctacatagagttttttacgccgcccgcctgacctgaggagtgagctccgccagctccgttggcaaggctgggttcctccgcgggtggggctctcctccgacgccaagccgcccaaacctcccgagcgcaggtgccctctggccgggaagtacttcaccatttactagccttcatctcaaccacaacagtcccgccctgcctctaccggggatgagggaaggcgtaacctccgccggggaccaggccgacctacctaaaccgatcactacatgggaggagtcggacgccggccgtcccaccacccagccaggagcccattgattggtcgcactccccactggttcacgcctcagagactcggcgcacttaccgctggcaccgcagtggcgcccgagcgcgccgcctcccgattgactgctagcgctctcggcttgtctcgcgcactgtagctgagccaatggagttactcgtagtcgagaggccggcatcactggagtggtggcgcagctgtttcctccggatatccatcaaatattgagaagaaagaatatcaggagcaaagtgttctaagttgctgctcagaacgtaaagatgcgaaccccaaatcagtggtttgttcattcttcatgcaagagcaatgcactaaaggagagaagcaagctgtggtgatcagtgactttggtgaaagctaagaaggttcaaacaaatttgcaaatgatatacaacttctaagcattccatattggaagaagagatttctacacatgaaaaaaatgcctttgtttagtaaatcacacaaaaatccagcagaaattgtgaaaatcctgaaagacaattcggccattttggaaaagcaagacaaaaagacagacaaggcttcagaagaagtgtctaaatcactgcaagcaatgaaagaaatctgtgt

SEQ ID NO: 151415 - DNA, 475 bp, Homo sapiens
gcgtcgacgggtgtatgtttggtagtaaaagtataaagacggccaggcgcggtggctctcccaaagtgctgtgattacaggcgtgacgactgtgcccggccgagtattatttttaaaactaaattatgctaggtacactcttaacaaggcaaggatttccattcacaaaaggaagcgtaaattatgcaggctaaatgaagcactgtcatacccaaaatattagatacaatattttcttatgatttaacttttacaaagggcctctttgtcagaagttgctgaagttcccggttcagcctattaattgctgcatattctttgaaaacaaaattgttgatgattcagatgtatgtgtgactgtgcgaagaaaccccgtccatagtaaaaaaatgcaaaattagctgggaatggtggcacatacctgtaatcccagctactcgggaggctgaggcaggagaattgcttgaaccccgga

SEQ ID NO: 151416 - DNA, 329 bp, Homo sapiens
  misc_feature (1)...(329): n = a,t,c or g
gcggcggcggcgaggaggggaatttccttgtgcctccattcccgggaggggggagcggcgttggaggccaccgtttcnnnnnnnnnnnnnnnnnnnnnnnnnnnnnnnnnnnnnnnnnnnnnnnnnnnnnnnnnnnnnnnnnnnnnnnnnnnnnnnnnnnnnnnnnnnnnnnnnnnnnnnnnnnnnnnnnnnnnnnnnnnttatatcctgtgttgtgacctcatggtttaagtgggaataaagatgagtataagcagtgatgaggtcaacttcttggtatatagatacttgcaagagtcaggattttctcattcagcatttacctttgg

SEQ ID NO: 151417 - DNA, 461 bp, Homo sapiens
cggcacgagggcggaaggagaagatgtgccgccgctgccaacgtcgagcggcgacggcatgggaaaaagatcttgaagaagctctggaagcaggaggttgtgatcttgaaacgttgagaaatataattcagggaagaccggctgcctgctgatctgagggccaaagtttggaagattgctctgaatgttgcaggaaaaggtgatagtttggcatcatgggatggtattttagacttgccagaacagaacactattcacaaagattgccctgccagtttattggaccagctttcagtgccagaggagaaggcagcagaattacttttggatattgaatctgtaattaccttttattggaaatcacgtaacattaaatatagcacatcccttagctggatacatctactgaaaccattggtgcatcttcaactgccacgcagcgatttatacaactgctttta

SEQ ID NO: 151418 - DNA, 897 bp, Homo sapiens
cccctttttcccaaaaagactgcccaggcacaggttgcccaacagaagcttctcatagaactccactccaccacaggcataggctgcaagagagggaagccgtgcggcggtccagccaggactccacggcatgagtgagagaatcctgggagaaggcgtaggccacaaagcctgccactgctgccaccaagctgaaggcagcccgtaaattcatggggcctgcatggagccccagggtgtacttggcacccacgcccagtgcccaggtccctgccaggcaagctggggccagcagggcgtgcacggcagtggtactgctttccaggtacaccacttccctggccaaggcgaacttctgggcttcacgggacaaggtcagggaagctctcagccgggcgcctgctgggctccgccagtccactgtatgcccatgtatgaccacgggatggttagtgttgatcactaggtctcccaagaaactggcagggatgcccaccacagccccagcagggagtcttgggaaaccctgcactcacaggcctggaaaggtgaaggtggtgaaagggccttgttagcaatggccctgaaaggaacaccctatgtccctgtagcaccctcttggaagaaggctctgcagctgtggagggaagcggagcctggggtgccctgaggccagtactggtagagccattggaccacgggatccgggaagaggtggtacgagattggaactccaaacaggcctgcacaggaacccaccaagaggcctgtcctgtgtctctgcacaaatgctgcggtccgccacaggggacctgccatgagtgtagtcactgcggacaatcgggtcgcatcaggccggagaagggtccctcccgctcgtccgtgcgcgcacctccg

SEQ ID NO: 151419 - DNA, 505 bp, Homo sapiens
  misc_feature (1)...(505): n = a,t,c or g
tgggannnagagttgatncccttgncngttgagaaccgctcggccgacccacgcgtccggcagtagatcgcgatctagaactagtccggacgcgtgggaatgacttattttgagctatctttcttatactgggacctttctaatctcactacaatatgtaacattggtgttcgatctcaagtatttctgaatatattcccctatccacagaaatatactctgggggaaaaaaaatagaacaaattcttgccgtcctgaccattgaacaagagactaattagacaatggggctagaaaaacctcaaagtaaactggaaggaggcatgcatccccagctgataccttcggttattgctgtagttttcatcttacttctaggagtctgttttattgcaagttgtttggtgactcatcacaacttttcacgctgtaagagaggcacaggagtgcacaagttaaagcaccatgcaaagctcaaatgcatcaaagagaaatcagaactgag

SEQ ID NO: 151420 - DNA, 494 bp, Homo sapiens
ctgtaaatccggctggactttcagttactaagaacagaccgtttctcgaggatccaggcgcatgaggacaaagcaaggggtgagagaactcttcacgctgcagtgcccacaccaggttatccagaatctgaatccatcatgatggcccccatttgtctaggggaaaaccatgaagagcagctgacagtgaattcaaaggcattagagattcttgacttgatttctcagcccgcggtgggggtggccattgtagggctataccgcacaggaaaatcctatctcatgaatcgtcttgcaggaaagcgcaatggcttccctctgggctccacggtgcagactgaaactaagggcatctggatgtggggtgtgccccaactatttaagccaaaccacaccctgggccttttggacaccgaaggcctgggcgatgtagaaaagagtaaccctaagaatgactcgtggatcttttgcctggctgtgcttctaagcagcag

SEQ ID NO: 151421 - DNA, 407 bp, Homo sapiens
  misc_feature (1)...(407): n = a,t,c or g
ctgaccttggtcatttgtatgtacgggagaggaagtggatcaaagaaagtgggaagaagaacagaagtagcaatgttatgcttggcagtcatctacacacaaatgtagttttgtgaatgaagaaaacctcacattacttagcataagtgaagacactgggcagccaggnnnnnnnnnnnnnnnnnnnnggggggggccgttttaaaggatccttgggggggccaaagtttacgggggcttgcaaggtattatttttttccttatagggggccgttttaaaacctacttgggaatttttggaaaggaccttttttttgggggggggacatattgggccaacttccttccggaattttaaggctttagggaaaatataaaattttaaggggtatagggggtaaaccaag

SEQ ID NO: 151422 - DNA, 434 bp, Homo sapiens
  misc_feature (1)...(434): n = a,t,c or g
ctcagatcaagatacggaagagcccagcactccacgatgctccatcatgcccctttgcagaaaatactgcctcctccagtaaacactattctgatgtcacnnnnnnnnnnnnnnnnnnnnnnnnnnnnnnnnnnnnnnnnnnnctgaacaatatgaactgtcctgtgtgatttcttgtatttcattatgggtggtgtgctattgtatcaacagggtatttgggtggttttcagatttgtgatattaacaataaaggaattataaatattgtagtacnnnnnnnnnnnnnnggggcggccgttttaaaggatccttgggggggccaaagtttacgcgggcaggcaaggaatagttttttccttatgggagccgaataataaccaacttggggatttttggaagggacctttattttgggggtgaacatatatgan

SEQ ID NO: 151423 - DNA, 422 bp, Homo sapiens; identical to SEQ ID NO: 133176
  misc_feature (1)...(422): n = a,t,c or g

SEQ ID NO: 151424 - DNA, 443 bp, Homo sapiens
  misc_feature (1)...(443): n = a,t,c or g
agaagttgaaacactatatttatcttgtcagtttttatatttaaagaaagaatacattgtaaaaatgtcaggaaaagtatgatcatctaatgaaagccagttacacctcagaaaatatgattccaaaaaaattaaaactactagttttttttcagtgtggaggatttctcattactctacaacattgtttatattttttctattcaataaaaagccctaaaacnnnnnnnnnnnnnngggggggccgttttaaagaacccttgggggggccaaattttacgggggcttgcaaggtaatagctttttccttatagggagccgtattaaaacctacctgggaattttggaaaagaacctttccttgggggggggaacatattgggccaacctccctccaaaatttaaaggctttagggaaaatataaatttttaaggggtatagg

SEQ ID NO: 151425 - DNA, 400 bp, Homo sapiens
  misc_feature (1)...(400): n = a,t,c or g
catactgcaacagaccgaaggcggaagcagctatgaggatgcagcagccttctgttaagccaggctttaaggatctgcaaaaatgtaaaacgatgccactcctactgatgaaatatattgttttggaaaatataggtttaaaaatttttttaaggtaacatgtaatggatgtatagtcttcaaatggatgaataaatgtttttcagagttnnnnnnnnnnnnnnnnnnnnnggggggggccgttttaaagaatccttgggggggcccaagtttacccgggcttgcaaggtaatagttttttccttataggggggcgtattaaaacctacctgggaatttttggaaagaacccttatttttggggggggacatattgggccaacctcccttcggaaattta

SEQ ID NO: 151426 - DNA, 930 bp, Homo sapiens
  misc_feature (1)...(930): n = a,t,c or g
gtggcttcgggatagggggcagacgaccccgnggnggggagagcgaggccgggccagaacagttatgatttattcctcctggctgccgccgcccggggggcgggcgggcattacgcgccgccgtgcacagaggactgcagaaaatcaacctatcctccttcaggaccaacgaacagaggtgcaggtccatggtacaccataaatcttgacttaccaccctacaaaagatggcatgaattgatgcttgacgaggcaccaatgctaaaggttatagtgaattctctgaagaatatgataaatacattcgtgccaagtggaaaagttatgcaggtggtggatgaaaaattgcctggcctacttggcaactttcctggcccttttgaagaggaaatgaagggtattgccgctgttactgaaatacctttaggtaaagttcacttagaagctttaaaaaaaaaaagtaattaaattcttttacaagtttccattgaggtgtgatatacatacagcacaggtgctgtatgtcttagatatacagcacaggtgctgtatgtcttagatatacatacagcacaggtgcacaggtcttagatatacagctcaagtgaagcttcagaaaatgcatgcatgcatgtagccattgactcagatcaagatacggaagagcccagcactccacgatgctccatcatgcccctttgcagaaaatactgcctcctccagtaaacactattctgatgtcactatagattagttttgcctcttcgtgaactttgtataaatagaactgaacaatatgaactgtcctgtgtgatttcttgtatttcattatgggtggtgtgctattgtatcaacagggtatttgggtggttttcagatttgtgatattaacaataaaggaattataaatattgtagtacaaaaaaaaaa

SEQ ID NO: 151427 - DNA, 550 bp, Homo sapiens
  misc_feature (1)...(550): n = a,t,c or g
agaaagtttgcctatctggggcgcctggctcacgaggttggctggaagtaccaggcagtgacagccaccctggaggagaagaggaaagagaaagccaagatccactaccggaagaagaaacagctcatgaggctacggaaacaggccgagaagaacgtggagaagaaaattgacaaatacacagaggtcctcaagacccacggactcctggtctgagcccaataaagactgttaattcctcnnnnnnnnnnnnnnngggggggccgttttaaaggatccttgggggggcccaagtttaacgggggcttgcaaggtaaaatttttttccttaaagggggccttataaaaacctacttggggattttttgaaaaggaaccttttttttgggggggggaaatattgggacaacctccctccagaatttaaaggctttagggaaaataaaaaattttaaagggtaaagggggtaaaacaactcgcatatgcttgggggttggaaagttttgcttccggggtttgatttttgaaaatttttttccccggggctgg

SEQ ID NO: 151428 - DNA, 2388 bp, Homo sapiens
  misc_feature (1)...(2388): n = a,t,c or g
ctctttttgcctctgctggagcccggcgagaggcgtggtttgttatatcgaagccgacccggaggagctgtcgccttaatcctcctggctgccgccgtcagcttgtgccgttctcgcagcacgcgccgccgtggacagaggactgcagaaaatcaacctatcctccttcaagaccaacgtacagaggtgcagttccatgggacaccatacagtgcttgacttaccacccgtacaaaagatggcatgaattgatgcttgacaaggcaccagtgctnaaaaggttatagtgaattctctgaagaatatgataaatacattccgtgccaaagtggaaaaattatgcaggtggtggatgaaaaattggccgggcctacttggcaactttccttggcccttttgaagaggaaatgaagggtattggccgctgtttactcgatatacctttaggagagattatttcattcaatattttttaatgaatttatttaccatttgtacttcaatagtagcagaagacaaaaaaggtcatctaatacatgggagaaacactggattttggagtattttcttgtgtggaacataaataatgatacctgggtcataactgagcaactaaaacctttaacagtgaatttggatttccaaagaaacaacaaaactgtcttcaaggcttcaagctttgctggctatgtgggcatgttaacaaggattcaaaccaggactgttcagtcttacactgaatgaacgtttcagtataaatggtggttatctgggtattctagaatggattctgggaaagaaagatgccatgtggatagggttcctcactagaacagttctggaaaatagcacaagttatgaagaagccaagaatttattgaccaagaccaagatattggccccagcctactttatcctgggaggcaaccagtctggggaaggttgtgtgattacacgagacagaaaggaatcattggatgtatatgaactcgatgctaagcagggtagatggtatgtggtacaaacaaattatgaccgttggaaacatcccttcttccttgatgatcgcagaacgcctgcaaagatgtgtctgaaccgcaccagccaagagaatatctcatttgaaaccatgtatgatgtcctgtcaacaaaacctgtcctcaacaagctgaccgtatacacaaccttgatagatgttaccaaaggtcaattcgaaacttacctgcgggactgccctgacccttgtataggttggtgagcacacgtctggcctacagaatgcggcctctgagacatgaagacaccatctccatgtgaccgaacactgcagctgtctgaccttccaaagactaagactcgcggcaggttctctttgagtcaatagcttgtcttcgtccatctgttgacaaatgacagatctttttttttttccccctatcagttgatttttcttatttacagataacttctttaggggaagtaaaacagtcatctagaattcactgagttttgtttcactttgacatttggggatctggtgggcagtcgaaccatggtgaactccacctccgtggaataaatggagattcagcgtgggtgttgaatccagcacgtctgtgtgagtaacgggacagtaaacactccacattcttcagtttttcacttctacctacatatttgtatgtttttctgtataacagccttttccttctggttctaactgctgttaaaattaatatatcattatctttgctgttattgacagcgatattattttattacatatcattagagggatgagacagacattcacctgtatatttcttttaatgggcacaaaattggtgcctttgcctctaaatagcactttttcggggtcaagaagtaatcagtatgcaaagcaatcttttatacaataattgaagtgttccctttttcataattactctacttcccagtaaccctaaggaagttgctaacttaaaaaactgcatcccacgttctgttaatttagtaaataaacaagtcaaagacttgtggaaaataggaagtgaacccatattttaaattctcataagtagcattgatgtaataaacaggtttttagtttgttcttcagattgatagggagttttaaagaaattttagtagttactaaaattatgttactgtatttttcagaaatcaaactgcttatgaaaagtactaatagaacttgttaacctttctaaccttcacgattaactgtgaaatgtacgtcatttgtgcaagaccgtttgtccacttcattttgtataatcacagttgtgttcctgacactcaataaacagtcactggaaagagtgccagtcagcagtcatgcacgctgataaaaaaaaaaaaaaaaaa

SEQ ID NO: 151429 - DNA, 628 bp, Homo sapiens
cgcgtgtccctttaacaagagtgctgaggatcttctcaatcttgtcagggtctgacagcagggcagctcccattcctcccttggtggaatattgttttggacagcccatgttgacatcaataccagccacatcattttctacaagcttggccacagcaagggctcgctctgcgtctgaagtccccatctggaagaccaccctgttctgctctctttcacaggtgcggaagacaactcgatcatcaggggcgacaaagtccactgtgctgagcacctcattaacaactctcttgcactgaatcatcttgaggtcgatcagctcctcacagtaaacaatgtccgctccataatccagggccagcagcctcattggaagagtccctacccgaaccattggggccaggattagcttattatggtaacacagagagaggctattcaaaatcatttcctcctctgttacagcctattattttgttctgatacttcaggattactttgatatatgtgttctggctttgtacagagtaattctttgtttgatatctcgcagctgaactcttaaaaagaacctcgcttcttcctcacggtgctccagctccacacaccgtactgagcctcgaattcc

SEQ ID NO: 151430 - DNA, 948 bp, Homo sapiens
atggggtggggcctgtcgtcaaggaagggactcagccctggaggtttctgtgagagctcaagccacaggagccacaggataagaggagtgtggctgcagaacccaggtggcaggcctttcctcaggccccttactcctgacctggacgaggccggggcttcctcaaggaggtaggaggtatcctggccagcagatcagccagaagctctaggaggaaggtgctgcggccggggactctgctgccctagacaagacttcatttccttccatgcagatggctgtgctctctgactgccacccctgcctgcctgcccggccctgcacaacatgcagccctccggcctcgagggtcccggcacgtttggtcggtggcctctgctgagtctgctgctcctgctgctgctgctccagcctgtaacctgtgcctacaccacgccaggcccccccagagccctcaccacgctgggcgcccccagagcccacaccatgccgggcacctacgctccctcgaccacactcagtagtcccagcacccagggcctgcaagagcaggcacgggccctgatgcgggacttcccgctcgtggacggccacaacgacctgcccctggtcctaaggcaggtttaccagaaagggctacaggatgttaacctgcgcaatttcagctacggccagaccagcctggacaggcttagagatggcctcgtgggcgcccagctacacacttgtacaagcacaattacacatgcatatgccactacgtacacagacacatgtcctcagccgtgttcgtgctccgaggaggtgctcagcacagtggactttgtcgcccctgatgatcgagttgtcttccgcacctgtgaaagagagcagaacagggtggtcttccagatgcctttggtgaacacctataaagtcaattcccattctgtccccactaactcctga

SEQ ID NO: 151431 - DNA, 493 bp, Homo sapiens
gcgagaagtcctcatttctgtgtgcaggcgagcttcttggcctaagggcaggaagagatggcagcgggggagacgcatctctacgccaaggtctccaacaagctcaagagccgcagcagcccctcgctcctggagcccctcctggccatgggcttcccggtgcacaccgcgctgaaagtgttggcagccacggggaggaagacggcggaggaggccttggcctggctgcatgatcattgcaatgacccttccctagacgaccccatcccccaggagtatgcccttttcctctgtccaacggggcccctgctggaaaaacttcaagagttctggagagagagcaagcgccagtgtgcaaagaacagagctcatgaggtcttcccacacgtgacactctgtgacttcttcacgtgtgaagaccagaaggtggaatgcctgtacgaggcgctgaagagagctggagacaggctcctgggctccttccccacggccg

SEQ ID NO: 151432 - DNA, 406 bp, Homo sapiens
acaaactcagagagaacccaccatggtgctggctcctgccgacaaaaacaacgtcaaggccggctggggaaagggaggcgcgcacgctggcgaacatggcgcggaggccctggacaggaagatcctgtacttccccaccaccaaaaactacttcccgcacttttacctgagccacggctctgcccaggggaagggccacggtaagaaggaggacgacgcgctgaccaacgccgtggggcacggggaccacatgcccaacgcgctgtgcgccctgagcgacctgcacgcgcacaagcttggggtggacccggacaactgtaagctcctaatccactgcctgctggtgaccctgtgcgcccacctccccgccgagttcacccctgcggtgcacgccaccctggacaag

SEQ ID NO: 151433 - DNA, 654 bp, Homo sapiens
aatagccactgtcatatcatttttaaaggaatataaattataggggatgttgtttctttgggtttttttttttttagagacaagatctctccgtgttgtctaggctggactcaaacttctggactcaagcaatcctcgcaacatcattaatagctgagagtagagacttgagccaccacacctgactatagggtctttttgaaaggaaaattgacatcatcaaaattttaaatatattcagtctatttcttataaactcaaagaatactaataaatgtgtactcaggtatatgtacagaaattgctgtaacattataattttaaacaatttaaaacagactgagcttccaaaggtagggtacaatgaaagaaaaggtggcttatttatactctggaatattttccaagagttgaaaaggatgaggatacacacacacacacacacacacacacacacacacacacacacacacacacacagtttgggtatccctaatccagaaattcaaatgctccaaagtccaaaactttctgacccaccaacatgactgatgctcaaaggaaatggccactggaagatttcagattttcagatttggaatgctcaaccagtaagtatataatgcaaataatccaaaatacaaaaaaaaaaaa

SEQ ID NO: 151434 - DNA, 584 bp, Homo sapiens; identical to SEQ ID NO: 132836
  misc_feature (1)...(584): n = a,t,c or g

SEQ ID NO: 151435 - DNA, 1034 bp, Homo sapiens
tgagacgttagtttcctttatatcttttgttactggcggtagcagtgaagttagaaacggttttaaaacaaatttcagacaggcattttccaaaggcaagcctggagcgcacggatctgtataaccgcggaaggccctgtttccggtcccttgcgcctgcgctcttgcagccaagaaggcgggaggctggagtagagggaagcctgcaaccggaagtgaaggcagatttccctccttcgtcgctgttgctgccgccatacgcgctctccctgtttaggtaagctttggccttcgctacaatccgtttccatctgcgcttctccgcacccatcccgtcacatgggttcctgatacccttttcacaggcgatggtctggtcgctggggcctagttggttcgctatttccttagcttgcatccctttcgagagcaaagagctcctgggggaaggaagggaagctaaggggggacccaatccaagatggtgtcctcggcgccattgtgttcgttttgctcccttcttccaatgggttcttctcatattggaggcctcagcatcaatgagaggcggtgctcggcgtcccttggtcttggtatttgcggagggcggggctcttctcaccttccttgttctttcttgagctctttttcggccctcggtgggactgggaggaggagctggtttctgggcccaggtggatttttctcaccttgacttgcccaacttaatttggagtgccttccaagtgtttacgatacgattggtgtcattgtatgtttctccaaaaggagtctcaccttcgtagcgtaacagtgatgtgagaccacttgttatggcagagaacgatgtggacaatgagctcttggactatgaagatgatgaggtggagacagcagctgggggagatggggctgaggcccctgccaagaaggatgtcaagggctcctatgtctccatccacagctctggctttcgtgacttcctgctcaagccagagttgctccgggccattgtcgactgtggctttgagcat

SEQ ID NO: 151436 - DNA, 1724 bp, Homo sapiens
ggcacgaggcaaccggaagtgaaggcagatttccctccttcgtcgctgttgctgccgccatacgcgctctccctgtttagctcttctgttagaaatagtatctttgttttcctttgctgttcctcagtcccctgactcttcaccccttgttttcacctattttgcgagaacccatccagatcccccttcccttcttcccctgccggcccagttatggcagagaacgatgtggacaatgaagctcttggactatgaaagatgaatgaggtgggagacagcagctgggggagatggggctgaggcccctgccaagaaggatgtcaatgggctcctatgtctcccatcccacagctctggctttcgtgacttcctggctcaagccagagttgctccgggccatttgtcgacttgtggctttgagcatccgtcagaagtccagcatgagtgcatccctcaggccattctggggaatgggatgtcctgtgccagggccaagtcgggcagtggggaaagacaggcagtgttttgtcttggccacactgcaacagctggagccagtttactgggcaaggtgtctgtgctgggtgatgttgtcacactcgggagttggcttttcagatcagcaaggaatatgagcgcttctctaaatacatgcccaatgtcaaggttgctgttttttttggtggtctgtctatcaagaaggatgaagaggtgctgaagaagaactgcccgcatatcgtcgtggggactccaggccgtatcctagccctggctcgaaataagagcctcaacctcaaacacattaaacactttattttggatgaatgtgataagatgcttgaacagctcgacatgcgtcgggatgtccaggaaatttttcgcatgaccccccacgagaagcaggtcatgatgttcagtgctaccttgagcaaagagatccgtccagtctgccgcaagttcatgcaagatccaatggagatcttcgtggatgatgagacgaagttgacgctgcatgggttgcagcagtactacgtgaaactgaaggacaacgagaagaaccggaagctctttgaccttctggatgtccttgagttcaaccaggtggtgatctttgtgaagtctgtgcagcggtgcattgccttggcccagctactagtggagcagaacttcccagccattgccatccaccgtgggatgccccaggaggagaggctttctcggtatcagcagtttaaagattttcaacgacgaattcttgtggctaccaacctatttggccgaggcatggacatcgagcgggtgaacattgcttttaattatgacatgcctgaggattctgacacctacctgcatcgggtggccagagcaggccggtttggcaccaagggcttggctatcacatttgtgtccgatgagaatgatgccaagatcctcaatgatgtgcaggatcgctttgaggtcaatattagtgagctgcctgatgagatagacatctcctcctacattgaacagacacggtagaagactcgcccattttggaatgtgaccgtctgtccttcaggagaggacaccagggtggggtgaaggagacactactgcccccacccctgacagcccccaccccatggcttccatcttttgcatcaccaccactcctgaacccccatttctgatttgtcagaattttttttttaacaaaactaaaaatgaaaaaaaaaaaaaaa

SEQ ID NO: 151437 - DNA, 385 bp, Homo sapiens
ggcacgagccacccttgtctcggccacctcaaggataatcactaaattgtgccgaaaggactgaggaacggtgcctggataagggccataatatcactggatgggcatgagtaacttgaaactgctgaagtacgtcctgtttttattcaacttgctcttttgggtaagagcatctcttctgagcacgggttagctcacctttacccagctaacctctcctcattcctctactgaaaaggctggtgtggggtaaaatgcgtgcctgtttgggtcatgttcagcacagccatcctagaaacgaaagagtaattattctttccctcttactgccacacaataaacctgcacaattgaaaggtaccaacgcttgtattactggaggtgg

SEQ ID NO: 151438 - DNA, 422 bp, Homo sapiens
  misc_feature (1)...(422): n = a,t,c or g
cccacgcgtccgtgtgaccacagggcagggcagccaccaggagagatatgcctggcaggggccaggacaaaatgcaaacnnnnnnnnnnnnctgaaacaaagtcttgctctgcccccaagtgggagggcagggggccgatctaggcccattgaacgccttgctgggggagtaaacgggattcccttgccttggccaccaaaaaggatnnnnnnnnnnncgcaaaacaacctccccgggggccttttatttgggggggaaagggggttaccccggtcgagtaaggggggccgtaaaaaagcccccgggggaattttggggggggccccaacttcgggggggggaccccgggggcacccccccctccggaattaagggctctcggggaaaaaaaagattttttggggcttcggggggaaacccc

SEQ ID NO: 151439 - DNA, 416 bp, Homo sapiens
ctgagctgaaggattgtggttggggaaagcgtagtcccagcaaggaagcagtttgtgggtaactgctgggaggtgagtggagtgagcttgtcacggagctgctggtggagcctggaggggaatggagggaggcagtgatagagatcgcggtgggggttgtgaggatgaattccgcactcatgactgacaacttacttgtgtgaaacataattgacgtgtggaagttcatttcaagagctgtgactgtcaaaaggccgaggaaggcggctgttctcagaaaaacttcacccggggtcctttatcagatacgtgtattggaattctcaaggggagccacatttgccgatacagtgaatgtggtaaaatattccccgacccacgatacttttgtgtgagtaggaacatccatacccggt

SEQ ID NO: 151440 - DNA, 682 bp, Homo sapiens
agagacttcattactgaaatctgcaaggatgatcaggagcagcaattagaatttggagcagtatataccgccacaataactgaaatcagagatactggtgtaatggtaaaattatatcccaaatatggactgcggtactgcttcataacacacaacttgatcaacgaaagattaaacatcctactgccctaggattagaagttggcccaagaaattcaggtgaaatactttggacgtgaccccagccgatggaagaatgaggctttctcggaaaagtgcttcagtcgccagctacaaccgtggtcagaactttgaatgacagaagtagtattgtaatgggagaacctatttcacagtcatcatctaattctcagtgattttttttttttaaagagaattctagaattctattttgtctagggtgatgtgctgtagagcaacattttagtagtatcttccattgtgtagatttctatataatataaatacattttaattatttgtactaaaatgctcatttacatgtgccatttttttaattcgagtaacccatatttgtttaattgtatttacattataaatcaagaaatatttattattaaaagtaagtcatttatacatcttagaaaaaattacatagttttgtttttacaattctgaaatatatgaaaaacttagatag

SEQ ID NO: 151441 - DNA, 2700 bp, Homo sapiens
ggacttgtcggccgccgtagcccctgctaggacagcccgtgcgagcctgctggaggaggaagagaaaggcagaggagagtcgggttacaagatggcggatctgtagtagttaccgcggcggcgggagagcaagcgagccctggggggcaaagagacgggagagtgggtgtatgcgcgggtgaagtgagaggtaacggggcctccgggcggagaggcctcagtggctcttgtcaccccttctcgcggctgaacctttggagccatggtgaattcgggcctctccgaagccgccgccgccgccaccgccactactgcctttaccgtctcctaagagtgaggagcgcggacgaggtaagcgaggaggcggcggctagagcggtggagacagcagccaccatgtcggatacgcggcggcaagttgaaggtctataccctgaaacgaagaccggcaatgggacgaccgaggcaccgggcacgtctcctccacttacgtggaggagctcaaggggatgtcgctgctggttcgggcagagtccgacggatcactactcttgggaatcaaagataaatccaaatactgcatatcagaaacaacaggatacattaattgtttggtcagaagcagagaactatgatttggctctgagttttcaggagaaagctggctgtgatgagatctgggaaaaaatttgtcaggttcaaggtaaagacccatcagtggaagtcacacaggacctcattgatgaatctgaagaagaacgatttgaagaaatgcctgaaactagtcatctgattgacctgcccacatgtgaactcaataaacttgaagagattgctgacttagttacctcagtgctctcctcacctatccgtagggaaaagctggctctcgccttggaaaatgaaggctatattaaaaaactattgcagctgttccaagcttgcgagaacctagaaaacactgaaggcttacaccatttgtatgaaattattagaggaatcttattcctaaataaggcaactctttttgaggtaatgttttctgatgagtgtatcatggatgtcgtgggatgccttgaatatgaccctgctttggctcagccaaaaagacatagagaattcttgaccaaaactgcaaagttcaaggaagttataccaataacagactctgaactaaggcaaaaaatacatcagacttacagggtacagtacattcaggacatcattttgcccacaccatctgtttttgaagagaattttctttctactcttacgtcttttattttcttcaacaaagttgagatagtcagcatgttgcaggaagatgagaagcctttgtctgaagtttttgcacaattaacagaagaggctacagatgatgataaacggcgtgaattgggcatggatgatttgcaagtcagatcagctgctacagatatattttcttatctagtagaatttagtccatctatggtccgagagtttgtaatgcaagaagctcagcagagtgatgacgatattcttcttattaatgtggtaattgaacaaatgatctgtgatactgatcctgagctaggaggcgctgttcagttaatgggacttcttcgtactctaattgatccagagaacatgctggctacaactaataatacctttacccaggaaagatatggggaatccctgaataaactattactgccccctctctactccctgcaagagacaagacttctaaaaactgatatttggccaacggacagtggcatgttaacagctctatcagtcccattgccccactcaggcccgtggcttcaggactggctctgccccactgctgcttcccatcgcgttgtgtgggacggttgccctccaccagcagagggcaaagggccacaagctaagttcctaggaacgtcacatactggtgccatccaacaacatgacgacgtgcggaaccgaagtccccttccacctagcggcctctcgcggcgcaggcgtggacggggagatcgcgagaacctcccgcccaattgcgaccccgcgccaagaggcggggccgaaagaggaggaagtcgggccgaaagaggaggaagtctcgccgaagtactcccgccccagtcgggtacccctcctcgcgagagcgccgagcattccggcctgggaagcgcgtgcagaagcggagcccctgctaggacagcccgtgcgagcctgctggaggaggaagagaaaggcagagagagtcgggttacaagatggcggatctgtagtagttaccgcggcggcgggagagcaagcgagccctggggggcaaagagacgggagagtgggtgtatgcgcggagtgaggagcgcggacgaggtaagcgaggaggcggcggctagagcggtggagacagcagccaccatgtcggatacgcggcggcgagtgaaggtctataccctgaacgaagaccggcaatgggacgaccgaggcaccgggcacgtctcctccacttacgtggaggagctcaaggggatgtcgctgctggttcgggcagagtccgacggtaagtgtctccgggtaaacagtgtcgaaggtgaattggagaacacccacctggtgtctaatatggaactgattgattattggtggggagaaatcctcacacttcttggtgatgaaggtgacagcagtgatttgtgttgtgatagtgtagtatga

SEQ ID NO: 151442 - DNA, 439 bp, Homo sapiens
gccctaaatccattaaactttggattcatttacagccgcatgtttctgtgagcacagagttggggctaaagttataggctaacaacatctcaaagcagaaacaatttttcttagtacagatcaaaatggagtttcttatgtcttccttttctacacagacacagtaacaatctgatctttcttttccccacatggactaatgcgatatcatagatatggtgtgtcttcagttacaagatgctctgtttgaattatatacattttagaaaactatgtacagatgaataatttaaaattaattgtaagtggtatttgtggtcttgatagagttggccacgatgtccaaatgtaatattaagcctatgggaaagtcagagccacttttttttttttttgagtcagagtcttgctctgtcgcccagactggagtggagtggca

SEQ ID NO: 151443 - DNA, 404 bp, Homo sapiens
gcgccccgcgccctgcttgcctccattatccagccttgccccggcgccctgacctgacgccctggcctgacgccctgcttcgacgcctcctttctctcccaggggctggaccagggactgagcgtcccccggagagggtccggggtgaccccgacaagaagcaaaaatggggaagaaactggatctttccaagctcactgatgaagaggcccagcatgtcttggaagttgttcaacgagattttgacctccgaaggaaagaagaggaacggctagaggcgttgaagggcaagattaaaaaggaaagctccaagagggagctgctttccgacactgcccatctgaacgagacccactgcgcccgcttgcttgagcccttaacacttgtttgggaaagacaaaagg

SEQ ID NO: 151444 - DNA, 343 bp, Homo sapiens
cctccgtgtctctacccttctctttaaacttgcctcctttactatgggcaaccttccaccctccatttctccttcttctcccttagcctgtgttctcaagagcttaaaacctcttcacctcttgcctgacctaaaatctaagcatcttattttcttctccaacaccgcttggccccaatacaaactcgacaatggttttaaatggccagaaaatgacactttcgatttctccatcccacgagacctagatactttttgtcgaaaaaagggcaaatggtctgaggtgccttacgtccaggcatttttcacactttgttccctcctgtcgtacatgacacatacc

SEQ ID NO: 151445 - DNA, 341 bp, Homo sapiens
ccgccatgttggccatggcgtattgaagagagcgagcgagagaggagcggagcggcacagcctcccaccctcccggctggtgttagtgcccggacggcgggctctgcgctccgcccctcaagtccccggcagcggttggcgagtggggaccgaacccccggttctccatgatcccgctggccggggccgtttccccagagcggagaggtatctgctgcgcctgagatgagtaaactgtcgtttcgggcgcgggcgctagacgcctcgaagccgctgccggttttccgctgtgaggatctgcccgacctgcacgaatacgcctcgataaacagggcccgtgc

SEQ ID NO: 151446 - DNA, 408 bp, Homo sapiens
atggaacctaaagactagaggcggttgtgtgagtcaggaagaggggccagatatctgagtgttcctctttagtttcttcaattgcaggaaagacagtggttcctgactcaggaagacagtctcagaaacatgtggaatgatattgagctgctaacaaatgatgataccggaagtgggtacctgagtgtcggttcaagaaaagaacatggaactgctttatatcaagtagatttgctagtgaagatctcttctgaaaaggcctcattaaatccaaagatacaggcatgcagcttaagtgatgggtttattattgtagccgaccaatcagtgatattgcttgacagtatttgtagatcacttcaattgcatcttgtctttgatactgaagtggatgtagttggcctttgg

SEQ ID NO: 151447 - DNA, 644 bp, Homo sapiens
gcggttgtgtgagtcaggaagaggggccagatatctgagtgttcctctttagtttcttcaattgcaggaaagacagtggttcctgactcaggaagacagtctcagaaacatgtggaatgatattgagctgctaacaaatgatgataccggaagtgggtacctgagtgtcggttcaagaaaagaaacatctctgcactttctccaagcttctaatttttaccccagtgccaagaaatagcagaaccaaactggaagccacctggctagaagtctgggaggagtggtccgcaactgtaaacccccagcactgcagccggtggcctagaaaggcgtgtggagcaaaaagccagcacacagaagtgttaattacacctgttattctgactttgtagtcctttgccatacttgcgaataacttaagtgaatttgatgttactggaattagtttgcctttattttgccagttgaaaaaaaagatttctaaaaaactcaatgaaacatgattcaacacaggtttcgaagtaaaataagtctggatttgagttctagttctatcacttactagctgtgtgggcctgaacaagttatttaatttcccacagagagaaacaagggtggtgctgctgtcacccaagctgagaaga

SEQ ID NO: 151448 - DNA, 480 bp, Homo sapiens
gcacgagtgaagactgaaagagtcgaatggtttgttggcaggacctataagaatcccttaggatgaagctgagtcttaccaaggtagttaatggctgtcgcctaggaaaaataaaaaacctgggcaaaacaggggaccacaccatggatattccaggctgccttctgtataccaagactggctccgccccacacctcacccatcacacgctgcataatatccacggggttcctgccatggctcagcttacgctgtcatccctagcagaacatcatgaagtcttgacagaatataaagaaggagttggaaagtttataggcatgccagaatcactcttgtactgctccctgcacgatccagtcagcccctgcccggctggttatgtaacaaacaagtctgtgtctgtgtggagtgttgcacgacgagtggaaatgactgtttccaagttcatggcaattcaaaaggcccttcagccagact

SEQ ID NO: 151449 - DNA, 399 bp, Homo sapiens
tgacttggtaccaagggcttctatgtgaaaacccttacacacctttagaacactaaacaccctaacctggctattgtgctcccagtcgaacaggcagctcttctccataactgtgtcaaaacagtagacgaggtatttcccaatgagaaagatcttacagacagacccctcagagacccagatgtcaagtacttcacaggtggaagtagttttgtgctggaagagtttggacatgccaggtatacagtggtaacatcagactcagtagtagaggctcagcctctgcctaccggaacatcagctcaaaaggcagaattaatagccctgacaagagcactgttgctagcaaaagagaagaaagtcagtatttacactaattctaagtatgcttctcgtgcc

SEQ ID NO: 151450 - DNA, 664 bp, Homo sapiens
attcggcacgcggagccaggcagaggcaggcatctatagtcccaaagtgctgggattacaggtgtgagccaccacatctggcccaagtcacccaaattttttacagcttggtttggaaggcaatgtagtatattaaaattatgggccctggagtcagaaagatccaggtttgaatacagagtccgtcatttattagctttatgaatttgagcaatttcgtctcacttgtaaatatagggaatagctcctacctctcaggtatgttgccaaaaaactatattaaaagcacttagcataagtggcccatgacagagtaagcactcagtaaatcatgccatttatctcatcttataaggcatgaaagtagaattttacaagttgtacagaaatagaaggcttggagtggacactacattaaaaggataaaaaaatggagccaggcagaggcaggcatctatagtcccagctattgaggaggcctgaggctggaggatcccttgaacctaggagtttgaggccagcctggacaacaatgtgagattgtggctccaaaaaaataataaaaaataggctgctctgcctatggagtagccattcttttattcctttacttttttaataaacttgcttttactttatggaaaaaataaatttttaaatgaca

SEQ ID NO: 151451 - DNA, 366 bp, Homo sapiens; identical to SEQ ID NO: 145060

SEQ ID NO: 151452 - DNA, 782 bp, Homo sapiens
aatagactcactaataggaaatttgcccctcgaggcccaagaattcggcacgaaggggcggtcccgcgggtctgtctcttgcttcaacagtgtttggacggaacagatccggggactgggcttccagcctccgaccgccctccgatttcctgctccgcttgcaacctccgggaccatcttatcggccatctcctgcttctgggacctgccagcaccgttttttgtggttagctccttcttgccaaccaaccatgagctcccagattcgatcagaattattccaccgacgtggaggcagccgtcaacagcctgggtcaatttgtacctgcaggcctcctacacctacctatctctgggcttctatttcgaccgcgatgatgtggctctggaaggcgtgagccacttcttccgcgaactggccgaggagaagcgcgagggctactagcgtctcctgaagatgcaaaaccaagcgtggcggccgcgctctcttccaggacatcaagaagccagctgaagatgagtggggtaaaaccccagacgccatgaaagctgccatggccctggagaaaaagctgaaccaggcccttttggatcttcatgccctgggttctgcccgcacggacccccatctctgtgacttcctggagactcacttcctagatgaggaagtgaagcttatcaagaagatgggtgaccacctgaccaacctccacaggctgggtggcccggaggctgggctgggcgagtatctcttcgaaaggctcactctcaagcacgactaa

SEQ ID NO: 151453 - DNA, 608 bp, Homo sapiens
gccccctcgtatctctgagaagttgctcagagtaggacacagagaaatatggcccccaccctgggaagtactgctgtcactgtttaagtgtatttcagttctgttactccaattcatacacacagtcttccatgaggatggtaggatgaacctggttagctggctttggataagtagatcagcatgactacctggaataaaagtgactgactctaggataaaaaattaaaaaaagattctttcacagcaacgagtctttgcaaaacctctctcctaataatcacaaaccaggggaagaaaagtgggagcagggaacacaggaacacagccaaagggaatattgcaaaatgcttcccgagcttcatcagacagacttcttgcaatgccacgactggatgcatctgcacacaattccgggaaatgcccaccttgctgttctcctatccccaattttctttctttctttctttttttttttctttttttgagacagagtctctgttacccaggctggagtgcagtggtgcaatctcggctcactgcaacctcgacctcctgggctcaactgatcctcccaccttggccccccaaataacctgcactacacg

SEQ ID NO: 151454 - DNA, 431 bp, Homo sapiens
tgcatcgcatcagctcccaacgcatctagcaggaaaggagagggagctttccccgaagaccctcctggaccagccccaggctcctgtgctggttgcacgccagggcctgtactgaccacctccacgtaccactggggctgtattgaggaatggcggccgtgggcaacctgcttggccgggtgaggcaaagcaccgtgaaggtcaccggacctgcactccaccgcctgcacacatccttctggcgagctgacagcaacagggcctcactcactcgtgtgcaccgccaggcttatgcacgactctacccagagctgttggagaagcaggatggctgcaccatccacatacgctacagggagccacggcgcatgctggcgatgcccatagatctggacaccctgtctcctgaggagcgccgggccaggctgtga

SEQ ID NO: 151455 - DNA, 700 bp, Homo sapiens
gtggtggaattcccttccttttaaaaagatctcttcattctctgcctagcaggttgcacgccagggcctgtactgaccacctccacgtgccactggggctgtaaggaggaatggcggccgagggcaacctgcttgggtaagcatggacttttaggtccctggggattactgtcaggggccaacccaaggaacccctctcttcagcaggaaaccgccattctaatcctccctaggccttgctattggccactgtcccctgtgctggaagcctttgtgcccttgctcagcctggcagcctcttcctggctagggggccagaacgcctctgaccacagcctgtggctcctgaggaagccccgaggctcatcctgccccggcacgggtcaccagctctggtaatgtctcctgtggcccggcagtgcccaatcacagccagcctcagtcatgttggcactctgctgcagcactgtcggctgaccagagcttgaacatttatctgcagccggctgaggcagagcaccgtgaaggccaccggacctgcactccgccgcctgcacacatcctcctggcgagctgacagcagcagggcctcactcactcgtgtgcaccgccaggcttatgcacgactctaccccgtgctgctggtgaagcaggatggctccaccatccacatccgctacagggagccacggcgcatgct

SEQ ID NO: 151456 - DNA, 1442 bp, Homo sapiens
  misc_feature (1)...(1442): n = a,t,c or g
gcggccgcaggttggcgcctcgtgtgggccgggaacattggcgggaggcgctgtaccctcccggtggagtcgggagggagggaggcagggaaggggacagggggctgcacctgtaataagcccttgtccccatgcagtctagcaggaaaggagagggagctttccccgaagaccctcctggaccagccccaggctcctgtgctggtgaggccgagggagagggatgtgggcatagggacacggtaacaaggatattccattntttaaaggggaacgcgactcgggtttccgggggctttccttttggggggggaaaaaagaggnngnccccacccacaaaaaaagagttggcttttttggggggctttttttttcggtgtgggtgttggaaaaagggnnnnnnnnnngggccctcccccccaaatttcctggggaatccgggcccaccaaaaagcctgggccttcattctcctttaagcaagcatgacaatcctcacttcactgagtttttattaaaactagcaatgaccttagaaagcaaggcatgacctcagctccacttttgaggctgcagtccattcagagaggtttcgcagactcggtaacggccagaacagacagcctgggccctgccgcaggctgactcagaatctttgggagtagtgaccaacttctgcttttggaaaaacctctacaggcggttctgagaagtccaagggttgctgggagaggttggttgcacgccaagggcctgtactggaccacctccacgtgccactggggctgtaaggaggaatggcggccgtgggcagcctgcttggccggctgaggcagagcaccgtgaaggccaccggacctgcactccgccgcctgcaacacatcctcctggcgaagctgacagccagcagggccctcactcactcggtgtgcaaccgcccaggctttatgcacgactcttcccccgtgctgcttggtgaagcaggatggctccaccatccacatccgctacagggagccacggcgcaatgctggcgaatgcccatagatctggacaccctgtctcctgaggagcgccgggccaggctgcggaagcgttgaggcttcagcttccagttcgaggaaggagttacggagcaggagctcagttgatgactttgcatgtggagctgctaccgacagttcttggaccaggaccaagaagtgaccgtggctccagccaccccgggacattgctaagatgggagggctgttcttaaatcactcgttcttgaaaaaaaaaaaaaaaaaaaaaaaaaaaaaaaaaagcgcggccgaaagtttttttcctttagtnagggttattttagnttggnattggcctcttttnaaaactcgtnattggggaaaacctgggggtttacccatttaattcgctttnaagaanatccccttttngcaantgg

SEQ ID NO: 151457 - DNA, 426 bp, Homo sapiens
cccgcggacccaccagccccgaacggggattcttggcccagccggccggcgcgcgtgaggaggggcgttagggcgcgcggggtctccaccttctgtcgaccccgcgtcgggtgttgcagtctccgaggcggcgaggagtcctctgggctcgggcttcacctctcgggaaggagtcaagactgagaacaacgatcatattaatttgaaggtggcggggcaggatggttctgtggtgcagtttaagattaagaggcatacaccacttagtaaactaatgaaagcctattgtgaacgacagggattgtcaatgaggcagatcagattccgatttgacgggcaaccaatcaatgaaacagacacacctgcacagttggaaatggaggatgaagatacaattgatgtgttccaacagcagacgggaggtgt

SEQ ID NO: 151458 - DNA, 2352 bp, Homo sapiens
atggtaaagggatcaattcaacaagaagagctaactatcctaaatagatatgcatccaatacaggagcacccagattcataaagcaagtcctgagtgacctacaaagagacttagactcccacacattaataatgggagactttaacaccccactgtcaacattagacagatcaacgagacagaaagtcaacaaggatacccaggaattgaactcagctctgcaccaagtggacctaataggcatctacagaactctccaccccaaatcaacagaatatacatttttttcagcaccacaccacagctattccaaaattgaccacatacttggaagtaaagctctcctcagcaaatgtaaaagaacagaaattataacaaactatctctcagaccacagtgcaatcaaactagaactcaggattaagaaactcactcaaaaccgctcaactacatggaaaatgaacaacctgctcctgaatgactactgggtacataacgaaatgaaggcagaaataaagatgttctttgaaaccaacgagaacaaagacacaacataccagaatctctgggacgcattcaaagcagtgtgtagagggaaatttatagcactaaatgcccacaagagaaagcaggaaagatctaaaattgacaccctaacatcacaattaaaagaactagaaaagcaagagcaaacacattcaaaagctagcagaaggcaagaaataactaaaatcagagcagaactaaaggaaatcgagacacaaaaaacccttcaaaaaattaatgaatccaggagctggttttttgaaaggatcaacaaaattgatagaccgctagcaagactaataaagaagaaaaaaagagagaagaatccaatagacgcaataaaaaatgataaaggggatatcaccaccgatcccacagaaatacaaactaccatcagagaatactacaaacacctctacgcaaataaactagaaaatctagaagaaatggataaattccttgacacatacactctcccaagactaaaccaggaagaagttgaatctctgaatagaccaataacaggatctgaaattgtggcaataatcaatagcttaccaaccaaaaagagtccaggaccagatggattcacaaccgaatcctaccagaggtacaaggaggaactggtaccattccttctgaaactatcccaatcaatagaaaaagagggaatcctccctaactcattttatgaggccagcatcatcctgataccaaagccaggcagagacacaaccaaaaaagagaattttagaccaatatccttgatgaacattgatgcaaaaatcctcaataaaatactggcaaaccaaatccagcagcacatcagaaagcttatccaccatgatcaagtgggcttcatccctgggatgcaaggctggttcaatatatgcaaatcaataaatgtaatccagcatagaaacagagccaaagacaaaaaccacatgattatctcaatagatgcagaaaaggcctttgatgaaattcaacaatgcttcatgctaaaaactctcaataaattagaaccatctaatcatactgcgctggctggtgtgggtgtgcaccaggaggactccattgcagctctggcctatgatctggatgaaaatcacaatttttcacaggccttagctgcgccccaggactcccatatcatccagtcatgtaggaaaaaccaactgtctgctcccttctcagcagccggctctgcagttcatgcagctcccatgcacagctgcatggccagctctccctatagggtgcggacccgccacctcttttgtgaagcagcagctgaggagactccggtgttcaccatggccaacgaaaagcccacagaagaagtcaagactgagaacaacaatcatattaatttgaaggtggcgggacaggatggttctgtggtgcagtttaagattaagaggcagacaccacttagtaaactaatgaaagcctattgtgaaccacggggattgtcaatgaagcagatcagattccgatttggtgggcaaccaatcagtggaacagacaaacctgcacagttggaaatggaagatgaagatacaattgatgtgtttcaacagcctacgggaggtgtctactgaaaagggaacctgcttctttactccagaacgctgttctttaaagaccaagattactgcattctcaattagaaaactgcaatttggttccaccacattctgactactacagtatagttttctctattcttttgtttcccccttccacattcctttattatacatgaagtaactggtatgtgtacacaagcatattgctttttt

SEQ ID NO: 151459 - DNA, 1172 bp, Homo sapiens
atgaggaaagagcagaagatggaaggggacacctatgagattatgcagggtggggggagggagcgcacgacgtgcgcgcaccctctcccctcgtccaccgctgccgcctccttcttctgccgctcctggtgctgcttgtgtgcctcgtttggtgcggacctgcgtacctcttyttgtgaaagcggcagctgaggagactccggcggctcgccatggcccgacgaaaagcccaaggaaggagtcaagactgagaacaacgatcatattaatttgaaggtggccggggcagrgatggttctgttgtgcaagtttaagattaagaggcatacaccacttagtaaactaatgaaagcctattgtgaaccgacagggattgtcaatgaggcagatcagattccggatttgaccgggcaacccaatccatgaaacagacacacctgcaccagttgggaaatggaaggatgaaagataccaattgatggtgttccaacaagcaagaccgggaggtgtctacttgaaaaagggaacctgcttcttttactccaagaactctgtttctttttaaaggacccaagattacatttcttcaattaggaaaacttgcaatttgggttccacccacatccctgacttacttaccctattagttttctcttattcttttcatttccccctttcccccattcctttatttgttacataaagtaactgggtatatgtggcaccaagccatattggcattttttttttttttttttaactaaacgagccaatggtatgttttgattgacatccaagtgggagacggggatggggaaaaaatactgaatccgtgaaaaatacccccctttctcccattagtggcatgctccattcagctcttatctttatattccgagtaagttattttgctctcactgttttaacaaaaaaaaaaaaacaacaacataaaaatccttgcataccttgttcaattggagaattttaatgtttttcatttatcattgtaaaaccaaggacaattttataacttttttgtacgtagctgttacatgtagggcaatctgtctttaagtagggataaattactctaaaacaaaaaagaatcctagatagttttcccttcaagtcaagcgtcttgttgtttaaataaacttcttgtttaaaaaaaa

SEQ ID NO: 151460 - DNA, 406 bp, Homo sapiens
gaggtttttaaaatttatcagagcaaacagattctttgagatatctaattctaaataatgggtataaatttgggaaaggcagattttgaaatctgaactctcattgcaattttacatgaagaacactgtaggcagatacccaaataaatgtgtggggtatttcaggggattataagggaatacttcatatttgggaataatttttgaaatcctgatctggaatctgttcttgtacagatttgactatgaccacagtggaagaggattctgacacagtaacagtaaaaactgtgaactctgtgactttgactcaggacacagaagggaatctcattcttcactgccctcagaatggtaggagaacttgctgacatataattctgactctctgaatttatgaattccg

SEQ ID NO: 151461 - DNA, 787 bp, Homo sapiens
aattcggaacgaggcctagttcaggcttactatctagaacctcatgctagcttaggttgcatgtttacattgctgcagtgtctttactggaagcttagttggatcgaaatggacaccgagatggagatgcttctggctacatttcgcagaaccccaggagacctgcatttagaccactctgtccatttgtgtgcccacccccacccccagggtctaagtgtagactccaagaggagcagcccagagcttggaggagaggtgtgtctggggcaccactggtgggtggtgctgctcttctttttgttgtagttaatgcggtgtcttttaatgggactctcaggcctcccagacagccttgttcctttaaggcagaagctcttctttcattgtgtacctcctggggattcatgaggtgtgagatttggcctgcttgactttgaatttcaagtttttcaagtgactctcagtgtcagaagaagcatttcatgctgtccacatgtggtatgtccacagctcaccttcaaaggcttagatgtagccatcacagagagtggtattttattaagaacccaagtcccagcctgaccaacatggtgaaaccccatctctactaaaaatacaaaaattagccgggcgtggtggcacgtgcctatactcccagctacttaggaggctgaggcaggagaatcacttgaacccgggaggcagaggttgcagtgagccaagatcacaccactgcactctagcctgggcgacagtgagactccccctcaaaaaaaaaaaaaaa

SEQ ID NO: 151462 - DNA, 401 bp, Homo sapiens
acagacaccagacctgctgcctgaggccctggaagcccaagtgctgccagcaaagagattgaggagctcagaagagcccacagagaaggaacctccagggcagttacaggtgaaggcccagccgcaggcccggatgacagtaccgaagcaggtgaggtccagagatatatccagagaggagtggaagggctcggagacctacagccccaatactgcatatggtgtggacttcctggtgcccgtgatgggctatatctgccgcatctgccacaagttctatcacagcaactcaggggcacagctctcccactgcaagtccctgggccactttgagaacctgcagaaatacaaggcggccaagaaccccagccccaccacccgacctgtgagccgccggtgcg

SEQ ID NO: 151463 - DNA, 454 bp, Homo sapiens
  misc_feature (1)...(454): n = a,t,c or g
ccccgnnnnnnnnnnnnnnnnnnnnnnnnnnnnnnnnnnnnnnnnnnnnnnnnnnnnnnnnnnnnnnnnnnnnnnnnnnnnnnnnnnnnnnnnnnnnnnnnnnnnnnnnnnnnnnnnnnnnnnnnnnnnnnnnnnnnnnnnnnnnnnnnnnnnnnnnnnnnnnnnnnnnnnnnnnnnnnnnnnnnnnnnnnnnnnnnnnnnnnnnnnnnnnnnnnnnnnnnnnnnnnnnnnnnnnnnnnnnnnnnnnnnnnnnnnnnnnnnnnnnnnnnnnnnnnnnnnnnnnnnnnnnnnnnnnnnnnnnnnnnnnnnnnnnnnnnntcaaagttaaaacaggttaccactttcacctattaccatcaggttgcttatttttgttttatgaatatatatttgtatgcatgtttactttatgtttcagtttaccgggcgcgtgggtcgacacggaaattcgaga

SEQ ID NO: 151464 - DNA, 2795 bp, Homo sapiens
ttcaagaccagcctggccaacatggtgaaaccccgtctctactaaaaatacaaaagttagkcgggtgtggtggtgcatgcctgtaatcccagcvtcttgggaggccaaggcacyagaatcgcttgaaccaggagacggaggtttcagtgaatgaagatcgtgccattgtattccagcctcggcaacacagcaggactgtgattttctttggagactcctagattttctgtggttttgaactgaathtgttggatgttggcaagtgcgctcttatgagctgtgtctvtatcctgcatgtgcccgcacagagacttatctgggaggtgagcaaagtatgtttggtagtgaggtcasaaaggcaatcagccccttcctcccggactcccattgccatcttctcagtccttctccctttctttcccaagtagtttacccacccctccttcttttcctcccctgtccctaaaataatccacgtgtctttcttaaaattctctctttgatcctgtcctttggataacaccgtcagtggcctactactggggtctaggacaggacctctgttgaggcagtcaggagtcttccctggacttccacaatggcccctttcctggggttggaccagtatgactactggtacccaccttaatcttctttatacatacctccctacaactatgggagtaccatccctctattcacccattcattcatgaccatttttggactaccaagctccccccctcccgaaggaggctgaggtttttgtgactctctagactctattgtgggatggaatgaacattgctaaagaatcttgtgttcgctttacttttaaaaaggtattttttttcctaattataaaaactgatgtgtccagttaacggggaaaattagaaatgccagccacaaataacatgtaatattttacccacaaaattgcccatataatatcttgtcttttttggggggtgtgaattttttgcattgttctggtcatagtgctttatcatgtaatttatgttcttttttactaagtattatgtgtggttattatagattttcacaaagatatattgctggtaatatattttattgtgtagtcttataatttacttaaccttctttcaattgttagaaatttaggctatttccagattttcagtattgtaaataatgctgtgatgaccaattttgtgaataaaatgtttttatgtatttcagattattcccttaggatagtctctcagtgccaagttgtcaaaaacatctctattttgcttatcttcctgctctcttgcttgccttagggggtagtaaactgaaacataaagtaaacttgcttacaaataaaaaccttaaaccaaaattaggcaccctgatggtaataggggaaaggggtaacctgttttaactttgaatttttgccgggagccaccatgcccagccagattttttgcagtttaacacgtttccaaaaagggggttttaggtcaggccctggggctggaagcagggacccatgagggccaaggcctggtccttgccttcaaaggctgacccagttatagtccaggggggggaggggccagctggggctgctcatagcctttggcagccaaagtggggtattgaggggctggggaggaagcgttgtggtgggggggcctgcagtcctaggcagggtagtatgaggcccagcttcattgctcagtagtcacatcatctcaggcaagccacttggcctctctgagcctcagttgcctctgctcagaagtaacaacctgaacttggactatcagggaagcccagggcccacagcttggtcctaggaagggcttagcaaacgggggtggttgtccttcttggaagccacatttgtttgcctggagagtggaggagggcactgctaggcctgctagggctgacacggccagagtcagatgacctcatctcacatccagcaggtgaaatgcagtctttgatcccttgaaacccaccctctaggaccaaggtcactgcagtattggataggacctcagggagttagcagggggctcatggttaagagtgtgaactacggcttagacctacagggttccctgcccagctcctccacaaaccagctgtgcaaccctagacaagtgagttaatgtccctgggcctcagtttcttcttagtaaaatgtgtgtaagccatagagggctgttatgaggattcagtcaaatgacacatgatgtcttgggcacacctggcgtggattatggcgcctgtaggagcaggagggcttcctgggaggagggggctagttgaacagagtctagaaaagtatagattgggaagagcacttttggggaggcaggattcaccatgtgcaaaggctcaggagaattgccacccaattaccttcctggaaaatcaaggggattctgtgtgtcccaaagggcaattggtggtcttctaggccccccgacctgtgtcttgggaggtgtcaaggggaagcccagatccgaggcccacacttgcatgttttcaggtgaggtccagagatatatccagagaggagtggaagggctcggagacctacagccccaatactgcatatggtgtggacttcctggtgcccgtgatgggctatatctgccgcatctgccacaagttctatcacagcaactcaggggcacagctctcccactgcaagtccctgggccactttgagaacctgcagaaatacaaggcggccaagaaccccagccccaccacccgacctgtgagccgccggtgcgcaatcaacg

SEQ ID NO: 151465 - DNA, 1385 bp, Homo sapiens
  misc_feature (1)...(1385): n = a,t,c or g
ccagataacaagaggggcccccccaggccccagcttgatttaggagtgtaagttccactcagcactcagcccacgctgagtctgatgcccacaggtaaagggtaatgctggccatcgaaatacaaaagctaaaggaagcacaccattctctctgcctccctgccttgcacctggcctccttatctgtctcccagacttgaaagatcagtgtatacacatcaacgcggtagaccagggggagtctgccaatgaaaggagagacagccatgagatcagggtgggactggtaagggagctcttctctgaatccaaaatactttatcaccaaagatttcatgaaatgacatttattgtttaaaaaagcgtgagtctggaattagatagtcggtgatggttgaacaagtttgtgaatttactaaaaccactcaattgtacgcttaaaaaaaaaagcaagcttgagctgcctaagtcccgctcacacacactgggacttgtactaaatgctcaacgattccattctctcaggactatgggaacattctgtcacatttttttccttcagggggatttccctaaggaaggagctgtttgcaaaatattgcacttaatttggaatccgggggggacctggatgtctcctggggaggaaaacgtacacttcacatggccttcctggcctggcggcaggatgggccgggagtgggtgggggacaaggggggcttcaacaggcagtttttcccatggaacattgttttccctttttcccctttgtttatacacacagagacacagatttaaaggaaagtatcatctgggctgaaggcggtgaatggtatcccccaaacagggatgtgaacttttgaatgttttcagctcagaggcagtatggtcgtcctaatacctcaggacttatgttcagtgagatgttaagagacaggtggcaaccttggctcaaacactggacttaatttattttattcttgctagtctttcacttctcaaagacgatgctctcaatcttcatccaggtgaactgctccccactaatcctagcccacccattcaagtcaacacccctacgtccctcgtttccctcnatgctttcagcgttccgacacctcagtgcacttgaactttagaggctatggttcggttgtccttgaaggaaaaaaactgcaacatgaccatcatttgttttcatttcctgagtaagctttgcagtccctcacagacctgtgaataagatgaatcacataaagtgaatcatatcctccaggggggcttatcacaatcaagatttgccaaaaaacagccaggcatggtggcttgtgcctgcagtcccggctgcttgggaggctgaggtgggaggatcccttgaagcaag

SEQ ID NO: 151466 - DNA, 1457 bp, Homo sapiens
gtgtagcacggggatgcatctaatcattttcagtagagtctgaagaaacatttggttgcctcctcccacccaagtcctttgatatggacttatgaactgagtaattatgaagcaatgaagactgcttggggtcttcatctagcccgacatctaggggctaggtgtcaggatgccaaagaaaatttatcagagagtaaagtgtcccttacggaaattatgaagtaggttaagacagatgttaagaggaggaggttgtcattcattgcacagctagaaagattagaagagactggtagatacagccaagagttgtctctggtaaccataatgagagcagtttccgtgaactgatgagacaattaggagggtggctacagggaatgaagagggagtttccagggcagcagtgaaaacatgagctctggaccttgtttagtcttggatatttcaccatcctctcacaaaaataaacactctggtacccagtaaatacctgatgaatgaatctttgggaaagaaaatcactgaatgcataatttttctttattgaaaatattgggatagcactgcattacatatagtcaatatccataaatgaagggtcacacatttctgaatggacaatactgttttacatagagaacacagcatctggatatgctctcacaattatagtatcatggactaaactaggtcagagtgaagtatatgcaaaatgaccattttgtttttttccattttattaataggcatatgggttgcaggatgggtgtaaatgggtaaacgtggatatccatggggacattcctggatatctcacaccaacacattatttaacgagcaggttaaggtgaaactgccagtatgctgttaggtcaagagtcctcagtagggagaacttgaggtgaaacgtacacccaggctacagatttaaaaattttatgccattcatttaaatttgcatggaattaaggagtataataattgttgatctgacaggaggccactggacaatttgttctctttcacaaaatgtctaaaataggagaataatgtaaaggaagtattctaagaattgcttttttaaatgccagatatgtaaatagtacttgttatacatttttcctttccaaaaattaccggggaaataatttatgacagaccatttttcagctttggttattatttgaaaatttttccaacaaagcaacaagtctttggctttcataaaagtctggtaatcaataatattggttaagtaagtctttattattattattattgttattatttttaagacagagtctcgctgttacccaggatagagtgcagtggcacgatcttggctcactacaacctctgcttcccggattcaagcaattctcctgcctcagcctcccgagtaggtgggattacaggtgcccgccacatagtcggctaatatttgtacttttagc

SEQ ID NO: 151467 - DNA, 438 bp, Homo sapiens
ggcggcggggcagtcccggtaagcgcccgggagcctctgcctttggccctcacggatctgcaggtgacgaggaggaacctatcacctgccatcctattacccaatttgccacttccagcagctttaacccatgaggaggatgtgaccgggactgattcaggagccctctggaagcatggacactgcggtgattgttgccataagagggctggccaccatctttctggcttcgtttgcaaacctggggctggttttcaggcagcgctactgccggccgcgagacctgctgcagcgctataattctaagcccattgtggacctcattggcgccatggagacccagactgagccctctgagatagaactggacgatgtcggtatcaccaacccccacattgatgcccctcttgagaatgaaaaaagggatcaaatatgcct

SEQ ID NO: 151468 - DNA, 2389 bp, Homo sapiens
gagtatgcatcaacaattgtgtcaggaacttcaaagggacaatgtggacctatttgtacagtcttcattatcggctaaagagcgccaccttgctgcagttgccagtgcactgtggagacatttcttttcatttttgaagagtcagagaatgtcacaggtagtgcctttctcacaacttgcggatgcagctgcagactttactttgctagcaatggacatgccaagcacagctccatcagattttcagcctcagccagttatatcaattattcaactttttggttgggatgatatcatctgccctcaagttgtagcaagatatttaagtcatgtcctacaaaatagcacattatgtgaagcactttctcattcaggctatgtatcttttcaagccttaaccgtaagatcatggattcgttgtgttttgcaaatgtatattaaaaacctctctgggcctgatgatttgctcatagataaaaatctggaagaggcagttgaaaaagagtacatgaaacagttggtcaaactgacaagattactatttaatctctcagaagtaaagagtattttctcaaaggcccaagttgaatatttatccatctcagaagaccctaaaaaagcacttgttcgattctttgaggctgttggtgtaacttacgggaacgtccagacactttctgataaatctgccatggtcacaaagtccttggaataccttggtgaagtattaaaatatattaagccttatttgggaaaaaaagttttcagtgcagggctgcagctgacttatggaatgatgggaattcttgtgaaatcatgggcacaaatctttgccacttctaaagcccaaaaattactattccggatcatagattgtttactgctgccacatgcagtattacagcaagagaaggaactgcctgcacctatgttgtcagcaattcagaaaagtcttcctttgtatctccagggcatgtgtatcgtgtgttgtcaatctcaaaatccgaatgcctatttgaatcaattgctagggaatgttattgagcagtatattgggcgatttcttccagcttcaccatatgtttcagatcttggacaacatcctgttttgctggcattgagaaacacagccactattccaccaatatcatctctaaagaaatgcattgtgcaagtcataaggaaatcctaccttgagtataaggggtcctcacctcctcctcgcttagcatccattctggccttcatcctccaactcttcaaggaaactaacacagacatttatgaagttgaactactcctccctggcattttaaaatgcttggtgttagtcagtgaaccacaagaaatacaaactaccatcggagagtactataaagaactctacacaaataaactaaaaaatctagaagaaatggataaattcctagacacatacatcctcccaagactaaaccaggaagaagtcgaacatctgaatagaccaataacaggtattgaaattgaggcagtaattaatagcctaccaaccaaaaaaagcctaggaccagacagattcacaactgatttctaccagagttacaaggaggagctggaaacattccttgtgaaactattccaatcaatagaaaaagagggaatcctccctaattcattttatgaagccagcatcatcctgatactaaaacctggcagagacacaacaacaaaaaaaaattttagatcaatatccctgatgaacatcaatgcaaaaatcctcaataaaatactggcaaaccgaagccagcagcacatcaaaaagcttatccaccacgatcaagtcggcttcatccctgggatgcaaggctggttcaacatatgcaaatcaataaacataatccatcacataaacagaaccaatgacaaaaaccacatgattatctcaatagatgcagaaaaggcctttaacaaaattcaacagtacttcatgctaacaactctcaataaactaggtattgatggaacgtgtctcaaaataataagagctgtttatgacagacccacagccaatatcgtactgaatggacaaaaactggaaacattccctttgaaaactggcataagacaaggataccctctctcatcactcctcttcaacatagtgttggaagttctggccaggacagtcaggcaagagaaagccataaagcgtattcagttaggaaaagaggaagtcaaattgtctttgtttgcagatgacatgattgtatatttaggaaaccccatcgtctcagtccaaaatctccttaagctgataagccacttcagcaaagtctcaggatacaaaatcagtgtgcagaaatcacaagcattcctatacaccaataacagacagagagacaaatcatga

SEQ ID NO: 151469 - DNA, 1332 bp, Homo sapiens
atgaatagagggagcacaaaggattttggaggcagtggaaatgcactgtatgatattgcaatgatagatgcagaaatatgggactatgtgaaaagaccaaatctacgtctgattggtgtacctgatagtcacggggagaatggaaccaagttggaaaacactctgcaggatattatccaggagaacttccccaacctagcaaggagctggttttttgaaaagatcaacaaaattgatagaccactagcaagactaataaagaagaaaagagagaagaatcaaatagacacaataaaaaatgataaaggggatatcaccaccgatcccacagaaatacaaactaccatcagagaatactataaacacctctacacaaataaactagaaaatctagaagaaatggataaattcctggacacatacaccctcccaagactaaacaaggaagaagttgaatctctgaatagaccaataacaggatctgaaattgaggcaataattaatagcttaccaaccaaaaaaagtccaggaccagacagattcacagacgaattctaccagaggtacaaggaggagctggtaccattccttctgaaactattccagtcaatagaaaaagagggaatcctccctaactcattttatgaggccagcatcatcctgatacaaaagccgggcagagacacaacaaaaaaagagaattttagaccaagatccctgatgaacattgatgcaaaaatcctcaataaaatactggcaaaccaaatccagcagcacatcaaaaagcttatccaccatgatcaagtgggattcatccctgggatgcaaggctggttcaacatacgcaaatcaataaacgtaatccagcatataaacagaaccaaagacaaaaaccacatgattatctcaatagatgcagaaaaggcctttgacaaaattcaacagcccttcatgctaaaaactctcaataaactaggtattgatggaatgtatctcaaaataataagagctatttatgacaaacccacagccaatatcatactgaatgggcaaaaactggaagcattccctttgaaagctggcacaagacaaggatgccctctctcaccactcctattcaacatagtgttgaaagttctggccaggacaatcaggcaggagaaagaaataaagggtattcagttaggaaaagaggaagtcaaattgtccctgtttgcagatgacatgattgtatatccagaaaaccccaacgtctcaacccaaaatctccttaagctgataagcaacttcagcaaagtctcaggatacaaaatcaatgtgcaaaaatcataa

SEQ ID NO: 151470 - DNA, 282 bp, Homo sapiens
aggcagctcctggagcagagtcggcactcttgggttaacaccacggtactcatcacaggctgcaccaacgctgcgggcctcttggtggttggcaactttcagcctcgttttaggtggagtcttctttgtccatgagagttctcagctgcaacatggggcagccctgtgtgagtgggtgtgtgtcatcgatatcctcattttctatggcaccttcagctacgagtttggggcagtctcctcagacacactggtggctgcactgcacttagcccctgggccggg

SEQ ID NO: 151471 - DNA, 1299 bp, Homo sapiens
atgttatttcccaaagagacaagtggctttggacctggtcagttcccttgccacctgttcctgatgttatgcaccaaatgggagaagggagaagatggtgactgctccaacttgaaagctctggatgatcaaggagtttcaagcagtcagatggtagaatccatcagttttcctccccctccaaatgactgtgtacctccagctgctcaggactttggagggctgctccgagggccgcagctagagtcggcgccacgagggggccgagcagggtgcggcggcggcggggcgctccggggagggcgccgatggtcaggtggttgcctgcgcgccgccgactcgccaccgctccactgggccggcacccagcctctccttggcgtggcctcttcggttgtccagcccttctcccagccctggtccctcagaaggagggtaactcccttccagatgttacggtccgcctgcgtctctcagcacgccggtggcatttgggttgaccgcggaggcccccagtgccagagggtgttcacgttctgccgtgggctcagcccaaactttggacgctcagagacccaacgggagcgctggataaggtcctacaacgagtcctgccctcctgaccctgctgagcaagggggtcccaagacctgctgcaccctggacgatgtccccctcatcagcaagtgtggctcctatcccccagaaagctgcctcttcagcctcattggcaacatgggtgctttcatggtggccctgatctgcctcctgcgctacgggcagctcctggagcagagtcggcactcttgggttaacaccacggcactcatcacaggctgcaccaacgctgcgggcctcttggtggttggcaactttcaggtggatcatgccaggtctctgcactacgttggagctggcgtggccttccctgcggggctgctctttgtttgcctgcactgtgctctctcctaccaaggggccaccgccccgctggacctggctgtggcctatctgcgaagtgtgctggctgtcatcgcctttatcaccctggtcctcagtggagtcttctttgtccatgagagttctcagctgcaacatggggcagccctgtgtgagtgggtgtgtgtcatcgatatcctcattttctatggcaccttcagctacgagtttggggcagtctcctcagacacactggtggctgcactgcagcctacccctggccgggcctgcaagtcctccgggagcagcagcacctccacccacctcaactgtgcccccgagagcatcgctatgatctaa

SEQ ID NO: 151472 - DNA, 888 bp, Homo sapiens
ttacgtctcttcggttgaccagcccttctcccagcccttttcttttagaaggagggtaactcccttccagatgttacggtccgcctgcgtctctcaacacgccggtggcatttgggttgaccgcggaggcccccagtgccagagggtgttcacgttctgccgggggctcaacccaaactttggacgctcagagacccaacgggagcgctggataaggtgttgacccccttcccctcccccttcccggccagatacccactcctggactttgatctctctccaccaggccaggacagctgatggttgtggcagaaacatctcaaggtagctgggccgcccccactttcccatctacctcttgtcctccccccaacaccaccaccacccttggctcccttcctcatgaccgcctggatcctcctgcctgtcagcctgtcagcgttctccatcactggcatatggactgtgtatgccatggctgtgatgaaccaccatgtatgccctgtggagaactggtcctacaacgagtcctgccctcctgaccctgctgagcaagggggttccaagacctgctgcaccctggacgatgtccccctcatcagcaagtgtggctcctatcccccagaaagctgcctcttcagcctcattggcaacatgggtgctttcatggtggccctgatctgcctcctgcgctacgggcagctcctggagcagagtcggcactcttgggttaacaccacggcactcatcacaggctgcaccaacgctgcgggcctcttggtggttggcaactttcaggtggatcatgccaggtctctgcactacgttggagctggcgtggccttccctgcggggctgctctttgtgttgctgcaccgtgctctcttt

SEQ ID NO: 151473 - DNA, 687 bp, Homo sapiens; identical to SEQ ID NO: 114776

SEQ ID NO: 151474 - DNA, 848 bp, Homo sapiens
cccttgacccgcgctgcaggaattcggcacgaggacagtcaaagtgtgggcaactcatcgccagaaattcctgttctccctgagccagcatatcaactgggtccgctgtgccaagttctcccccgacgggcgggctcatcgtgtctgccagtgatgacaagaactgttaagctgtgggacaagagcagccgggaatgtgtccactcgtattgtgagcatggcggctttgtcacctatgtggacttccaccccagtgggacgtgcattgccgctgccggcatggacaacacagtgaaggtgtgggacgtgcggactcaccggctgctgcagcattatcagttgcacagtgcagcagtgaacgggctctctttccacccgtcgggaaactacctgatcacagcctccagtgactcaaccctgaagatcctggacctgatggagggccggctgctctacacactccacgggcatcagtggaccagccaccactgttgccttttcaagaacgggggagtattttgcttctggaggctctgatgaacaagtgatggtttggaagagaaactttgatattggtgatcatggagaagtcacgaaagtgccgaggcccccaggcacactggccagctccatggggaatctgacagtctccattctggagcagcggttgacactgacagaagacaagctgaagcagtgtctggagaaccagcagctaatcatgcagagagcaacaccatgatcaggggagcaggaatcaggagctcggtggatttgcaggtggcaggccagggatttgtaccatgggacttgggtaaataaaggggactgaactctgtgggaatcac

SEQ ID NO: 151475 - DNA, 1272 bp, Homo sapiens
gatgcagttacctgtgtggacttcagtatcaacacaaagcagctggccagtggctccatggactcatgcctcatggtctggcacatgaagccgcagtcacgcgcctaccgcttcactggccacaaggatgccgtcacctgtgtgaacttctctccttcgggacacctgcttgcttccggctcccgagacaagactgtccgcatctgggtacccaatgtcaaaggtgagtccactgtgtttcgtgcacacacagccacagtgaggagtgtccacttctgcagtgatggccagtccttcgtgacagcctctgacgacaagacagtcaaagtgtgggcaactcatcgccagaaattcctgttctccctgagccagcatatcaactgggtccgctgtgccaagttctcccccgacgggcggctcatcgtgtctgccagtgatgacaagactgttaagctgtgggacaagagcagccgggaatgtgtccactctcattgagatcatgtggggtttgttatctatgtgtgactttccacccccattgggacgtgcattgccgctgccggcatggacaacacagtgaaggtgtgggacgtgcggactcaccggctgctgcagcattatcagtggttgttggagttgaagcccacttggggctttgggctatggaggcagctggagccatttgtcttgcgctggctgactctcctagtgcacagtgcagcagtgaacgggctctctttccacccgtcgggaaactacctgatcacagcctccagtgactcaaccctgaagatcctggacctgatggagggccggctgctctacacactccacgggcatcagagacatatccagtgtgcaggactagtgggcctgttctccctgggccagcacatccagagggggtggctgctggccctggtctgccctcgtgggtttgctttgccgggtgccttggtgtacatgtccatgtgcactgccctttgtcaggcctgtccttccagtcatctcaagggcctgactcctggaggatggctggtggatcaggagacccgcgtggtggcactggtgccagtgccctatttgaggctctggaaagtcttgggaccagccaccactgttgccttttcaagaacgggggagtattttgcttctggaggctctgatgaacaagtgatggtttggaagagtaactttgatattgttgatcatggagaagtcacgaaagtgccgaggcccccagccacactggccagctccatggggaatctg

SEQ ID NO: 151476 - DNA, 380 bp, Homo sapiens
ctcatctttgggtgtgattttttaaagagaagaaataaaatattgtactcctgtagttgtttatatccaagtttaaatacagtatctattattttgtccagatgctttgggaaaatggaattaatggcattttagcagatgaaatgggattgggtaagacagttcagtgcattgctactattgcattgatgattcagagaggagtgccaggaccttttcttgtctgtggccctttgtctacacttcctaactggatggctgaattcaaaagatttaccccagatgtaagacatgcttccttatgttaaaattataattttacatgttttcttatgctttgttgtagtaggaattaaattgtagaactcttataatcaaaa

SEQ ID NO: 151477 - DNA, 1853 bp, Homo sapiens
tcaaattcataggatgtctttttattatgctaataatttaatcacattccatggggtccacaataaactctttatattgaattccattccataataaaaaaaaaaaaagaacaaaaaaacaaaaacaaagcaaggagctctatttttggggaaaaccaatgggtgctccacctgccttaactggattggtattattatttggcttttccaacacggcaatacaaacatattatgaaatgagtgaaaagggcataataattttattctaggtttctactaccttcatgattaagacttaactagctactgctgcttggccataatccactacagtccctaaacaaaaaaactatgaacaaagacaaaaataatccggtaatttctcctacaaaggttaacccaaattaacttacagcagaggtgaacaaactactgcctgtgtgccaacataacccagcttggtttttattagtaaggttttacatattatctatgattgttttcacactacattgggcaaagctggaataactgcaacagaaatcacacagcctgcaaagccctaaataattactatctggccccctccacggacacaaaaatttgttgaccccttggacttttccccaaattaatgtaagtctccagaatagtatgctagccaaaaagtggactacttcttcctttttttaatgagaaaaatgaaaaagtccaattagcttgcatatatatatctatccaaattcactcagccagaacacatttgatactagaaaaataaaaagagagcaaaaatcatgtaatagatcacagaacagcccccaagatgataaatattagtgttatttatgcacatatgaattctagcaaagccagtaacagaaattaacaaccaattccaattccaatatcaatgtataagcatgcaataaataagctactttctaattattttagttggcattttaagaaaaaaaaagagaaggaaaaaaaagacgctaaaccaagttttcaattacaacattaaaggaacagttacataaccttttgtttaacttctctctggttctgtttctgagaataaatacatttctgaaaaatgttgacctgacatcaaatttaacagaagtattaataaattgggaccatatgttagactcaagtagaaaacaggttttgttttcctcagagattaatgaacgttccccctcccccgccctgccaaagcccactaaattaaggtatatcactaaagtagaacataataaatggtatatatacatgttaacacatttatagcttaaagatagctataattaatttgcttaactctgactaatatttttaagaaagaaaaagcggaatgatcagtctcattatcaaatattcagcacagccctgatgagataatggtggacataaacatcttttgtaagaatatcaaacaggaaattttctcgctggcaaaattttagctgatacgtatctttagataggtcattaaaaatctgtgctacctgggttacccgaattaccagcgtgattcaaatatgttgctagctaaaaaactaataagcaagcacatattggctgtgaattctaaatgtgcctattttatttttgttcacgaaggaaatatccaaaataactgcaaaggatggttagtgaatctttaagatttgtaacttgaaatatctgtttattacaggggaaacactagaaattcccgatacagtaatgggccttactttattagcagcaggaacaagcataccagacacaattgcaagtgtgttggttgcaagaaaaggtaagaactagagtccctcaagctgcaatggtcattctacaag

SEQ ID NO: 151478 - DNA, 547 bp, Homo sapiens
tgataccctaatatgtcagttatttttacattcaaatctcagttttccacaatttacatccaagcacatatttatcacaaatctaaccactgttacacatcttcaaatcttacaatgtcagctctccctcctcttgccactgcccaaagcaaactagcacttttggtttttttttaagccgaaggcctaggaaggaccaaaggatacctgaattcaaggtcagtccagtcacccttcttgccctatgagctctcaggcaaacaagccaggagctgcccacactccggacccctgtaaggtgcagactacagccgaaaccaggaggattgctctcagaagcaagaaaagtgctgcctcctcggaagtcacaggcctgaaggctgaccctaccacatcatgtaagcctggaatccaagagacgaccttccctccccttccttcttgtgtcctctcttcacacagccccatcagcagcagtgaccacagtggctgctcaacttgggtaggagagcaagggagccacaggccagaaggcactacattgaat

SEQ ID NO: 151479 - DNA, 1296 bp, Homo sapiens
cggacgcgtgggcagtggtgcaggccaatcgcaaccagtcctctggaggcagggagactggggtggagacttcggagactgcagttgcagttgttccgtgtaggctgttgttgactctcgtatgaaagcccacgcgatccaagtgccctgcaggttttggtccagggaaaagttggtctctgcagatgactgtaaatgactacctggaggtcgattaaagtgcggtactgcgggattcaaccgatttccttcttcctctgactgcccggaaatatcagccaaaggccagcgttctaaggacatatggaattggctatggataattcatatgctttcaatcaacgaagcacatgtaatggaattccatctgagaagaaaaacaacttccttgtatcagaagatcatggacaaaaaatcttaagtgtactacagaattttagagaacaaaatgtcttttatgatttcaaaataattatgaaagatgaaataatcccgtgtcatcgttgtgtgttagcagcatgcagttgactttttcagggctatgtttgaagtaaacatgaaagaaagagatgatggaagtgttaccattactaatttgtcctccaaggcagtaaaagcatttctcgattatgcctatactggaaaaatatggaattggcctatggataattccatatgcttttccaatccaacgaagcacatgtaatggaattcccatctgagaagaaaaacaacttccttgtatcagaagatcatggacaaaaaatcttaagtgtactacagaattttagagaacaaaatgtcttttatgatttcaaaataattatgaaagatgaaataatcccgtgtcatcgttgtgtgttagcagcatgcagtgactttttcagggctatgtttgaagtaaacatgaaagaaagagatgatggaagtgttaccattactaatttgtcctccaaggcagtaaaagcatttctcgattatgcctatactggaaaaacaaaaataacagatgataatgtggaaatgttcttccagttgtcatcatttcttcaagtttccttcctatccaaagcttgcagtgactttttaataaaaagtattaatcttgtcaattgtttacagttattatctatatcagatagctatggctccaccagtttgtttgatcatgcattacactttgtacaacatcacttttctttattatttaaatccagtgatttcttagagatgaattttggagtactacagaaatgtctggaatcagatgaattaaatgttcctgaagaagaaaaa

SEQ ID NO: 151480 - DNA, 447 bp, Homo sapiens
  misc_feature (1)...(447): n = a,t,c or g
ntttnnnnnnnnnnnnnnnnnnnnnnnnnnnnnnnnnnnnnnnnnnnnnnnnnnnnnnnnnnnnnnnnnnnnnnnnnnnnnnnnnnnnnnnnnnnnnnnnnnnnnnnnnnnnnnnnnnnnnnnnnnnnnnnnnnnnnnnnnnnnnnnnnnnnnnnnnnnnnnnnnnnnnnnnnnnnnnnnnnnnnnnnnnnnnnnnnnnnnnnnnnnnnnnnnnnnnnnnnnnnnnnnnnnnnnnnnnnnncacatgcatgtttatatcagcccagtttgcaattgcaaaatcatggaaccaccccaaatgcccctcaatcaatgagtggataaaaaaactctnnnnnnnnnnnnnnnnnnnnnnnnnnnnnnnnnnnnnnnnnnnnnnnnnnnnnnnnnnnnnnnnnnnnnnnnnnnnnnnnnnnnnnnnnnnnnnnnnnnnnnnnnnnnngattg

SEQ ID NO: 151481 - DNA, 1173 bp, Homo sapiens
atggaacacgtctataacatattttccagtaacatcaaaaaggaggtagttggaagaaaaatgtattgcgataagaaacatcacacaactaagagaaactgtccgaataaacttcgccaaaactctggaaaatggtcaaaagattacaacatccaagtgaaagcagactcaagaaaaagacaactggaaaactttacgacatttttaacttgcctttgccccagcaaattggcagttctgaagtgtcagaagcccacgttcccagctttttgccccaccgccgacacagctttttgcaccctcgccgccgtggctttttgccgccgcggctttctgccgccgcggctttctgcccccccgccgccaccgccgctgctttttgccccaccgccgccgtggctttttgcccgccgcggctttttgccccccgctgtcacggctttttgcccccccgccgcagcgactttttcctcgccgcggctttttgccgccgccgctgttgccgccgctttttgcgcccgcggctttttgccgctgttgccgccgccttttgcccccgccgcagcggctttttgtccccgccgccgcggctttttgctaccgcgactttttgccccggtcgccgccgctttttgccaccgcgactttttgccctcgccgccgaggatttttgtccccgccgccgcggctctgagggcgggagcggcaggctcggctgccagctctactggcgtcctggcaagggcagcgcccaggggtgctccaggcccctgtggcctgcatagagcggcgctgcctgcggaggcgatgggggagaagaaggatggtggtggtgggggtgatgcggcggccacggagggtggcacaggggctgcggccagccgggcgctgcagcagtgcgggcagctccagaagctcatcgtcatcttcattggcagcctgtgcgggctgtgcaccaagtgcgctgtgtccagtgacctcacccagcaggagatacagaccctggagaatagtgttgaaattaagcctgcatccccacgattttcagcggtgctgatgcctaataaactcagccccttgcatgccaaaattggcttaaagcccatctgttacccaagctacacttcaagcatcaaggttcaaaaatgtgattttgaatatgcaagagtttga

SEQ ID NO: 151482 - DNA, 1125 bp, Homo sapiens
atgaacacaagaaagaaagaaggaaagaaagaaaaagaaagagagagagaaagaaagaaaggagaaagggaggaaggaaaggaggaagagagaatggaatttattgattattccagctttacttgtcatggtggtgcctatttgcgtctgttctatgtaagtgcatccgtcctctttcgccttgcaggctttttgccccaccgccgacacagctttttgcaccctcgccgccgtggctttttgccgccgcggctttctgccgccgcggctttctgcccccccgccgccaccgccgctgctttttgccccaccgccgccgtggctttttgcccgccgcggctttttacccgccacggcgttttacccgccgcggctttttgccccccgctgtcacggctttttgcccccccgccgcagcgactttttcctcgccgcggctttttgccgccgccgctgttgccgccgctttttgcgcccgcggctttttgccgctgttgccgccgccttttgcccccgccgcagcggctttttgtccccgccgccgcggctttttgctaccgcgactttttgccccggtcgccgccgctttttgccaccgcgactttttgccctcgccgccgaggatttttgtccccgcccgccgcggctctgagggcgggagcggcaggctcggctgccagctctactggcgtcctggcaagggcagcgcccaggggtgctccaggcccctgtggcctgcatagagcggcgctgcctgcggaggcgatgggggagaagaaggatggtggtggtgggggtgatgcggcggccacggagggtggcacaggggctgcggccagccgggcgctgcagcagtgcgggcagctccagaagctcatcgtcatcttcattggcagcctgtgcgggctgtgcaccaagtgcgctgtgtccagtgacctcacccagcaggagatacagaccctggagggcagagatgacccagagaaagcccaagtggctgctggaacaaagtcagacatcgtgccacctgtccacactccttggctctgccatcatgctgaagatcgctttaaaggactggcttccctccccgcaaaattaaaagagcacaaactgagaaactga

SEQ ID NO: 151483 - DNA, 392 bp, Homo sapiens
agccgtcgcccggaccctccaggttgccggaccatggccaacctggagcgcaccttcatcgacgtcaagccggacggtgggcaccgcagtctggtgggcgaaatcatcaatcgcttcgagcagaagggattccgcctcctggccatgaacttcctccgggcctttgaaaaacacctgaagcaccactacattgacctgaacgaccgaccatgcttccctgggctggtgaaatacatgaactcaaggtcggttgcggccatggtctgggaggggctgaacgcgttgaaaacaggcccagggatgcttgtggagaccactccatcccattctatgccaggctccattcggggggacttctgcattcaagtaggcacgaacatcattcatggcag

SEQ ID NO: 151484 - DNA, 436 bp, Homo sapiens
tttcgtccttcactgctctgtgtcctcagcgtgtgtggcttcgtgacctgaagatactgggaaatccatagctaagatgccaggaccccctgaaagcctagacatggggccgttgacatttagggatgtggccatagaattctctctggaggagtggcaatgcctggacactgctcagcaggatttgtataggaaagtgatgttagagaactacagaaacctggtcttcttgggtgagaataactttaatacaaaatcccttatataccctaaagttttcatttctctgttttcatagaataatttttggtaatttatgctttgcataagtgagtttctgatgcctgttttaaagaaatcttgaagaactgtccgtgtggaaaaaaatttcttcaggatgttttatcttggcctcctgggtgctgggattacagaa

SEQ ID NO: 151485 - DNA, 489 bp, Homo sapiens
cgtcttcactgctctgtgtcctctgctcctagaggcccagcctctggtcctgtgacctgcaggtattgggaatccacagctaagacgccgggacaccctggaagcctagaaatggacaacctgaggtatggagtgtatcctgtcaagggggcaagtggataccctggggctgagaggaatcttctggagtactcttattttgaaaagacggagtttcgctcttgttgcccaggctggagtgcaatggcgcgatctcagctcacctcaacctccgcctcccgggttcaagcgattctcctgcctcagcctcccgagtagctgggattacaggcatgcaccaccaccctggctaattttgtatttttagtagagacggggtttctccatgttggtcaggctggtcttgaactcccgacctcaggtgacctacctacctcgacctcccaaaatgctgggattacaggcatgagccaccgtgccaggctggga

SEQ ID NO: 151486 - DNA, 582 bp, Homo sapiens
atggccattcttggcagggcacaatggctcatgcttgtaatcccagcactttgggaggctgaggcacgcagcttgagcggagaggacggcttccgggatgtggcgggatttgtccgcttctttgtctttggctgccgctggaactccgggtctcgtcttcactgctctgtgtcctctgctcctagaggcccagcctctggtcctgtgacctgcaggtattgggaatccacagctaagacgccgggacaccctggaagcctagaaatggacgacctgaggtatggagtgtatcctgtcaagggggcaagtggataccctggggctgagaggaatcttctggagtactcttattttgaaaaggtgtggggtctggttcgtttcactttggaactttttcacactaatgaggaggaacgagagtacagcaaagtaacagaagaggttacagagcatgtttatttaccagctaaagagaaagcggcaaaggaaggagaggttcatccctacccttctgcacaccctccttattattttgaagaaaaagaccctccagatctttcttttccagaggacactggatga

SEQ ID NO: 151487 - DNA, 507 bp, Homo sapiens
ggcacgagtgtggcctgagctccaggtctcgtcttcagcgctctgtgtcctctgctgctagaggtccaggctctgtggccctgtgacctgcaggtattgggagatctacagctaagacgccaggaacccctggaagcctagaaatggagaacctgaagtctggagtgtatcctctcaaggaagcaagtggatgccctggggctgacaggaatcttctggtgtactctttttatgaaaaggggccattgacatttagggatgtggccatagaattttctctggaggagtggcaatgcctggacactgctcagcaggatttgtatagaaaagtgatgttagagaactacagaaacctggtcttcttggcaggtattgctggttctaagccagatctgatcacctgtctagagcaaggaaaagagccctggaatatgaagagacatgcgatggtagccaaacccccagttatatgttctcattttccccaagacctttgggcagagcagg

SEQ ID NO: 151488 - DNA, 1046 bp, Homo sapiens
gatgtggcgggatttgaccgcttctttgtctctggctgccgttggaactccgggtctcgacttcactgctctgagacctctgctcctagaggcccagcctctggtcctgtgacctgcaggtattagggaaaccacagctaatacgccgggacaccctggaagcctagaaatggacaacctgaggtatggagtgtatcctgtcaagggggcaagtggataccctgcggctgagaggaatcttctggagcactctcattttgaaaaggggccgctgacatttaaggatgtggtcatagaactctctcatgaggagaggcacagcctggacactgctcagcaggattttgtataggaaagtgatgttagagaactacagaaacctggtcttttggggtgagaataactttaatacaaatccccttatataccctaaagttttcatttctctgttttcatagaataatttttggtaatttatgctttgcataagtgagtttctgatgcctgttttaaagaaatcttgaagaactgtccgtgtggaaaaaaatttcttcaggatgttttatcttggcctgatctttttacatttctgagccggtctgtatccttcactctacagtagtggtaatttcagaaatttagtagtataaaatattgttgtcccatatgttaaaatctatatgccaccactaattttttatccatgaatactgggtggcaaaattaagcacctacaaatttaaaatattttctaaatgttaagaactttctgtcattaaatagtattttgggataaattttctagaatattctattacatcctctttactaagcatggtactaggtaggtaattagagaatatgagcaagattcatgttatttatttttaataaagcaggtattgctgtctctaagccagatctggtcacctgtctggagcaaggaaaagatccctggaatatgaagggacacagtacggtagtcaaacccccaggtaggtgagagtgaatgaaacagttgacatagatgaaaggttgaaagattt

SEQ ID NO: 151489 - DNA, 573 bp, Homo sapiens
gaaattatcttatcctacttattattttacttccttattctgtgggacagaagaatctcttgagtcctctaaaaaactatatgctgatagcaggagttacagaacaattcagtagtgtctggaatagaacagtggtttgaaaagtaaagggcttgttaaagcacgggatgctgattcagtaggccttgagtggggataatttacatatccaacaggccaggtgatgccctggcttggggatcacattttgtgactgatgcagagtactgatggtcatccagtccccttccttcggtgtttgagaccacttcatctggaccgagctaaagtctaggaagaaataaagtttcaaacccagtagagttacctcaaagatacacttgagacccttttcagaagatggcaccgaaagtgaagaaggaagctcctggcccgcctaaagctgaagccaaagcaaaggctttaaaggccaagaaggtagtgttgaaaggtgtccacggccacaagaaaaagaagatccgcatgtcacccaccttccagcggcccaagacactgagactctggatgccgcca

SEQ ID NO: 151490 - DNA, 539 bp, Homo sapiens
aaattctgtttccttctggcaactgccctagaaatacttttcatattaagttcacaggattcgcagaccacacaggtagtataaatttgaatcccaaactggtgaaaaggtaggtctatggtgaccaattccccagaaatgacttttattctctgtaccatgagtccaagctaacacaagcactagagggtggattttgttttttaatccttccattgagggtgaatgtctttaaaggtcctggctttgtatgtggatctcaatccaacttctcaccttgtaggggggcctaagactttacctcgagtgtccttgcgtgacctttaaaacccgagcatactggttacagaagctagggaatgtctttacgcccaggcagtcacaaagcataaaccacacaccatactgttgttaaatttcctgtttagggctccgcccaggctggaatgcaatggcatgatctcagctcactgcaacctccatctcccaggttcaaatgattctgccccagcctcccacataaagttataattctcaaa

SEQ ID NO: 151491 - DNA, 664 bp, Homo sapiens
actgattgccgggtcgacccacgcgtgcgcccacgcgtccggcagagcacagcatcgtcgggaccagactcgtctcatgccagttgcagccttctcagccaaacgccgaccaaggaaaactcactaccatgagaattgcagtgatttgcttttgcctcctaggcatcacctgtgccataccagttaaacaggctgattctggaagttctgaggaaaagcagctttacaacaaatacccagatgctgtggccacatggctaaaccctgacccatctcagaagcagaatcttctagccccacagacccttccaagtaagtccaacgaaagccatgaccacatggatgatatggatgatgaagatgatgatgaccatgtggacagccaggactccattgactcgaacgactctgatgatgtagatgacactggatgattctcaccagtctgatgagtctcaccattctgatgaatctggatggaactggtcactgattttcccacggacctgccagcaaccgaagttttcactccagttgtccccacagtagacacatatgatggccgaggtgatagtgtggtttatggactgaggtcaaaatctaagaagtttcgcagacctgacatccagtaccctgatgctacagacgaggacatcacctcaca

SEQ ID NO: 151492 - DNA, 613 bp, Homo sapiens
cccacgcgttcgcccacgcgtccgggaggaggcagagcacagcatcgtcgggaccagacttgtctcaggccagttgcagccttctcagccaaacgccgaccaaggaaaactcactaccatgagaattgcagtgatttgcttttgcctcctaggcatcacctgtgccataccagttaaacaggctgattctggaagttctgaggaaaagcagctttacaacaaatacccagatgctgtggccacatgggttaaaccctgacccatctcagaagcagaatctcctagccccacagaatggctgtgtcctctgaagaaaccaatgactttaaacaagagacccttccaagtaagtccaacgaaagccatgaccacatggatgatatggatgatgaagatgatgacgaccatgtggacagccaggactccattgactcgaacgactctgatgatgtagatgacactgatgattctcaccagtctgatgagtctcaccattctgatgaatctgatgaacttgtcactgattttcccacggacctgccagcaaccgaagttttcactccagttgtccccacagtagacacatatgatggccgaggtgatagtgtgggtt

SEQ ID NO: 151493 - DNA, 1509 bp, Homo sapiens
actgattgccgggtcgacccacgcgtgcgcccacgcgtccgggtagagcacagcatcgtcgggaccagactcgtctcatgccagttgcagccttctcagccaaacgccgaccaaggaaaactcactaccatgagaattgcagtgatttgcttttgcctcctaggcatcacctgtgccataccagttaaacaggctgaatcctggaagttctgaagaaaagcagctttacaacaaatacccagatgctgtggccacatggctaaaccctgacccatctcagaagcagaatctcctagccccacaagacccttccaagtaagtccaaccgaaagccatggaccacatgggatgatatgggatgatgaagatggatgatggaccatgtggggacagccagggactccattggactcggaacgactctggatggatgtaggatggacactggatggatttttcaccagttttgatggagtcttcaccatttttggatggaatctggatggaactggtcactggatttttccccacgggaccttgcccaggcaaccgaagtttttcaattccagtttgttccccacagtagacacatatgatggccgaggtgatagtgtggtttatggactgaggtcaaaatctaagaagtttcgcagacctgacatccagtaccctgatgctacagacgagggacatcacctcacacatggaaaggcgaggagttgaatggtgcatacaaggccatccccgttggcccagatcctgacgcgccttctgattgggacagccgtgggaaggacagttatgaaacgagtcagctggatgaccagagtgctgaaacccacagccacaagcagtccagattatataagcggaaagccaatgatgagagcaatgagcattccgatgtgattgatagtcaggaactttccaaagtcagccgtgaattccacagccatgaatttcacagccatgaagatatgctggttgtagaccccaaaagtaaggaagaagataaacacctgaaatttcgtatttctcatgaattagatagtgcatcttctgaggtcaattaaaaggagaaaaaatacaatttctcactttgcatttagtcaaaagaaaaaatgctttatagcaaaatgaaagagaacatgaaatgcttctttctcagtttattggttgaatgtgtatctatttgagtctggaaataactaatgtgtttgataattagtttagtttgtggcttcatggaaactccctgtaaactaaaagcttcagggttatgtctatgttcattctatagaagaaatgcaaactatcactgtattttaatatttgttattctctcatgaatagaaatttatgtagaagcaaacaaaatacttttacccacttaaaaagagaatataacattttatgtcactataatcttttgttttttaagttagtgtatattttgttgtgattatctttttgtggtgtgaataaatcttttatcttgaatgtaataag

SEQ ID NO: 151494 - DNA, 1553 bp, Homo sapiens
cttgaaacgcctattgatagtcctcggaaccgccccggaaatcccggggcgacccacgcgtccgggaggaggcagagcacagcatcgtcgggaccagactctgtctcaggccagttgcagccttctcagccaaacgccgaccaaggaaaactcactaccatgagaattgcagtgatttgcttttgcctcctaggcatcacctgtgccataccagttaaacaggctgattctggaagttctgaggaaaagcagctttacaacaaatacccagatgctgtggccacatggctaaaaccctgacccatcttcagaaggcagaatctcctaggccccacagaatggctgtgtcctctgaaggaaaccaatgactttaaacaaggaggaccctttccaagttaaggtccaacggaaaggccatggaccacatgggatgatatgggatgatggaaggtggatggatggaccatgtgggacagccaggactccattgactccgaacgactctgatgatgtagatgacactggatgattctcaccagtctgatgagtctcaccattctggatgaatctgatgaactggtcactggattttccacggacctgccagcaaccgaagttttcactccagttgtccccacagtagacacatatgatggccgaggtgatagtgtggtttatggactgaggtcaaaatctaagaagtttcgcagacctgacatccagtaccctgatgctacagacgagcacatcacctcacacatggaaagcgaggagttgaatggtgcatacaaggccatccccgttgcccaggacctgaacgcgccttctgattgggacagccgtggggaaggacagttatgaaacgagtcagctggatgaccagagtgctgaaacccacagccacaagcagtccagattatataagcggaaagccaatgatgagagcaatgagcattccgatgtgattgatagtcaggaactttccaaagtcagccgtgaattccacagccatgaatttcacagccatgaagatatgctggttgtagaccccaaaagtaaggaagaagataaacacctgaaatttcgtatttctcatgaattagatagtgcatcttctgaggtcaattaaaaggagaaaaaatacaatttctcactttgcatttagtcaaaagaaaaaatgctttatagcaaaatgaaagagaacatgaaatgcttctttctcagtttattggttgaatgtgtatctatttgagtctggaaataactaatgtgtttgataattagtttagtttgtggcttcatggaaactccctgtaaactaaaagcttcagggttatgtctatgttcattctatagaagaaatgcaaactatcactgtattttaatatttgttattctctcatgaatagaaatttatgtagaagcaaacaaaatacttttacccacttaaaaagagaatataacattttatgtcactataatcttttgttttttaagttagtgtatattttgttgtgattatctttttgtggtgtgaataaatcttttatgtt

SEQ ID NO: 151495 - DNA, 1000 bp, Homo sapiens
  misc_feature (1)...(1000): n = a,t,c or g
ggagagtggnnattgaacccctnnatagtagatcactagtccagngcggtggaattcagtnnnnnnnnnnnnnnnnnnnnnnnnnnnnnnnnnnnnnnnnnnnnnnnnnnnnaaaaggcacttcttacatggcaggggcaagagaaaaatgaagaagcagaggcagaaatccctgnnnnnnnnnnnnnnnnnnnnnnnnnnnnnnnnnnnnnnnnnnnnnnnnnnnnnnnnnnnnnnnnnnnnnnnnnnnnnnnnnnnnnnnnnnnnnnnnnnnnnnnnnnnnnnnnnnnnnnnnnnnnnnnnnnnnnnnnnnnnnnnnnnnnnnnnnnnnnnnnnnnnnnnntggggtttggccagtctagcccaggattggctcgacttggctcgggtcattttgtgaatagtgtgctcctcacatttcaccttttctgggcccagtaggccatccaggacatgtgcaagccagcgacactatgggcagctctgggagccagtttatataccaactcctgatggtacgtccagcctgctgcccaggaaggaagccagtgctggcacctggaaggcccccggccgtgtatgggagcacccaagagcatggggagatgccactgcagcaggcagcacagacctacagtctgttatcacagtctcgctctctgtaataagcaggttaataaggtaataaggaggttacattgctgtttgaatttgctttccttgactaagcatctcttcatgctcaaaagtcttttacatgtcttcttctgtgaattcttttgtgtcatttgctcatttatctacttgtatggtttttgccttgaagaaaatgtaaattttaacttagttaaatgtataaagttttatcttcatagcctctggatttctttttttctttcttcccctgagatagaccttccctattacatgataattttaaaaattctccaatttttttctagtacatttatagtttctttccattttgtatttgttttgc

SEQ ID NO: 151496 - DNA, 1101 bp, Homo sapiens; identical to SEQ ID NO: 150698

SEQ ID NO: 151497 - DNA, 3185 bp, Homo sapiens
gctgggtttagtaggagacctggggcaaggccccctgtggacgaccatctgccagcttctctcgttccgtcgattgggaggagcggtggcgacctcggccttcagtgtttccgacggagtgaatggcggcggcggctgggatgctgctgctgggcttgctgcaggcgggtgggtcggtgctgggccaggcgatggagaaggtgacaggcggcaacctcttgtccatgctgctgatcgcctgcgccttcaccctcagcctggtctacctgatccgtctggccgccggccacctggtccagctgcccgcaggggtgaaaagtcctccatacattttctccccaattccattccttgggcatgccatagcatttgggaaaagtccaattgaatttctagaaaatgcatatgagaagtatggacctgtatttagttttaccatggtaggcaagacatttacttaccttctggggagtgatgctgctgcactgctttttaatagtaaaaatgaagacctgaatgcagaagatgtctacagtcgcctgacaacacctgtgtttgggaagggagttgcatacgatgtgcctaatccagttttcttggagcagaagaaaatgttaaaaagtggccttaacatagcccactttaaacagcatgtttctataattgaaaaagaaacaaaggaatactttgagagttggggagaaagtggagaaaaaaatgtgtttgaagctctttctgagctcataattttaacagctagccattgtttgcatggaaaggaaatcagaagtcaactcaatgaaaaggtagcacagctgtatgcagatttggatggaggtttcagccatgcagcctggctcttaccaggttggctgcctttgcctagtttcagacgcagggacagagctcatcgggaaatcaaggatattttctataaggcaatccagaaacgcagacagtctcaagaaaaaattgatgacattctccaaactttactagatgctacatacaaggatgggcgtcctttgactgatgatgaagtagcagggatgcttattggattactcttggcagggcagcatacatcctcaactactagtgcttggatgggcttctttttggccagagacaaaacacttcaaaaaaaatgttatttagaacagaaaacagtctgtggagagaatctgcctcctttaacttatgaccagctcaaggatctaaatttacttgatcgctgtataaaagaaacattaagacttagacctcctataatgatcatgatgagaatggccagaactcctcagactgtggcagggtataccattcctccaggacatcaggtgtgtgtttctcccactgtcaatcaaagacttaaagactcatgggtagaacgcctggactttaatcctgatcgctacttacaggataacccagcatcaggggaaaagtttgcctatgtgccatttggagctgggcgtcatcgttgtattggggaaaattttgcctatgttcaaattaagacaatttggtccactatgcttcgtttatatgaatttgatctcattgatggatactttcccactgtgaattatacaactatgattcacacccctgagaacccagttatccgttacaaacgaagatcaaaatgaaaaaggttgcaaggaacgaatatatgtgattatcactgtaagccacaaaggcattcgaagagaatgaagtgtacaaaacaactcttgtagtttactgtttttttaagtgtgtaattctaaaagccagtttatgatttaggattttgttaactgaatggttctatcaaatataatagcatttgacacattttctaatagttatgatacttatacatgtgctttcaggaagttccttggtgaaacaattgttgaggggggatctaggtaattggcagattctaaataatataatttccagatagtaattttaagagtactcatcgctcttgccaaataagttcagggtattcaaatcttggactagtcctgcaaggtataaagaataaaaatcccagtgagatacttggaaaccacagtttattattatttatctgggcaattattgtgtgtgtgaggatggaagggtagggaataatcgaacatctaaagccttgaataagagaatactaattgttttggtatgatgatactcagaaatggaggatattataggaaaaagaaatcctttggaattttaactaaaatcactgcatatgggaaattaagagatccaggaccatatttgataagagttcctaaaaataatgtaattattaatgctaaagactgctcatgtatcttgatctaattactaaataaattacatatttatttacctgataaatatgtatctagttctacaaggtcacatttatgtggaagtccaaagtcaagtccttaggggataattttgttttgggctcagttgttccctgcttccttttttttttttttttttttttgagatggagtctcgctctgttgcccaggctggagtgcagtggtgcgatctcagctcactgcatcctctgcctcccgggttcaagcaattctctgcctcagcctcccaagtagttgggattacaggcacctgccaccatgcctggctaatttttttgtatttttagtagagacaggggtttcactatgttggctaggctggtcttgaactcctgagcctcgtgagtccacccgccttggcctcccaaagtgctgggattacaggcatgagccaccgcacctgggccttccctgcttcctctctagaatccaattaggggatgtttgttaactaattcatattgattaaaacagttaaacaaactttttttctttttaaaatgtgagatcagtgaactctgggttttaagataatctgaaacaagggtccttgggagtaataaaattgggtcacattctgtaaagcacattctgtttaggaatcaacttatctcaaattgtaactcggggcctaactatatgagatggctgaaaaaatcccccatagtctgttttcaataggtgatgccaaaatactttgctttatgtatattacagttcttcttaaaacactggaagactcatgttaatctctaattgtgaaggcacactctatgttaatttttcagattaaaattctctttgaaaaaatac

SEQ ID NO: 151498 - DNA, 1000 bp, Homo sapiens
tttttttttttcaaaaaggtaaatttataaaggaaccagtaaaatttaaaaagaaacaattcaaagacaaataagaacactgaaattaatttgctaacagacacaaaacttgtcaacatccacagagtaatatcaattaaatctccatgggacaaaattcatttgcctctatgaacaagagtcattcgcattaccctcagttctttacaaattcaaaagaactgtaaaatagctcaaatgacaaggaaagatggggacccctgtaggcatcacggtcagtcccgaaaggtctgctagggtaactccctaggatcttgtccaggaaggacacccgggggattgtcttgcccatctcaaaggttcttcatagttttcatggaaaacccatgcccacacacacgaggcagctcataatcataataatggcactttataaaagtcagcatttttctctgattataaaatacatgttgtcaaaaagcttaaaaatgcaaaaagtacaaaacattaaagacaatctcatataacctcttctccctccccacatcccctctctttcaaaagaacttgtgaacattttggtgagaattttcacaagtgaagtacgtccatatcaccaacatgggccccaacactccagatgcccctcggggttctctcccaggtaccacgctatgacttctgactgaggatgggttttgattgtgcctgtttaagtcctatgaatagaatcacagagtatataccctttgagtctggcttcttttgctcaatattatgtttgtgagattcatttatgccattgtcccagctttatttaatttattttttctcaagacccagtctggctctgttgcccagggtagagtgcagtggtgtgatctcagctcactgcaacctccgcctcccaggttcaagcaattctcctgcctcagcctcccaagtagctgggattacaggcacctgccaccatgcctggctaatgttttgtatttttagt

SEQ ID NO: 151499 - DNA, 1196 bp, Homo sapiens
aacagaggtagcctgaaagaagcaggaactccaggatcccaaaccagagcagaccctatagtaaagtatttttacatcttttcctttccccagaagagatccctaacctattgttttattgacagccttgctgttagaggctctttcccagaagttggacgaagaggctcaggcgttgctgtttcttgtcttccaagtcaagtggttactctggtaatggattgcctctctccgagctttcaccctggtgagactgtccagatctagtctgtaaacccagcttagaagcactgttgtaaaaatgactgaagagcccatcaaggagatcctgggagccccaaaggctcacatggcatgcgacgatggagaagagccccaagagtgaagttgtgatcaccacagtccctctggtcagtgagattcaaatgatggctgctacagggggtaccgagctctcctgctaccgatgcatcatcccgtttggtgtgggtgccttcatcgccggcatcgtggtcaccgcgctgggaatttgcggacgttttcgtgaaaatttagagtataagatgaaaaaggggaacgaagggcagttttgggggacgtcagttcgacaccgaaccccttctgcttctgtggtgttggaaaaatctggaaaaaaacaatctcagtgccatggaattcatgctatgataaaaagatacccacagtctattccagattacacagcatgggcatcttctagaatttgggaggagatggatgacacagagggagtattagaaaggcttccatggcagcagacacctgacctgaaacctgacatgcaaagtgatttcctacctgtccgcgtttgccaatatcagagttggctgctgtttgcacataatagtaagacggaaggattattagggaaatttggtcaccctagctgtggcatagtgcaaagattttttggagagaagaaagaaacttgggaactctatgaacaagaatgcaacggagagactgtggtctactgggaagtgaagtacccttttcccatgtccaacagagacgtatcctttccacaagctgcagtctattgcagagaggtagagctggtttctcagcaggcacagataacattgtctctgattcttgcagcagcatttgctaaagatattgcttcttgtatggtgtttggagagctcagagtgtga

SEQ ID NO: 151500 - DNA, 756 bp, Homo sapiens
gtttcgtggcccacactaagggtgtccgcggcctgccctccatgcggaggagcccggactgcggaaggatggagctggccgccggaagcttctcggaggagcagttctgggaggcctgcgccgagctccagcagcccgctctggccggggccgactggcagctcctagtggagacctcgggcatcagcatctaccggctgctggacaagaagactggactttatgagtataaagtctttggtgttctggaggactgctcaccaactctactggcagacatctatatggactcagattacagaaaacaatgggaccagtatgttaaagaactctattgaacaagaatgcaacggagagacttgtggtctactgggaagtgaagtacccttttcccatgtccaacagagactatgtctaccttcggcagcggcgagacctggacatggaagggaggaagatccatgtgatcctggcccggagcacctccatgcctcagcttggcgagaggtctggggtgatccgggtgaagcaatacaagcagagcctggcgattgagagtgacggcaagaaggggagcaaagttttcatgtattacttcgataacccgggtggccaaattccgtcctggctcattaactgggccgccaagaatggagttcctaacttcttgaaagacatggcaagagcctgtcagaactacctcaagaaaacctaagaaagagaactgggaacattgcatccatgggttgatgtctc

SEQ ID NO: 151501 - DNA, 1131 bp, Homo sapiens; identical to SEQ ID NO: 125273

SEQ ID NO: 151502 - DNA, 863 bp, Homo sapiens
cccgcctgcacccaggtgaaataaacagccatgttgctcacacaaagcctgttgtggtctttcacacggacgcgcatgaaatttggtgctgtgactcggatcgggggacctcccttgggagatcaatcccctgtcctcctgttctttgctccgtgagaaatatctacctacaacctcagatcctcagaccaaccagcccaaggaacatctcactaattttaaatcagacaaaggagacacgttttatctgtggacccaaaactccggcgccggtcacggactgggatggcagccttcccttggtgtttaatcattgcagggatgcctctctgattgttcacccacgtttcaaaggtgtcagagcacgcagggacgcctgccttggtccttcacccttagcggcaagtcctgcttttctggggaaggggcaagctgctcctcgccaggccgagctaggtcccaatgcttcctcagcctccgctcctccaccctataatctttttatcgcctcccctcctcacacctggtccggcttacagtttcgttcggtgactagccctcccccacctgcccagcaatttactcttaaaaaggtggctggagccaaaggcatagtcaagcacgctttaaaaagattaaagcctgttatcactcgcctgctacagcatggccttttaaagcctataaactctccttacaattcccccattttacctgtcctaaaaccagacaagccttacaagttagttcaggatctgcgccttatcaaccaaattgttttgcctatccaccccgtgatgccgaaacatactgacggttaccaaaatgttggccccaatattacccagtgtgtgattcactga

SEQ ID NO: 151503 - DNA, 915 bp, Homo sapiens; identical to SEQ ID NO: 133956

SEQ ID NO: 151504 - DNA, 1671 bp, Homo sapiens; identical to SEQ ID NO: 114304

SEQ ID NO: 151505 - DNA, 1566 bp, Homo sapiens; identical to SEQ ID NO: 117138

SEQ ID NO: 151506 - DNA, 1404 bp, Homo sapiens
ttaatcctgctgtatcagtgaagcaggatatttccctgaccctctcgtgggactcacaacaggggtgcctggcttactcagtccgcagctctcaactctttgtgggaggtggtgcatgaacgaacaaggtggaaactggagtgtgtgaaggccagaatcagctggccactccttcgcctgtaagagtgaactccactcattcaaactgactacattccacccattgcttctttcatcatggaatgtgcctgctccctcttcaccttccaccatgagtgtaagcttcctgaagtctcccagcggaagaacacaccagcggaagaatacaccagcagacattcgcagacactggcaggccatcatttttcttgttttgtttccagttggaggtttcttcaactgaaagagctgccctcctgttccaaaacctacagagacaggattagacatcctgtatgtccaaccaacgggtactgtgatgccagaattgctgaagttaaatgcagatgttatttgagctgccaaagcttgcactaagatttctgaaggtttatttatttttccaaatccaaatgtggccttgctggtactttttctgccaatagcttgtcgcaaggacagaaaggctttctgtatctcagggtttcttgccttggtgtactgggagaatccgatcacacgtgggcttggagaatgagtgcaaggttttattgagtggaagtagctctcagaagatggggaagccagaggggagatggttttcacctggagtcgggccacccccgtgcttggcagccccggctctcctccgactgccctggaaatctccgcctcatcccaccggtggatggcctgccagcgtgcccgtgcctgtcggtgtgctcttctgccagcgtgctcctctggatgatcagctgcttgtgtgttggccagcgagggttttggagaagaggtattggcaaccacctctgtcctagttgtgcccatcacatgaatggctatggtagtggagcctatgtctgggtcctgactgagctgactgtggactttgctggattctgggcctgatactactagccagctttgttgaaaatgagttcgttgcaggtgtgtggtttcacgtgcatccgtgtgaagagaccaccaaacaggctttgtgtgagcaacatggctgtttatttcacctgggtgcaggcgggctgagtcctccactgtgagagttacccgaagctcggcgtccgtgatggtttgcccctttcccagaaaagcgggacttgccgctaagggtgaaggaccaaggcaggcgtccctgcgtggtctgacacctttgaaacgtgggtgaataatcagagaggcatccctgcaataattaaacaccaagggaaggctgccttcccagtccat

SEQ ID NO: 151507 - DNA, 825 bp, Homo sapiens
atgtggaatgctgtgaccctctggcagcagcgtgaatcatgcattgaagaggaatcagagataggaacactagagacaaaggagacacattttatccgtggacccaaaactctggctccggtcacggactgggaaggcagccttcccttggtgtttaatcaatgcagggacgcctctctgattatacacccacgtttcaagggtttcagaccacgcagggacgcctgccttggtccttcacccttagcagcaagtcctgcttttctggggaaggggcaagctgctcctcgccaggccgagctaggtcccaattcttcctcagcctctgctcctccaccctacaatccttttatcacctcccctcctcacacctggtcaggcttacagtttcattccatgactagccctccccctcctgcccagcaatttcctcttaaaaaggtggctggagctaaaggcatagtcaagcggctgaagactgacactgcccgattgccttggaagcccccagaccatcatagacgccgagcttcgggtaactctcacagtggaagggtacagcctccctcccggctgccttcgtgggctcatgttgagtgtctcaggcttttccaggagcacggtgcaagctgtcagtggatctaccgttctgggatctggaggacagtggttttcatgtgcgtccgtgtgaagagaccaccaaacaggctttgtgtgagcaacatggctgtttatttcacctgggtgcagttacttcaggccatctgggcgtatacgtgcaagtcacaggggatgcgatggcttggcttgggctcagaggcctga

SEQ ID NO: 151508 - DNA, 642 bp, Homo sapiens; identical to SEQ ID NO: 115470

SEQ ID NO: 151509 - DNA, 1614 bp, Homo sapiens; identical to SEQ ID NO: 120928

SEQ ID NO: 151510 - DNA, 1176 bp, Homo sapiens
atgacaactatactgaatggccgactcaagaatcaagaggacctggatgcgcatgaaatttggtgctgtgactcggatcggggggacctcccttgggagatcaatcccctgtcctcctgctctttgctccgtgaaaaagatccacctacgacctcgggtcctcagacccaccagcccaaggaacatctcaccaattttaaatcagcacgcttcaaaaggattaaagcctgctattactcgcctgctacagcatggccttttaaagcctataaactccccttacaattcccccattttacctgtcctaaaaccagacaaggcttacagcataattctcataaaaacacacgtgctctccctgattatcgtctccggctaatctcccaaaccccaatcccttctacaaaacaacaactcctttccttcctaggcatggttagtaaggtcagaattcttacacaagagctgggaccacgtcctatagcctttctgtccaaacaactggaccttactgttttaacccaaccctcatgtctgcatgcagcggctgccgctgccttaatacttttaaaggccctaaaaatcacaaagtatgctcaactgactctctacagttctcataacttccaaaatctattttcttcctcatacctgatgcatatactctctgctccctggctccttcagctatattcactctttgttgagtctcccacaattaccattgttcctggcacggacttcaacccggcctcccacattattctggataccacacctgaccctcatgactgtatctctctgatccacctgacattcaccccatttccccgtatttccttctttcctgttcctcaccctaatcacatttggtttattgatggcagttccaccaggcctaaatgccactcaccagcaaaggcaggctatgctatagtatcttccacatctatcattgaggctaccgctctgcccccctccactacctctcagcaagccgaactagttgccttaacccaagccctcactcttgcaaaaggactatgcgtcaatatttatactgactctaaatatgcctttcatatcgtgcaccaccatgcaagaagtttcctcactaaacaagggtcctctatcattaatccctctttaataaaaacgcttctcaacgccgcttaa

SEQ ID NO: 151511 - DNA, 618 bp, Homo sapiens
atggggtttcgccattttggccaggctgctctcaaactcctgatctcaggagagacaaaggagatgcattttatccgtggacccaaaactccggtgccagtcacggactgggaaggcagccttctcttggtgtttaatcattgcagggacacctctctgattatacacccacatttcaagggtgtcagaccacgcagggacacctgccttggtccttcacccttagcggcaagtcccgcttttctgaggaagggacaagctgctcctcgccaggccgagctaggtcccaattcttcctcagcctctgctcctccaccctataatccttttatcacctcccctcctcacactgggtcctgcttacagtttcgttccgtgactagccctcccccacctgcccagcaatttactcttaaaaaggtggctggagccaaaggcatagtcaaggagcttgctacaagtgccagaaatctggccactgggccaaggaatgcccgcagcccaggattcctcctaagctgcgtcccatctgtgtgggaccccactgaaaatcggactgttcaactcacctggcagccactcccagagcccctggaactctggcccaagcctctctga

SEQ ID NO: 151512 - DNA, 1260 bp, Homo sapiens
ttacaatttggcatgtttttgcagtggctggtaccagttgttcctttccatgtttagcgcttccttcaggagctcttttagggcaggcctggtggtgacaaaatctctcagcatttgcttgtctgtaaaggattttatttctccttcacttatgaagcttaatttggctggatatgaaattctgggttgagaattcttttctttaagaatgttgaatattggcccccactctcttctggcttgtagagtttctgccgagagatcagctgttagtctgatgggcttccctttgtgggtaacccgacctttctctctggctgcccttaacatttcttccttcatttcaactttagtgaatctgacaattatgtgtcttggagttgctgttctcaaggagtatctttgtggcattctctgtatttcctgaattcgaatgttggcctgccttgctagtttggggaagtttttctggataatatcctcaagagtgttttccaacttggttccattctccccgtcattcatttcattcatttgatcttccatcactgataacctttcttccagttgatcgaattggctactgaagcttgtgcattcatcacgtagttcttgtgccatggttttcagctccatcacgtcctttaaggacttctctgcattggttattctagttagccattcgtctaatcttttttcaaggtttttaacttctttgcgatggttcgaacttcctcctttggtctttgatgatggtgacatacagatggggttttggtgtggatgtcctttctgtttgttagttttccttctaacagtcaggaccctcagctgcagctctgttggagtttgctggaggtgcactccagatcctgtttgcctgggtatcagcagtggaggctcagttggaaatgcagaaatcattcgtcttctgcatcgctcacgctgagagctgtagactggagctgttcctattcggccatcttggaaccgcgctggtactgtcttctttacttcattcagagtatcattcttaagaaacaccgaggtcgtaggtggatctttctcatggagcaaagaacaggaggacagcggattgatctcccaaggggaggtcccccgatctgagtcacagcaccaaatctcatgcacgtccgtgtgaagagaccaccaaacaggctttgtgtgagcaacaaggctgtttatttcacctccaagagtggtcccctgagccaagatgttgttacggtagtaattcat

SEQ ID NO: 151513 - DNA, 2223 bp, Homo sapiens
tcaaagggaatgcttccagatttgtccattcagtatgacattggctgtgggtttgtcatagatagctcttattattttgagatatgtcccatcaatacctaatttattgagagtttttagcatgaagggctgttgaattttgtcaaaggccttttctgcatctattgagataatcacgtggtttttgtcattggttctgtttatatgctggattacatttattgatttgtgtatgttgaagcagccttgcatcccagggatgaagcccacttgatcatggtggataagctttttgatgtgctgctgtattccgtttgccagtattttattgaggatttttgcatcgatgatcatcagggatattggtaaaaaatctcttttttttgttgtgtcactgccaggctctggtatcaggatgatgctggcctcatcaaatgagttagggaggattccctctttttctattgattggaatagtttcagaaggactggtaccagctccttgtacctctggtagaattcggctgtgaatccatctggtcctggactttttttggttggtaagctattaattatttcctcaatttcagagcctgttattggtctattcagagattcaacttctttctggtttagtcttgggagggtgtatgtgtcgaggaatttatccatttcttccagattttctagtttatttgcctttggtctttgatgatggtgacgtacagatggggttttggtgtgggtgtcctttctgtttgtttgtttttctttctgacagtcaggaccctcagctgcaggtctgttggagtttgctggtggtccactccaggccctctttgactgggtatcagcagcagaggctgcagacagcaaatattgctgtacagcaaatgttgctgcctgattgttctctgggaatttcatcccaaaatctttcttcagtttaatctctcccaccgtaggttcccatgctgcccctaatcccactcgaagcagccctgagaaacatcgcccattatctctccataccaccccccaaaagtttcgctgccccaacacttcaccactattttgttttgtttttctctgtccatctgcaggaatgctgacattccatgtaaagaggggttgtgactttacttcttgtgcaagcctgaacccagagggcactcctcctgtggagatgtagtcaccctgaagtgctccagaaagactgtctataggcacactcatgctgagttcctggaagagaagccccagctgtatcagtgctggctgcaggcgttgcagtttttggtgcgtctcgttgatttgctgagcatatttatcatatgtaatggttcccccgggattcagaaagctcagcttgttgtatattctctggtggggtgacccaaagaccattagtggaccttcctgaattgggcattgtcgttttccattgagtttaatcacagagcatggtattactaagagacatcctaagagctctcctatattccagaaatactcttcttccttatatctattttggaggagcaatccagtttccccatagtagtcaggatcagtcagtccagtcagcatagtaacttccttctttgcctgttgattcagaggcttgagggacccaaggtggctggttggcagtcttaacttccagttcagtggaatcactatgtttcctggtagacacatttctgcctttggaactgagacctctcttccacagaccgttttgtcaccaattttccagtcatgttccttccaagtccctgaccatccagcaaaccagtggccatagctcatgaattgataactaattgtacatctaaccatttcttcttccagtaagtctaatgtagttgttgcttctcgctcattaggtccaatcagcataatgtcatcaatgtaatggatctgcctaatatcttgtaaaagggtggtcaagattcttgtgaaggtggtcaagattgtcacctttaggagtctgctgagacttgaactagttataggtgtagaagcaaagaggggtagtgggagtgaatcaggagtgtcttgcatggcagatacctcagaggagaccattgcagttttctcaggccaaatagagttaatatcagatatggatggagtggctgcttctactggcaaagaagactgagaatttaaggtttcaattttgccagcttcatcaggatcttcccaaataacctccat

SEQ ID NO: 151514 - DNA, 423 bp, Homo sapiens
tgggttcttggtcttgctgacttcaagaatgaagctgcggaccctcgcgaaacaaaggagacacattttatccgtggacccaaaactccggcgccggtcacggactgggaaggcagccttcccttggtgtttaatcattgcagggacgcctctgattattcacccacgtttcaaaggtgtcagaccatgcagggacgcctgccttggtccttcacccttagcggcaagtcccgcttttctaggggaggggcaagagcttgctacaagtgccagaaatctgaccaccaggccaaggaatgcctgcagcccaggattcctcctaagccgtgtccatctgtgcgggaccccactggaaatcggactgttcaactcacctggcaggcactcccagagcccctggaattctggcccaaggctctctga

SEQ ID NO: 151515 - DNA, 522 bp, Homo sapiens
atgctgaaggacctgcctagagcaattagacaagaaaaagaaacaaaaggatcgggggacctcccttgggagatcaatcccccgtcctcctacactttgctctgtgagaaagatccacctacaacctcaggtcctcagaccaaccagcccaagaaacatctcaccaatttcaaatccgagacaaaggagacacgttttatccgtggacccaaaactccggcgccagtcacggactgggaaggcagccttcccttggtgttaaatcactgcagggacgcctctctgattattcacccatgtttcaaaggagcttgctacaagtgccagaaatctgaccaccaggccaaggactgccggcagcccaggattcctcctaagccacgtcccatctgtgtgggaccccactgcaaatcggactgttcaactcacctggcagccactcccagagcccctggaactctggcccaaggctctctgactgactccttcccagatcttctcggcttagcggctgaagactga

SEQ ID NO: 151516 - DNA, 5130 bp, Homo sapiens; identical to SEQ ID NO: 116418

SEQ ID NO: 151517 - DNA, 722 bp, Homo sapiens; identical to SEQ ID NO: 132727

SEQ ID NO: 151518 - DNA, 408 bp, Homo sapiens; identical to SEQ ID NO: 114500
  misc_feature (1)...(408): n = a,t,c or g

SEQ ID NO: 151519 - DNA, 770 bp, Homo sapiens
tttggtgtcgtgactcagattgggggacctcccttgggagatcaatcccctgtcctcctgctctttgctctgtgagaaagatccacctacgacctcaggaccgaccaagaaacatctcaccaatttcaaatccagtaagcggcctctttttactctcttctccaacttgcctcactatccctcaacctctttctcctttcaatcttggcgctacacttcaatctctcccttctcttaatttcaattcctttcattttctggtagagacaaaagagacacgttttatccgtggacccaaaactccggcgctggtcacggactgggaaggcagccttcccttggtgtttaatcattgcagggaggcctgccttggtccttcacccttagcagcaagtcctgctttcctggggcaggggcaagatttaattaacctcgccttcaaggtgtacaataatagaaaaaagttgcaattcctggcctccactgtgagacaaaccccagccacatctccagcacacaagaacttccaaacgcctgaaccgcagcggccaggcgttcctccagaacctcctcccacaggagcttgctacaagtaccagaaatctgaccaccaggccaaggaatgcctgcagcccaggattcctcctaagccgtgtcccatctgtgcgggaccccactggaaattggactgttcaactcacctggcagccactcccagagcccctggaactctggcccaaggctctctgactgactccttctcggcttag

SEQ ID NO: 151520 - DNA, 756 bp, Homo sapiens; identical to SEQ ID NO: 117156

SEQ ID NO: 151521 - DNA, 756 bp, Homo sapiens; identical to SEQ ID NO: 117157

SEQ ID NO: 151522 - DNA, 878 bp, Homo sapiens; identical to SEQ ID NO: 129191

SEQ ID NO: 151523 - DNA, 1245 bp, Homo sapiens
ctaagccaagaaggagtcagtcagagagccctgggccagagttccaggggctctgggagtggctgccaggtgagttgaacagtccaatttccagtggggtcccgcacagatgggacaaggcttaggaggaatcctgggctgcaggcattccttggcctggtggtcagatttctggcacttgtagcaagctcctgggggaggagattctggaggaacacctggccgctgcggttcaggcgtttggaagttcttgtgtgctggagatgtggctggggtttgtctcacagtggaggcaaggaattgcaacttttttctattattgtacaccttgaaggtgaggttaattaaatcccctcccccagaaaagcaggacttgccactaagggtgaaggcaaagggtttgggggtttcttgccccccagaaaggcaaagaaggggtagagacacggagagaaggggctggggtacttgccccttccccagaaaagcaggacttgctgctaagggtgcaggaccaacacagacgtcactgcgtggtctgacacctctgaaacctgggtgaataattagagaggtgtccctgcaatgattaaacaccaagggaaggctgccttccctagtctgtgactggcgccggagttttgggtccacagataaaacgtgtctcctttgtctcggatttgaaattggtgagatgtttcttgggctggtcagtctgagaacctgaggttgtaggtggatctttctcatggagcaaagagcaggaggacagggcattgatttcccaagggaggtcccccgatctgagtcattgcaccaaatttcatgcgtgtccgtgtgaagagaccaccaaacaggctttgtgtgagcaataaagctgtttatttcacctgggtgcaggtgggtgccctgtgccgacttggagcactgctccatgcatccctgctgctccagttccagccatggctcagagggccctaggtataactcaagccgctgccttgcagagctcaagccataagccttggcagcttccatgtggtatttatccctgaaggcacttggcattgaaagtggtagagtatctattacagcaatattgattaatatttcttcagcaagaaaagctgctgtgttccactggggagcaggattttggaatctttgatgttgagcactgtgagggctctgcgataaaagttgcaaggcttccgtgacagttgtgagatctgttgtggccctcat

SEQ ID NO: 151524 - DNA, 686 bp, Homo sapiens
cccgcctgcacccaggtgaaataaacagccatgttgctcacacaaagcctgttgtggtctttcacacggacgcgcatgaaatttggtgctgtgactcggatcgggggacctcccttgggagatcaatcccctgtcctcctgttctttgctccgtgagaaatatctacctacaacctcagatcctcagaccaaccagcccaaggaacatctcactaattttaaatcagacaaaggagacacgttttatctgtggacccaaaactccggcgccggtcacggactgggatggcagccttcccttggtgtttaatcattgcagggatgcctctctgattgttcacccacgtttcaaaggtgtcagagcacgcagggacgcctgccttggtccttcacccttagcggcaagtcctgcttttctggggaaggggcaagtacccctcaaccccttctccttcacccttagcggcaagtcccactttcctgggacaggggcaagaacttgttacaagtgccagaaatctgaccaccaggccaaggaatgcctgcggcccaggattcctcctaagccatgtcccatctgtgcgggaccccactggaaatcggactgttcaactcacctggcagccactcccagagcccctggaactctggcccaaggctctctgactgactccttctccgcttag

SEQ ID NO: 151525 - DNA, 909 bp, Homo sapiens; identical to SEQ ID NO: 114873

SEQ ID NO: 151526 - DNA, 1157 bp, Homo sapiens
atgtgggaaagtttggaacttcctggaaacattttcaatggctttgaccaaaatgctgataatgatatggacgatgaaattcaggctgaggtcatctcagatggagatgaggaatttgttgggaactggaataagcctagagacttggtgccctgcatcctagccactctagccttgactaaaaggggacaagatacagctcagaccatggcttcagagggtgcaaggccaaagcattggcagcttccaggaggtgttgggcccgtgggtgctcagaaatcaagaattgaggtttgggaacctttgcctatatttcgcaggatgtatggaaaagcctgtatgtccaggcagaagtttgctgcaggggcagggttttcctggtatgttcctgtggcagttgttggagcaaaagttcacgatgtgaacctccatatgctgtcctttccatccaagtggaagctgcacacatgcatgaaatttggtgccgtgacttggatcaggggacctcccttgggagatcaatcccctgtcctcctgctctttgctccatgagaaagatccacctacaacctcaggtcctcagaccgaccagcccaagaaacatctcaccaatttcaaatccgagacaaaggagacacattttatccatggacccaaaactccggcgccggtcatggacttgggtaggcagccttcccttggtgtttaatcattgcagggacgcctctctgattattcacccaggtttcagaggtgtcagaccacgcagggacgtctgccttggtccttcacccttagcgaatttaattaacctcaccttcaaggtgtacaataatagaaaaaagttgcaattccttgccttcactgtgagacaaacctcagccatgtctccagcacacaagaacttccaaacgcctgaacctcagcggccaggcattcctccagaacctcctcccccaggagcttgctacaagtgccagaaatccggccaccaggccaaggaatgcctgcagcccaggattcctcctaagccacgtcccatctgtgcgggaccccactggaaattggactgtccaactcacctggcatccactcccagagcccctggaactctggcccaaggctctctgactgcttcccagatcttcttggcttag

SEQ ID NO: 151527 - DNA, 1719 bp, Homo sapiens
atgactaatgcagagcattataagcatagtctccatgcttatggagcatgggccattatggcccagtgggaaatggagaattgtaaacatgaagagggaacttttccagtaagctcggggagggagcggcagagagggggagaagttactagaacccaatgctgcaatggcccccagcatatcctaagagtgtccaggttcttcacagaacctgacggtcttaatatcattggtgattattctgggcctgctcaagcagccacacaactacctatgagttggatgctgttgcatttgggctacccggaaaggaaagagatgcccttgggcaaagcagctgtctatggcaagcacactctgaaggagctgacagctggaggcaagtccttccctccagaaagggcatttgggcagtgcatctcctgtcctaccactttcttcatctgcaaaatggggatcatgatagtaccagcttgcagggttaaatgttcttccacactgactctgggcctagccatgtgtcctgttttggtccatgtgacatcagctaacataacccaagcagagacttgctgcccattttctctgaatggtggcccagcacctggagggacagagtacaaaggactctggcatgttgaattcctcaagcaacctgctggtaagcatggactctatgatgcgccagcaacacgttttgctttatccaacacatgtcctgttaagtcacggactagtgtggtctatgggctggcagaggtgaaaagatctcccttttcatgtagcttgcccacctacttacagcgttgcatcacagggtcaagtgtttctcctccacttcacgcagctcgggagccctcttgtctggaaaggctcttccctgctggtgcctccaggctgggctggttgttgctcctctatgctcccgaggtcctcagtgcctgcctttatcagaacagaggccacagcgcaccttggttaaatgtacagtctctgggaccagactgcctggactcacaactctggctccgccatttacagcccacctgcacccaggtgaaacaaccagccatgttgctcacacaaagcctgtttggtggtctcttcacacagacgcgcatgaaatttggtggatcaggggacctcccttgggagatcaatcccctgtcctcctgctctttgctccatgagaaagctccacctaccacctcaggtcctcagactgaccagcccaagaaacatctcaccaatttcaaatccgagacaaaagagacacgttttatctgtggacccaaaactccggcaccggtcacggactgggaaggcagccttctcttggtgtttaatcattgcagggacacctctctgattatacacccacgtttcaagggtgtcagaccacgcagggacgcctgcctcagtccttcacccttagcggcaagtcccgcttttctggggaaggggcaagtaccccaaccccttctctccttgtctctaccccttccctgcttttccggggacagggagcttgctacaagtgccagaaatctatctgaccaccaggccaaggaatgcctgcagcccaggattcctcctaagccgtgtcccatctttgcgggaccccactggaaatcggactgttcaactcacctggcagacactcccagagcccctggaactctggcccaaggctttctgaccgactccttctcggcttag

SEQ ID NO: 151528 - DNA, 1250 bp, Homo sapiens
atgagtgaactcccattcacaattgcttcaaagagaataaaatacctaggaatccaacttacaagggatgtgaaggacctcttcaaggagaactacaaaccactgctcaatgaaattaaagaggacacaaacaaatggaagaacattccatgctcatgggtaggaagaatcaatatcgtgaaaatggccatactgcccaagagaagcttctctatgccttccacaatatctcccttaaacaatcctccagcttatctctgtctcagaactttcctaataatgaaaacaatgatggcagcaaagaagatgatgatggaggtgatgatgatgatgactgtcaggcctctgaggccaagccaaactcagcctgcctgcacccaggtgaaataaacagccatgttgctcacacaaagcctgtttggtggtctcttcacacggacacgcatgaaaatgacaatggtgatgttggtgatgataatgttgatgatgatgttgatgatgatggtggtgatgatggtaaagatgatggtgatgatgatgatggtgatacggtgatggtggtggtgatgatgatggtagtgatggtggtgatgacgataatgatgatggtgttgacggtggtgatgatagtggtgcccactcagaacaactttgtttgtcagtttggatgcttcaccttcgccaccttccaaagagagtctttgccaggctggcttcagtggctttgtaatgcagaattaagagaatgtatagaggaaagctgtcagtcactcctgctgctgaacagcaacactgtattggctccagctgctaagcctgagggtccagaggtggcttcccctcacctgcagaaaataaccaatacagagaagtgcttaaaggagctgatggagctgaaaaccaaggctcgagaactacgtgaagaatgcagaagcctcaggagccaatgcgatcaactggaagaaagggtatcagcgatggaagatgaaatgaatgaaatgaagcgagaagggaagtttagagaaaaaagaataaaaagaaatgagcaaagcctccaagaaatatgggattatgtgaaaagaccaaatctacgtctgattggtgtacctgaaagtgacagggagaatggaaccaagttggaaaacactctgcaggatattatccaggagaacttccccaatctagcaaggcaggccaacgttcagattcaggaaatacagagaacaccacaaagatactcctcgagatga

SEQ ID NO: 151529 - DNA, 1416 bp, Homo sapiens
atggaagatcctggccccataacatctgtcttcttgcctcttcctcattatgctttgaagggacaagaaacaacgattaaaaatattgagtctgcaaaaggacttgatgtgtgggacagctggccgctgcaaaacgctgacggaacagtagctgaatacaacggctatcacgttgtgtttgctcttgcgggaagcccgaaagacgctgatgacacatcaatctacatgttttatcaaaaggtcggcgacaactcaatcgacagctggaataacgcgggccgtgtctttaaagacagcgataagttcgacgccaacgatccgatcgtgaaagatcagacgcaagaatggtccggttctgcaacctttacatgtgacggaaaaatccgtttattttacactgactattccggtaaacattacggcaaacaaagcctgacagcagcgcaggtaaatgtgtcaaaatctgatgacacactcaaaatcaacggagtggaagatcacaaaacgatttttgacggagacggaaaaacatatcagaacgttcagcagtttatcgatgaaggcaattatacatccggcgacaaccatacgctgagagaccctcactacgttgaagacaaaggccataaataccttgtatttgaagccaacacgggaacagaaaacggataccaagactcagcccacctgcacccaggtgaaataaacagccatgttgctcacacaaagcctgtttggtggtctcttcacatggacgcgcatgaaatttggtgccgtgactcggatcgggggacctcccttgggagatcaatcccccgtcctcctgctctttgctccgtgagaaagatccacttacaacctcaggtcctcagaccaaccagcccaagaaacatctcaccaatttcaaatccaggattttgccgatttcggaaccaccatcaaacaggattttcgcctgctggggcaaaccagcgtggaccgcttgctgcaactctctcagggccaggcggtgaagggcaatcagctgttgcccgtctcactggtgaaaagaaaaaccaccctggcgcccaatacgcaaaccgcctctccccgcgcgttggccgattcattaatgcagctggcacgacaggtttcccgactggaaagcgggcagtgagcgcaacgcaattaatggattttgccgatttcggaaccaccaccaaacaggattttcgcctgctggggcaaaccagcgtggaccgcttgctgcaactctctcagggccaggcggtgaagggcaatcagctgttgcccgtctcactggtgaaaagaaaaaccaccctggcgcccaatacgcaaaccgcctctccccgcgcgttggccgattcattaatgcagctggcacgacaggtttcccgactggaaagcgggcagtga

SEQ ID NO: 151530 - DNA, 1826 bp, Homo sapiens
tccatcacactatcaatctcactgactctctcctagccgtttctaatccttctttaacaaataattgctggctttgcaattctctttcctccaaaatcgccaaggcctcaatttactcattgctgaaaaaggacgactctgtatatttttaaatgaagagtgttgtttttacctaaatcaatctggcctggtatatgacaacataaaaaaactcaaggatagagtccaaaaacttgccaaccaagcaaataattatgctgaacccccttgggcactctcttaattggatgtcctgggtcctcccaattcttagtcctttaatacctgtttttctccttctcttattcggactgtgtgtcttctgtttagtttctcaattcatacaaaaccgtattcaggccatcaccaataattctatatgacaaatgctccttctaacaaccccacagtatcagcccttaccccaaaatctttcttcagtmgaatctctcccactgtaggttcccaggccgcccctaatcccgctcgaagcagccctgagaaacatcgcccattatctctccatatcacccccacaaattttcgccaccccaacactttaccactattttgttttatttttcttattaacataagaagacaggaatgtcaggcctctgagcccaagctaagccatcatatcccctgtgacctgcacatacacatccacatggccggttcctgccttaactgatgacattccaccacaaaagaagtgaaaatggcctgttcctgccttaactgttgacattatcttgtgaaattccttctcctagctcatcctggctcaaaagctcccctactgagcaccttgtgacccctactcctgcccgccagagaacaacccccctttttcctttacctacccaaatcctataaaacagccccacccttatctcccttcactgactttcttttcggactcagcccacctgcacccaggtgaaataaacagctttattgctcacacaaagcctgtttggtggtctcttcacacagacacgcatgaaatttggtgctgtgactcggatcgggggaccacccttgggagatcaatcccctgtcctcctgttctttgttccaagagaaagatccacctacgaccttggtcctcagaccgaccagcccaagaaacatctcaccaatttcaaatccacctcctttgtgttctcctcttgtattcccccaccttaaccctcaagtatatctctactccctccttggcgaccgatcatgcaccccttaccatctcattaaaacctaatcacccttaccctgctcaatgccaatatcccatcccacagcatgctttgaaaggattaaagcctgctatcactcgcctgctacagcatggccttttaaagcctataaactctccttacaattcccccattttacctgtcctagaaccagagaagatttacaggttagttcaggatctgcgccttatcaaccaaattgttttgcctatccaccccgtggtgccaaacccatatactctcctatcctcaatacctccctccacaatccattattctgttctggatctcaaacgtgctttctttactattcctttgtacccttcatcccagcctctcttcgctttcacttggactgaccctgacacccttcaggctcagcaaattacctgggctgtactgccgcaaagcttcacagacagcccccattacttcagtcaagcccaaatttcttccttatctgttacctatctcagcataattctcataaaaacacacacgctctccctgctgatcatgtccgattaa

SEQ ID NO: 151531 - DNA, 2391 bp, Homo sapiens
  misc_feature (1)...(2391): n = a,t,c or g
atggggagaaagcagagcagaaaagttgaaaattctgaaaatcagagctcctcttctcctccaaaggaacacagctcctcaccagcaatggaacaaagctggatggagaataactttgatgagctgacagaagtaggcttcagaagattgaactcaggattaagaaactcactcaaaaaccggacaactacatggaaactgaacaatctgctcctgaatgattactggataaatagcgaaaagaaggcagaaataaagatattctttgaaaccaatgagaacaaagacacaacataccagaatctctgggacacatttaaagcagtgtgtagagggaaatttatagcactaaatgcccacaagagaaagcaggaaagatctaaaattgacaccctaacatcacaattaaaagaactggagaagcaagagcaaacacatttaaaagttagcagaaggcaagaaataactaagatcagagcagaactgaaggacttagagacacacaaaaacattcaaaaaatcaatgaatcgaggagctggttttttgaaaagatcaacaaaattgatagaatgctagcaagattaacaaagaagaaaagagagaagaatcaaatagatgcaataaaaaatgataaaagggatatcaccactgatcccacagaaatacgaactaacatcagagaatactataaacacctctatgcaaataaactagaaaatctagaagaaatggataaattcctggatgcatacatcctcccaagactaaaccaggaagaagttgaatctctgaatagaccaataacaggctctgaaattgaggcaataataatagcctaccaaccaaaaaaagtccaggaccagatggactcacaatcaaattttaccagagaaaccatcaaactctcctccaaagtggctgtacaactttttgcgcccccaccaacgatgaatgggagctcctgttactccacatcctcatcagcacttggtgttgtcattgttcagaatttgggccactctaatagtgaggacattgtgcgctccctctgcctgccagacttccctgagccagctgacctcttctggaagtacctggacttggccaccttcatcctgctctacatcctgcccctcctcatcatctctgtggcctacgctcgtgtggccaagaaactgtggctgtgtaatatgattggcgatgtgaccacagagcagtactttgnnctgcggcgcaaaaagaagaagaccatcaagatgttgatgctggtggtagtcctctttgccctctgctggttccccctcaactgctacgtcctcctcctgtccagcaaggtcatccgcaccaacaatgccctctactttgccttccactggtttgccatgagcagcacctgctataaccccttcatatactgctggctgaacgagaacttcaggattgagctaaaggcattactgagcatgtgtcaaagacctcccaagcctcaggaggacaggccaccctccccagttccttccttcagggtggcctggacagagaagaatgatggccagagggctccccttgccaataacctcctgcccacctcccaactccagtctgggaagacagacctgtcatctgtggaacccattgtgacgatgaaaacactgggaggcacagcagcctgtatctctgaggaagaggagcgaggacaacgttggcccagatgggggctgaatcattcaactgcctccatctgtggggcagctgctgccttacagcccttcctactgctgagcatccctaagggagacctaaatcatactttgggtgtggtgacccagatgcacagagctctgcttgaaacagacaataaaatacctaggaatccaacttacaagggatgtgaaggacctcttcaaggagaactacaaaccactgctcaacaaaataaaagaggacaaaaacaaacggaagaacattccatgctcgtggggaggaagaatgaatatcgtgaaaatggccatactgcccaaggagagacaaataccaaggagatatcaggaagaatattgtccccagtaaataccaagtcacatcaggaagaatattgtggagagagaggtaaagaatcaggatggaaacagaaaataggccgaacaatggccaagcgtcaaaatcctacgtcaggagcttgctacaagtgccagaaatctggccaccaggccaaggaatgcccgcagcccaggattcctcctaagctgtgtcccatctgtgtgggaccctactggaaatcagactgttcagctcacctggcagccactcccagagcccctggaactctggcccaaggctctctgactgaccccttcccagatgttctcggcttagcagctgaagactga

SEQ ID NO: 151532 - DNA, 1150 bp, Homo sapiens
atgcctatcaaaatcactgctgcctgttttagaaaaactgacaagctgattccaaaattcatgtggaaatgcaagggacccagaataaccaaaacaatcttggaaaagaatgaagttggagaatttacacttcttgatttcaaaacttaccacaaatttgcagtaatcaaaactatgtggtactggcataaggacagatacattgatcaacagaatgacattgaaagtccagaaataaattcatatgtttatggtcaactgatttttgacaaagactcagcccgcctgcacccaggtgaaataaacagtcttgttgctcacacaaagcctgtttggtggtctcttcatatggacgcgcatgaaatttggtgccgtgactcggattgggggacctcccttgggagatcaatcccctgtcctcctgctctttgctctagagagacaaaggagacacgttttatccatggacccaaaactccggtgctggtcacggactgggaaggcagccttcccttggtgtttaatcattgcagagatgcctgattattcacccacgtttcaaaggtgtcagaccacgcagggacgcctgccttggtccttcacccttagcagcaagtcccgcttttctggggaaggggcaactcaacgccaatatcccatcccacagcaagctttgaaaggattaatgcctgctatcactcgcctgctacagcatggccttttaaagcctataaactctccttaccattcccccattttacctgtcctaaaaccagacaagccttacaagttagttcaggatctgcgccttatcaaccaaattgttttgcctatccaccccatggtgccaaacccatatactcttctatcctcaatacctgcctctacaacccattattctgttctagatctcaaacaagctttctttactattcctttgcacccttcatcccagcctctcttcgcattcacttggactgaccctgacacccatcaagctcagcaaattacctgggctgtactgccacaagccttcacagatagcccccattacttcagtcaagcccaaatttcatcctcatctgttacctatctcggcataattctcataaaaacacacgtgctctccctgctgttcgtgtttgactaa

SEQ ID NO: 151533 - DNA, 3182 bp, Homo sapiens
atgcgcggagcgaggcccgtgagtggcagcggcggcgcgcggggggcgggcgaggggccgagagtgggggagcgggcgggggccgtcgaggaggcgttgtgtgggcgcgacggctgcgagttggggaggatgtcgtcggaggagaacaagtgcgtggagcagccgcagccaccaccccccgaggagcctggagccccggccccgagccccccagccgcagacaaaagacctcggggccggcctcgcaaggcgcttcccctttccagagagccagaaagaatcgggccttttcagtgggtcttctccgcgactcttcttttggagaaatttctcgtagccgcgtcttggcctagctggatcattgagaaaacaagcccggagcgcgcgcaggtagtccccggacggactccgagcgaaccgccgagccggctggacaccggcttattagaggaccagaaatgtcttcttacagaacggttatttgacggctttgcttgtaaattaagacaccgttttagtgccagcgagctgctcggcttctgtggctctcgcgtgtgccgtggaagaactgtgaatgtctttcgaagttgtagaatggcgaatgttcaacgctccaagccccataggctgattcaagaagataaagtgagactcaaggaatttcgaagtggaacaatacaccaaagccttaaacctgaaatgactctccttttctgggggaatcccaaaatgtgggttccaacccgggccctgaatgtcttctcaaatccccgggacccaggttccgacgcgccctctgcccggccggtgtggaccgtcccggccattgtttacgggggatgcccgtccagacgcattgttttggccgtttccaacttgccccggccctttccggggcatcgcgggggaccctacaccgacgtcccccctccgcccgcgccccaagggctgactgggcaaattggcagatccgccccgcggggcgacccaacttttcggaacagccccccaccgcccacccctgcagatccccggacccccgctcccggcggagattcagggaaccccgcatcccaagcccttctaaatcactcagcccacctgcacccaggtgaaataaacagctttattgctcacacgaagcctgtttggtggtctcttcacacggatgcgcatgaaatttggtgctgaagacccaggacaggaggacctcctttgggagaccaatcccctgtcctcctgctctttgctccgtgacaaagatccacctacgacctcaagtcctcagacccaccagcccaagaaacatctcaccaatttcaaatctgggacgcctctctgattatacactcacgtttcaagggtgtcagaccacgcagggacgcctgccttggtccttcacccttagcggcaagtcccgctttcctggggcaggggcaagtacccctcaaccccttctccttcaccctcagcggcaagtcccgcttttctggggcaggggcaagtacccctcaaccccttccccttcacacttagtggcaagtcccgctttcctggggcaggggcaagtacccctcaacgccttctccttcacccttagtggcaagtcccgcttttctagggggcaagaacccccaaaccccttccatctgtgtctctacgctctcttctgtgggtttgcttccttcactatgggcaaccttccaccctccattcctccttcttctcccttagcctgtgtgctcaaaaagttaaaacctcttcaactcacacctgacctaaaacctaaatgccttattttcttctgcaacaccgcaaccgcttggccccaatacaaacttgacaatgtctctaaatggccggaaaatggcactttcgatttctccatcctacaagacctaaataatttttgtcgaaaaatgggcaaatggtctgaggtgccttacgtccaggcatttttcacacttcgttccctccctagtctctgttcccaatgcgattcctcccagatcctcctcctttccctcccgcctgtcccctcggtcccaaccccaagcgtcgctgagtcttcccagtcttccttttctacagacccatctgacctttcccctcctccccaagctgcttgtcgccagaccgagctaagtcccaatacttcctcagcctccactcctccaccctataatccttctatcacctcccctcctcacacctggtccggcttacagtttagttccgcgactagcgcttccccacctgcccaacaatttcctcttagagaagtggctggagctgaaggcatagtcaagatgaacgggaaagttttttctctagcccaatctcgtgctgataaccgccggcttcatgagccagacctccaggaaggcattagagcagttccccgagaggatccccaatggaactatcaggcagattccccaggtacagctaggcgagattacatggtttcctgcctagttgaagggcttaaaaaagcagcttacaaagctgttaattatgacaagcttaaagaaactacccgaggtaaagacgaaaacccagcccagacccagaggggccagaaggccgccttattcttaatatgcatttttatcacccaatccactcctgacattaggaaaaaacttcaaaaattagaatctggccttcaaacccagcaggaattaatcaaccttgccttcaaggtgtacaataatagagaggaagcagccagacggcaacgcatttcggagttacaattacttgcctctgctgtgagacaaaacccagccacacctcctgcatacaggaacttcaaaatgcctgaactgcagcggccaggccttcctccagaacctcctcctccaggagcttgctacaagtgccagaaatctggccaccaggccagggaattcctgcagcccaggattcctcctaagccacgtcccatctgtgccggaccccactggaaatcggactgttcagctcacctggcagccactcccagagcccctggaactctggcccaaggtgttatcacgagttatggattatatctagatggtatattaatccacaattcctcagaactcagctatcgtgcttacggatttgctccttggagtttacattccttcagagtccaagcatgcacggccaaaggttgtgctctgggcccactg

SEQ ID NO: 151534 - DNA, 4922 bp, Homo sapiens
atgtggaaaggccccaaaggattagacatgtatggaaagagctcagtgagccctaagacatcagatatactggggagagacactctcctgctggccttgaaggtgcaaacagtggtgttgcaaactgcctgtggagagggccatgtggcaggaaactgtgggaggcctctagaaactgaaggcagtctccagctgacagctactaagaagctaagggactcagtcctgcaaccaaaaagtcctgaattctgccaacaatttacaagagcttggaataggacccaagttccagatgagactgaagccccagctggcacctatgcagcccaatcgggggacctcccttgggagatcaatcccctgtcctcctgttctttgctccatgagaaagatccacctacggcctcaggtcctcagaccgaccagcccaaggaacatctcaccaattttaaatcgggtttcagaggtgtcagaccacgcagggacgcctgccttggtccttcacccttagcggcaagtcccgcttttctggggaaggggcaagtaccccaaccccttctctctgtgtctctaccccttctccgcctttctggggggcaagaaacacccaaccccttctccttcaccctgagtggcaagtccgcttttctagaggagcaagtaccccaacctcgtatctctgtgccccagtcccttatttccacgccccgacctcttatctctgtggcccaatcccttatttctgcaccccaacctcttatatctctgtgccccaatcccttatttccatgccccgacctcttatctctgcaccccaaccccttatttccacgacccaacccctttcccgcttttctggaaggagcttgctacaagtgccagaaatctggccaccaggccaaggaatgcctgcagcccgggattcctcctaagctgcgtcccatctgtgcgggaccccactggaaatcggactgtccaactcacctggcagccactcccagagcccctggaactctggcccaaggctctctgactgcttcccagatcttcttggcttagcggctgaagactgacactgcccgatcacctcggaagccccctagaccatcacggatgctgagcttcgggtaactcgcacagtggaggacaggaatgtcaggcctctgagtccaagctaagccatcatatcccagtgacctgcacgtatacatccagatggcctgaagcaactgaagatccacagaagtgaaaacagccttaactgaagacattccaccattgtgatttgtttctgccccaccctaactgatcaatgtactttgtaatctcccccacccttaagaaggttctttataatgtcacccacccttaagaagtttctttgtaattctccccacccttgagaatgtactttgtgagatccatcccctgcccccaaaacattgctcttaactctactgcctatcccaaaacctataagaaccagtgataatcacaccaccctttgttgactcctttttcggactcagcccgcctgcacccaggtgaaataaacagccatgttgctcacacaaagcatgtttggtggtctcttcacacagacgcgcatgaaatttggtgccgtgactccgatcgggggacctcccttgggagatcaatcccctgtcctcctgctctttgctccatgagaaagatccacctacgacctcaggtcctcagactgaccagcccaagaaacatctcaccaatttcaaatccgatagcgtttaggctctttttcatcaaatataaaaacccagcccagttcatgtctcattcggcagcaaccctgcgacgctttacagccctagaccctaaaagactgacgctgcccggtcgcctcggaagccccgtagaccatcagggacgccgagctttgggtaactctcacagtggaaggaaatcccctttccttaaagttcactgttcacaggaatctgctattcgtgcttcatttctccactcccacagactagcccagtgttccagcccacctcttgggtatatagtctcaggccagttttcaaccgacattgttttcacaataaagcagttgatttcatataacatctgtcgctatggtgacaataggagagtgataactggaaaagctaatagggcttttctaacttccctcctggaatatgtagctgatgtggaagcaacagcaaggcgatcagtaaagggagaggagaccagtctcctgtcctcctgttctttgatccgtgagaaagatcgccctatgacctcaggtcctcagaccaaccagcccaagaaacatctcaccaatttcaaatccgggagagacaaaggagacacgttttatccgtggacccaaaactccggcgccggtcacggactgggaaggcagccttcccttggtgtttaatcattgcagggacgcctctctgattatacacccacgtttcaagggtgtcagaccacgcagggatgcctgccttggtccttcacccttagcggcaagtcccgattttctgaggaagggacaagtacccctcaaccccttctctccttgtctctaccccttctctgcttttctggggcaggggcaagaacccctcaaccctttctccttcacccttagcggcaagtcccgctttcctggggcaggggcaaagggggatgtgtcagggtcacaagacaattgtggggagagggtcagccgacaaacacgtgaacaaaggtctttgcatcatagacaagactcagcccacctgcacccaggtgaaataaacagccatgttgctcacacaaagcctgtttggtggtctcttcacacggatgtgcatgaaatttggtgccgagactcggattgggggggggacctcccttgggagatcaatcccctatcctcctgtgttctttgctccgtgagaaagatccacctacgacctcaggtcctcagaccgaccagcccaaggaacatctcaccaattttaaattggtggctgaagactgatgctgcccgattgcctcggaagccccctagaccatcactgatgccagcttcacgtaactttcacagtggaggactacagccccatctcattgtcgcccttctccccaacccaaagcctccttcgtgtcttcctctcgtatccccccaccttaacccacaagtatgggacatctctaatccttccctggcaaccgatcacatgcccattaccatcccattaaaacctaatcacccttacccggctcaatgccaatatcgtatcccacagcacactttaaaaggattaaagcctgttatcactcccctgctacagcattgtcttctaaaacctataaactctccttacaattcccccattttacctgtccaaaaaccagacaaatcttacagattagttcaggatctgcgccttatcaaccaaattgttttgcctatccaccctgtggtgcccaaaccatacactcttttgtcctcaataccttcctccataactcactattctgttcttgatcttaaagatgcttttttcactattcccctgcacccctcatcccagcctctctttgctttcacctggactgaccctgacacccatcagtcccagcagcttacctgggctgtgctgccgcaaggtttcagggacagtcctctttacttcagccaagctctttctcatgatttactttctttccacccctccgcttctcaccttattcaatatattcatgaccttcttctttgtagtccctcctttgaatcttctcaacaagacacacttctgctccttcagcatttattctccaaaggatatcaggtatccccctccaaagctcaaatttcttctccatctgttacctacctcggcataattcttcataaaaacacacgttctctccctgccgatcgtgttcaactaatctctcaaaccccaaccccttctacaaaacaacaactcctttccttcctgggcatggttggatactttcgcctttggatacctggttttgcattcctaacaaaaccattatataaactcacaaaaggaaacctagctgaccctatagatcctaaatcctttccccactcctctttccattccttgaagacagctttagagactgcccccactctagctctccctgactcatcccaacccttttcattacacacagccgaagtgcagggctgtgcagttggaattcttacacaaggaccaggatggcatcctgtagcctttttgtccaaacaacttgaccttactgttttaggctggccatcatgtctccgtgcagcagctgctgctgccctaatacttttagaggccctcaaaatcacaaactatgctcaacgtactctctacattgctcataacttccaaaatctattttctgcctcattcctgaggcatatactttctgctccccagctccttcagctgtactcactctttgttgagtctcccacaattaccaatgttcctggcccagacttcaatccggcctcccacattattcctgataccacacctgaccctcatgactgcatctctctgatccacctgacgttcaccccatttccccacatttccttcttccctgtttctcaccctgatcacacttggtttattgatggcagttccaccaggcctaatcgccacacaccagcaaaggcaggctatgctatagtacaagccaatagcccgcctcttagaacctctcatatcctttccatcgtggaaatgtatcctcaaggaaataacttctcagtgttccatctgctattctactactcctcagggattattcaggccccctcccttccctacacatcaagctcagggatttgccaccgcctaggactggcaaatcagcgttactcaacatgccccgagtcaggaaactaa

SEQ ID NO: 151535 - DNA, 761 bp, Homo sapiens
cacccgcttccgtcagcctcactggggcttccttccgtctcgctcggagtttccctctgcgttcgctccgcgctgctggaggctgtcgtcccaatgctccccaaacggcggcgagcgcgggtcgggtcccctagcggcgatgccgcttcctccacgccgccctcgacgcgcttcccgggagtcgccatctacctggtcgagcctcgcatgggtcgcagccgccgggccttcctcacaggcctggcgcgctccaaaggcttccgcgtccttgacgcctgcagctccgaagcgacacatgttgtgatggaagagacctcagcagaggaggccgtcagctggcaggagcgcaggatggcagctgctcccccgggttgcacccccccagctctgctggacataagctggttaacagagagcctgggagctgggcagcctgtacctgtggagtgccggcaccgcctggaggtggctgggccaaggaaggggcctctgagcccagcatggatgcctgcctatgcctgccagcgccctacgcccctcacacaccacaacactgtgctcttcgggccctccctgcaggaggctctggagatactggccgaggcagcaggctttgaaggcagtgagggccgcctcctcaccttctgcagagcagcctcggtgctcaaggcccttcccagccctgtcacaaccctgagccagctgcaggggcttccccactttggagaacactcctctagggttgtccaggagctgctgga

SEQ ID NO: 151536 - DNA, 972 bp, Homo sapiens; identical to SEQ ID NO: 137865

SEQ ID NO: 151537 - DNA, 2175 bp, Homo sapiens
atggtgaacccagatactggctacatcaactatgaccagctggaggagaacgcacgcctcttccacccgaagctgatcatcgcaggaaccagctgctactcccgaaacctggaatatgcccggctacggaagattgcagatgagaacggggcgtatctcatggcggacatggctcacatcagcgggctggtggcggctggcgtggtgccctccccatttgaacactgccatgtggtgaccaccaccactcacaagaccctgcgaggctgccgagctggcatgatcttctacaggaaaggtggtatggctcctctcgggaccgcaacactcctccaggctcttttcagccttttattcctctcgaagtctcgggacgttccgggcaccggcgcggacccaggagtcatgtatgtcaagaggcggccccgcggaacagattccggttgtggcgtcttagaaccccggcggtttctgccctcgggcatggccttcaccaaagaggaagagtatgaagaagagccttacaatgagccggccctgcctgaggagtactcggtgccgctcttccccttcgccagtcagggtgctaacccctggtcaaaactgtccggggccaagttttcgagggacttcattcttatttccgagttctctgagcaggtgggaccccaacccttactgaccatccccaatgacaccaaagtttttggcacttttgatctcaattacttctccctgcgtatcatgtctgtggattaccaggcttccttcgtgggccatcctcctggatctgcctaccccaagctgaacttcgtggaggactccaaggtggtgctgggagattctaaggagggcgcctttgcatacgtgcaccaccttaccctatacgacctggaggcccgtggcttcgtgaggccgttttgcatggcttatatctctgcagaccagcataaaatcatgcagcagttccaggagctttcagccgaattttccagagcttctgagtgcttgaagactggcaacaggaaggcatttgctggggaacttgaaaaaaagctgaaagacttggattacaccaggacagtgctacacacagaaacggagatccagaagaaagccaacgacaaaggcttttactcatctcaggcaattgagaaagccaatgaactggccagtgtggagaagtccatcattgaacatcaagacctgctgaagcagatccgctcataccctcatcggaagttgaaggggcatgatttgtgtcctggtgagatggagcacatccaggatcaggccagccaggcatccactacctctaaccctgatgagtctgccgacacagacctttacacctgcagaccagcctacaccccaaaacttatcaaagcaaagtccaccaagtgttttgacaagaagttgaagaccttggaggagctctgtgacactgaatatttcacccagaccctggctcagctcagccacattgaacacatgttcagaggagacctgtgttacctcctgaccagtcagattgatagagcacttctaaaacaacagcatataacaaactttctctttgaagactttgtggaggtcgatgacaggatggtggagaaacaagaaagcataccctctaagcccagtcaagacaggccgccttccagttctctagaagaatgcccaattcctaaagtgttaattagtgttggttcttacaagtccagtgtggagtctgtgttgatcaagatggagcaggaactgggagatgaggagtacaaggaagtggaagtgactgagttgagcagtttcgacccccaggaaaacttggactacctggatatggatatgaaagggagtatcagcagtggtgaaagtattgaaggtttgggcacggagaaatccacctccgtgctttctaaatctgacagccaggcaagccttacagtaccattgagcccccaggtggtccggagcaaagcagcacttctgcagccccatcccaaccccacgcaccgactccggagctctagcatggaatataagcctgatcccccacaccggttctcagaaccgtggcctaacctggagcctgaggccaacctctcttcccctgcagtcaaggactcagtgaccaaggagctgcaaacagcccggccaagcagggagcagacttag

SEQ ID NO: 151538 - DNA, 1851 bp, Homo sapiens
  misc_feature (1)...(1851): n = a,t,c or g
ggacatcattcctcttgtcatggtgaacccagatactggctacatcaactatgaccagctggaggagaacgcacgcctcttccacccgaagctgatcatcgcaggaaccagctgctactcccgaaacctgggaatatgcccggctacggaaagattgcagatgagaacggggcgtatctcatggcggacatggctcacatcagcgggctggtggcggctggcgtggtgccctccccatttgaacactgccatgtggtgaccaccaccactcacaagaccctgcgaggctgccgagctggcatgatcttctacaaggaaaggagtgaaaaagtgtgggatncccaagacttggcaaagagattctgtacaacctggagtctcttatcaattctgctgtgttccctggcctgcagggaggtccccacaaccacgccaattgctggggttgctgtggcacttgaagcaagctatgactctggaatttaaagtttatcaacaccaggttgtagccaactgcagggctctgtctgaggccctgacggagctgggctacaaaatagtcacaggtggttctgacaaccatttgatccttgtggatctccgttccaaaggcacagatggtggaagggctgagaaggtgctagaagcctgttctattgcctgcaacaagaacacctgtccaggtgacagaagcgctctgcggcccagtggactgcggctggggaccccagcactgacgtcccgtggacttttggaaaaagacttccaaaaagtagcccactttattcacagagggatagagctgaccctgcagatccagagcgacactggtgtcagagccaccctgaaagagttcaaggagagactggcaggggataagtaccaggcggccgtgcaggctctccgggaggaggttgagagcttcgcctctctcttccctctgcctggcctgcctgacttctaaaggagcgggcccactctggacccacctggcgccacagaggaagctgcctgccggaggacccccacctggagagatggatgagctcgtccaaaggggaactgttgacactcgggccctttgagggggtttcttttggacttttttcatgttttcttcacaaatcaaaatttgtttaagtctcattgttagtaattctgggacaggttattaaaggatttaaatttgaacctggctttctcacagctggacataattctaggaaaataaaatactatgtcgccacttggtcataatcatttagatggtggtgtagggcaaagctgttagaaagattgtagcgttttactctccctgggctttccttccgccttgctgcaacagagaggaaatgcccatgtccacagcttgtacacactgccccctcactatcttgttatccagtggcatgccaaaggagaactgaattagcttctgaggcttctgctgtaaatcagaagtgtatgttagtcaagagtaaacaagatgcaccagtatggtgggagggttgctgtcagtagctcaaagtatggtgtagaaatggcctcctccctccatcctgggaagtcccagtcccatcctggtgtgagaatcaaccaggctttcctgctccacctgagataaccaactccctcccgtaatcaggaagccaaatgtcaccttcccaaagaaattttattttcacgtagctgaagtgcaaaacatagatgaccatttttaataagcacaatcaaatttttaaccacagaatgtctacaagaattatagctttaaaaaatacaaccaatttttatatttcaaaaatatttgaactcaaataaattaatttcttaaaaagtaaaaaaaaaaaa

SEQ ID NO: 151539 - DNA, 816 bp, Homo sapiens
cacactttgagcttcagtctctgcatctataaaaccatggacacatgcatgagtacttgtagcatttcctttggtcttgggttcaagtagcttctggtccctttttgggaaatgcaggacctcaagacagcacatcattgtgtggcgtgggtcgtgaccccaactcactagatctggcaccactctttctacaatgagcttcgtgttgcccctgaagagcatcccaccctgctcacggaggcacccctgaaccccaaggccaaccgggagaaaatgactcaagtaagtatgctaccccagcacacaacactgtggggtctggggaaacttctgttagaaggaggctatgcagcacagcagagagaaggccggagctaggagtccaccaacagactaacagccttcagtgaactcagggatcccaaaggacaggaacagcttgaaagtacttgcatccttcctgcagggaccagccctttgcctccaaaagcaataggaaatttaaaagatttcactgagaaggggccacgtttaagttataatgtctaaggagaagtcacttcaaaatgcagcatcacatacaataggaatttgtgttccagagtcagacatatctaggtttgaaaactggatctgccacttatcagttatgtgaccttaaagaactccgttaatttctcagagcctcagtttccttgtctataagttgggagtaatattaatactatcatttttccaaggattgatgtgaacattaatgaggtgaaatgacagatgtgtatcatggttcctaataaacatccaaaatatagtaaa

SEQ ID NO: 151540 - DNA, 1423 bp, Homo sapiens
acttcccaggggctatataacccttcagctttcagcttccctgaacaccacccagtgtggagcagcccagccaagcactgtacaggaatcctgtgaagcagctccagctattgtgtgaagaagaggacagcactgcccttggtgtgtgacaatggctctgggctctgtaaggccggctttgctggggacgatgctcccagggctgttttcccatccattgtgggacgtcccagacatcagggggtgatggtgggaatgggacaaaaagacagctacgtgggtgacgaagcacagagcaaaagaggaatcctgaccctgtaagtacccgatagcacatggcatcatcaccaactgtgatgacattgaaaagatctggcaccactctttctacaatgagcttcgtgttgcccctgaagagcatcccacccttgctcacggaggcaccccttgaaccccaagggccaaccgggagaaaatgactcaaattatgtttgaggctttcaaatgtcccagccatgtatgtggctatccaggcggggcttgtctctctaagcctcttggagccacaagctgggcatcgtggctgggactctgggagatgggtgttcacccacaatgtccccatcttatggagggctatgcctttgccccatgccatcatgcgtctgggatctgggctgggccgagatcttcactggacttaccttcatgtaagatcctgactgaggcgtggctatttccttcgttactactgctgagcgtgaagaattggtccgggacatcaaggagaaactgtgttatgtaagctctggactttgaaaatgagatggccactgccgcatggtcatcctcccttgagaagagttacgagttgcctgatgggcaagtgatcaccatcggaaatgaacgtttccgctgcccagagaccctgttccagccatccttcatcgggatggagtctgctggcatccatgaaaccacctacaacagcatcatgaagtgtgatattgacatcaggaaggacctctatgctaacaatgtcctatcagggggcaccactatgtaccctggcattgccgaccgaatgcagaaggagatcacggccctagcacccagcaccatgaagatcaagatcattgcccctccggagcgcaaatactctgtctggatcggtggctccatcctggcctctctgtccaccttccagcagatgtggatcagcaaacaggaatacgatgaagccgggccttccattgtccaccgcaaatgcttctaaaacactttcctgctcctctctgtctcatgcacacaactgtgaatgtcctgtggaattatgccttcagttcttttccaaatcattcctagccaaagctctgactcgttacctatgtgttttttaataaatctgaaataggctactggt

SEQ ID NO: 151541 - DNA, 343 bp, Homo sapiens
  misc_feature (1)...(343): n = a,t,c or g
actnnnnnnnnnnnnnnnnnnnnnnnnnnnnnnnnnnnnnnnnnnnnnnnnnnnnnnnnnnnnnnnnnnnnnnnnnnnnnnnnnnnnnnnnnnnnnnnnnnnnnnnnnnnnnnnnnnnnnnngatagttgaatgctcacctaatttcctaagaagattaacaatttttattttacttttttgcaggatccaactggaatattctcactagataaaaccattggccttggtacttatggcagaatctatttggtaagttgacttacattatttattcattcttcattttctaatgacaacaaagattgtgagtcaaacactgcaaatcacataatgccacaata

SEQ ID NO: 151542 - DNA, 557 bp, Homo sapiens
gcggccgcagtcgcaaatcctccgcgcagtcctccgcgccacctgcgcccggcgctgcggggtctacgtgctgcccatcggcgacgcggacgcgctgcagcagtgaccacgtcgtacaggtatgggctgggtagggaccgcaacgagtccccaccctgtagcgtggaggacgcggaggcccagctctctccggtcactgcctagtgtgcgggcgttggtggtgaggaccgagcgcagggtcccgtgtgggtgagcccttcagagtcccactgtgacaggggctttcagggagaacgggtccgcgggccctcggcacctcccagcccagctctgctcctggacagccgagggctttctcccttttttcctcttaccacaaaagtaattcatactgtagaaaaatgggaaagtacagaaattacaacaaaatacgtatctccttgatccctccacagacgcgttattcttaaaccttcatccaccccaatttagatgcctgatataaaacaccatgttacacccaccggcaaactttttaacaatagcgcaaaagaaag

SEQ ID NO: 151543 - DNA, 564 bp, Homo sapiens
ctaggcccggcggtgggagttaaagggaggccggttccaactcggctgaaggcaggccattctgacggctgcccccaggagggcggctgcgagggcagcggtgcgctcccggcacgggggtgctcgagcactgagtccgggcatggagcagcgaaggcgccgcctgtacgacgtggtcactgctgcagccgcgtccgcgtcgccgatgggcagcacgtagaccccgcgggcgccgggcgcaggtggcgcggaggactgcgcggaggatttgcccctgcggccgcccgcccccggtccgcgccccggcggcggatccttgggcccggcgggcgtggtccacaagccgaagtcccgctggtactgagtgagcggcacgtcccggccggaatcccgggcgcccgcgggaggctggcccctgcgcgaggcggcgccgcccgtgcccggctcctcgctgtcgaggtccgagtagccgtgcagagtgagcggcaccgccacgtcggagcggtccagctggttccagcgccgcgccaggcagcacaggcggctgatacagggccacgccat

SEQ ID NO: 151544 - DNA, 885 bp, Homo sapiens
cctgtcacagtgggactctgaagggctcacccacacgggaccctgcgctcggtcctcaccaccaacgcccgcacactaggcagtgaccggggagagctgggggacatggcctgcgcgcacccctcgcacggctaggcccggcggtgggagttaaagggaggccggttccaactcggctgaaggcaggccattcctgacggctgcccccagggacgggcggctggcgaagggccagcggtgcgcctcccggcacgggggtgactcgaagcactagagtccgggccatggagcagcgaaggcgccgcctgcagtgcccacggaccaaacgggggtgacctctgaggccgccggcagctccgaggtcgcgtgggatccgggctccaggcgcctccgctctgccgcccaccccatccctctggctccgggcctccgcgtcctcccaccacagggtggggactcgttgcggtccctacccagcccatacctgtacgacgtggtcactgctgcagccgcgtccgcgtcgccgatgggcagcacgtagaccccgcgggcgccgggcgcaggtggcgcggaggactgcgcggaggatttgcccctgcggccgcccgcccccggtccgcgccccggcggcggatccttgggcccggcgggcgtggtccacaagccgaagtcccgctggtactgagtgagcggcacgtcccggccggaatcccgggcgcccgcgggaggctggcccctgcgcgaggcggcgccgcccgtgcccggctcctcgctgtcgaggtccgagtagccgtgcagagtgagcggcaccgccacgtcggagcggtccagctggttccaacgccgcgccaggcagcacaggcggctgatacagggccacgccat

SEQ ID NO: 151545 - DNA, 828 bp, Homo sapiens
atgatgaggactgcctggagccgagggtttcagcaattggcagggccgtgcatggggcagagcagcagcccctggggagtcggtaaaggggtggctgaccctgtgcaagcttgtgaccgtgttctctgttccagacaggaattccaggcttggactggagtgaagccctcaagatccacaaagacaaaaccagcccgagtcatcacaacccacacttcgggatgggacagcagccctggggccggcttccaggtcagccggaagctggtgcagcagggttttgaaatctctgaggagcctgaggatcaagtcagttgggaaccgaattggtccatggaagctgaggaatgtggacacatccggcccttgaaagaaccagttatgtccacttttggtggatttcccaggatgcgtgagcacttgattaatttcataacctacagtgagacccttggctcttcctacaaatggcccctgcagttgaagctgttggaatcttgggccgtcacctgcatgactcatggtgatgctgagtatccaggaggaaatttccagaagaaacagaccgtcagtcacgggcttccacttcacagacctccttatggccaagatgagcctcgtgttttaacaaaacagttcttgggattgaatgactcacatttaacttgtggtaggttctaaagattgaatccacattttgttactaatgattttcccgctaacataaggatgatgagcagggcactatcatacacactggctgagaactggaactgtttttgggaaggtggcatttgtctcattccctgaaataccttaaaatgtcct

SEQ ID NO: 151546 - DNA, 1111 bp, Homo sapiens
tgttctgccgctacgtcgcttgtatcctctgagctctcgaataccgcactgctgatcgtccttatgctagcgggaaaattattattaacaaaatgagctttcagtctttagaacctaacacaaggtctgtgtgagacattcaatcccaagaactgtcttgttacaacatgatgctcatcttggccataaagaggtctgtgaagtggaagcccgtgactgacggtctgtttcttctggaaatttcctcctggatactcagcatcaccatgagtcatgcaggtgacggcccaagattccaacagcttcaactgcaggggccatttgtaggaagagccaagggtctcactgtaggttatgaaattaatcaagtgctcacgcatcctgggaaatccaccaaaaaatggaacataaactggtcctttcaaagggccggaatttgtcccaaaattcctcaagcttcccatggaccaaattcggttccccaactgacttgatcctcaggctcctcagagatttcaaaactgaagagacggccagatggcagttaacgaaacgcaggagccttccacaggcttctcaagaggatgcttgaggctgagctgggtgtgccaagtccatcggtgcatctgctccacaccagcactttggcccctggtgacagctttgaagaagggctgtgcccttcggcaggggcccatgccatgctctcgcccagccccgcggcagtgggtcctgaggccgctccccagccctgtcctgtcggcagccatggtgtcacggtgcaggcagtcacacgttgagaatccggggagctgaggcctgaaagatggcggaggggttaggagtgaacttcttcctcacctctgggacctggaagctcggccccagggctgctgtcccatccccaagggtgggttgtgatgactccggctgggtttgactttgtagatcttaaccgcttcactccaattaaaaccctgaaattcctgtctgtacgacgtggtcactgctgcagccgcgtccgcgtcgccgatgggcagcacgtagaccccgcgggcgccgggcgcaggtggagcggaggactgcgcggaggatttgcccctgcggccgc

SEQ ID NO: 151547 - DNA, 404 bp, Homo sapiens
  misc_feature (1)...(404): n = a,t,c or g
tttcgtgtgtggtcaccggcnccgccgccgccaccttgaaggcggaggacgcaggagccaagagcaagggacgccgccacggtcatcttcgcctgccccgccgccctcttagagacactcattgcctatggatcatcctctcccagcttttgcaagcaccgggctgctcgcccgctgattttcctcctccataggctcactgcggaggcaacggcgaggcatgaagaccccgtttggaaaggcagctgcagggcagcggtccaggacgggcgctggccacggcagtgtgtctgttaccatgataaagaggaaggctgcacacaagaagcataggagccgaccccccttcccagcctcgggggaacatcgtgggctgcataattcagcacggatggaaagatggc

SEQ ID NO: 151548 - DNA, 1701 bp, Homo sapiens
atggtaaatggaccaattcaacaagacgaactaactatcctaaatatatatgcacccaatacaggagcacccagattcataaagcaaatccttagtgacctacaaagagacttagactcccacacaataaaaattggagagtttaacaccccactgtcaacattagacagatcaatgagacagaaagttaacaaggatatccaggaagtgaactcagctctgcaccaagcggacctaatagacatctacagaactctccaccccaaatcaacagaatatacattcttttcaggactacaccacacctattccaaaattgaccacatagttggaagtaaagcactcttcagcaaatgtaaaagaacagaaattacaagaaactgtctctcagaccacagtgcaatcaaactagaactcaggattaagaaactcactcaaaaccactcaactacatggaaactgaacaacctgctcctgaatgactactgggtacataaggaaatgaaggcagaaataaagatgttctttgaaaccaacgagaacaaaggcacaacataccagaatctccaggacacattcaaagcaaaaaagaaggaggagactgcggcgcagcagcgactagtgggagtccgatgtgggagaggggctgcggccaccgccaccgccgccgccaccaggaaggcggaggacgcaggagccaagagcaagggacgccgccacggctcactgcggaggcaacggcgaggtgtccgatttgtgcacttgaggcccgcaatccgggacggtggggaatctgcgcctcctggccgggtagtgttggaagcagggcgaggggaatggggaaacgcttcgtatttcaccgaaccgcagatcttagccagactgagctggggaggaaggttactgcaggcactcagccagggcatgaagaccccgtttggaaaggcagctgcagggcagcggtccaggacgggcgctggccacggcagtgtgtctgttaccatgataaagaggaaggctgcacacaagaagcataggagccgacccacctcccagcctcgggggaacatcgtgggctgcagaattcagcacggatggaaagatggagatgaacctctaacacagtggaaaggaaccgttctggatcaggtacctgtaaatccctctctgtatcttatcaaatatgatggatttgactgtgtttatggattggaacttcacagagatgaaagagtgtcatcacttgaagtccttcctaatagagttgcatcatctagaatcagtgatacacacttggcagaaataatggttggcaaagcagtggaacatatttttgagacagaggaaggttccaaaaatgaatggagggggatggtcttagctcaggcacctgtcatgaacacatggttttacattacctatgagaaagatcctgtattatatatgtaccagctcttagatgattataaagatggtgacctccgcatccttcaagattccaatgattctcctctggcagagagggagccaggagaagtcatagacagcctggtaggcaaacaggtggaatacgccaaagacgatggctccaagagaactggcatggtcattcatcaggtagaagcaaaaccctctgtgtacttcatcaaatttgatgatgatttccatatctatgtctacgatttggtaaaaacatcttag

SEQ ID NO: 151549 - DNA, 944 bp, Homo sapiens; identical to SEQ ID NO: 62316

SEQ ID NO: 151550 - DNA, 351 bp, Homo sapiens
  misc_feature (1)...(351): n = a,t,c or g
catttccaagtacagggaaggatgatatcctgtccattgcgaagcaggttattgactggggtttctcagtattatgtgggtttggcggaaaatattatgtctgaaaagttacttcatcttttcagtaactatgtactccagtagaaaggatgaataaataatggaaggataatagggaggnnnnnnnnnnnnnnnnnnnnnnnnnnnnnnnnnnnnnnnnnnnnnngtgaaggatggaaagaaagggaagatggaataaaaaaaggaaggaggaagagagaagaaagacgaaaggaaggcagttatttaggattgaaggagtaaaaagtgtcttctttggaccagatttcn

SEQ ID NO: 151551 - DNA, 3657 bp, Homo sapiens; identical to SEQ ID NO: 120146

SEQ ID NO: 151552 - DNA, 3465 bp, Homo sapiens
atggaaggagagggatgccaggaagccagctcaggccagatgggagcccagagagcctccacagtgtggagaaaggacagatcaacgagacagaaagtcaacaaggatacccaggaattgaactcagctctgcaccaagcggacctaatcgacatctacagaactctccaccccaaatcgacagaatatacatttttttcagcaccacaccatacctattccaaaattgaccacatacttggaagtaaagctctcctcagcaaatgtaaaagaacagaaattataacaaactgtctctcagaccacagtgcaatcaaactagaactcaggattaagactctcactcaaagccactcaactacatggaaactgaacaacctgctcctgaatgactactgggtacataacgaaatgaaggcagaaataaagatgttctttgaaaccaacgagaacaaagacacaacataccagaatctctgggacgcattcaaagcagtgtgtagagggaaatttatagcactaaatgcccacaagagaaagcaggaaagatccaaaattgacaccctaacatcacaattaaaagaactagaaaagcaagagcaaacacattcaaaagctagcagaaggcaagaaataactaaaatcagagcagaactgaaggaaatagagacacaaaaaacccttcaaaaaatcaatgaatccaggagctggttttttgaaaggatcaacaaaattgatagaccgctagcaagactaataaagaaaaaaagagagaagaatcaaatagacacaataaaaaatgataaaggggatatcaccactgatcccacagaaatacaaactaccatcagagaatactacaaacacctctacgcaaataaactagaaaatctagaagaaatggatacattcctcgacacatacactctcccaagactaaaccaggaagaagtcgaatctctgaatagaccaataacaggagctgaaattgaggcaataatcaatagtttaccaaccaaaaagagtccaggaccagatggattcacagccgaattctaccagaggtacaatgaggagctggtaccattccttctgaaactattccaatcaatagaaaaagagggaatcctccctaactcattttatgaggccagcatcattctgataccaaagccaggcagagacacaaccaaaaaagagaattttagaccaatatccttgatgaacattgatgcaaaaatcctcaataaaatactggcaaaccgaatccagcagcacatcaaaaagcttatccaccatgatcaagtgggcttcatccctgggatgcaaggctggttcaatatacgcaaatcaataaatgtaatccagcatataaacaaagccaaagacaaaaaccacattattatctcaatagatgcagaaaaagcctttgacaaaattcaacaacccttcatgctaaaaactctcaataaattagtgttggaagttctggccagggcaatcaggcagaagaaggaaataaagggtattcaattaggaaaagaggaagtcaaattgtccctgtttgcagacgacatgattgtttatctagaaaaccccattgtctcagcccaaaatctccttaagctgataagcaacttcagcaaagtctcaggatacaaaatcaatgtacaaaaatcacaagcattcttatacaccaagaacagacaaacagagagccaaatcatgagtgaactcccattcacaattgcttcaaagagaataaaatacctaggaatccaacttacaagggatgtgaaggacctcttcaaggagaactacaaaccactgctcaaggaaataaaagaggacacaaacaaatggaagaacattccatgctcatgggtaggaagaatcaatatcgtgaaaatggccatactgcccaaggtaatttacagattcaatgccatccccatcaagctaccaatgactttcttcacagaattggaaaaaactactttaaagttcatatggaaccaaaaaagagcccgcatcgccaagtcaatcctaagccaaaagaacaaagttggaggcatcacactacctgacttcaaactatactacaaggctacagtaaccaaaacagcatggtactggtaccaaaacagagttatagatcaatggaacagaaaagagccctcagaaataacaccgcatacctacaactatctgatctttgacaaacctgagaaaaacaagcaatggggaaaggattccctatttaataaatggtgctgggaaaactggctagccatatgtagaaagctgaaactggatcccttccttacaccttatacaaaaatcaattcaagatggattaaagatttaaatgttagacctaaaaccataaaaaccctagaagaaaacctaggcattaccattcaggacataggcatgggcaaggacttcatgtccaaaacaccaaaagcaatggcaacaaaagccaaaattgacaaatgggatctaattaaactaaagagcttctgcacagcaaaagaaactaccatcagagtgaacaggcaacctacaacatgggagaaaattttcacaacctactcatctgacaaagggctaatatccagaatctacaatgaactcaaacaaatttacaagaaaaaaacaaacaaccccatcaaaaagtgggtgaaggacatgaacagacacttctcaaaagaagatatttatgcagccaaaaaacacatgaaaaaatgctcatcatcactggccatcagagaaatgcaaatcaaaaccacaatgagatattatctcacaccagttagaatggcaatcattaaaaagtcaggaaacaacaggcaaacagggtctggagtggacctgaagcaaactccaacagacctgaagctgagggacctaactgttagaagaaaaatgaacaaacagaaagaaatagcatcaacatcaacaaaaaggacatctacaccaaaccccacctgtaggtctgtaggaccaaaggactgcagttccttgggggcaatggaacaaagctggacagagaatgactttgacaagctgacagagaagaaggctttagaagaaaatcaagaagaaatggataaatttctggacacatacaccctcccaagattaaaccaggaagaagttgaatctctgaatagaccaataacaggttctgaaattgaggcaataattgatagcataccaaccaaaaaatatccaggaccagatggattcacagccaaattctatgagagaattaaagtcttctgcactgagagcttagcaaaatggataaaatggacccataccaagacattcatcatggaatttcacactattggaaatgcaaagattctgcaggcttcttcgtttacggaagtaaaaacaaaaacaaaaacacttgaacataaaagattggaaagcataatggctttgacttctcaatag

SEQ ID NO: 151553 - DNA, 3441 bp, Homo sapiens; identical to SEQ ID NO: 118068

SEQ ID NO: 151554 - DNA, 2787 bp, Homo sapiens; identical to SEQ ID NO: 117917

SEQ ID NO: 151555 - DNA, 3003 bp, Homo sapiens
atggggaaaaaacagagcagaaaaaccggaaactctaaaaagcagagcgcctctcctcctccaaaggaatgcagctcctcaccagcaacggaacaaagctggacggagaatgactttgacgagttgagagaagaagacttcagacgatcaaactactccgagctacaggaggaaattcaaaccaaaggcaaagaagttgaaaactttgaaaaaaattcagacgaatgtataactggaataaccaatacagagaagtgcttaaaggagctgacggagctgaaagccaaggctcgagaactacatgaagaacgcagaagcctcaagagccgatgcgatcaactggaagaaagggtatcagtgatggaagacaaaatgaatgaaatgaagcgagaagggaagtttagagaaaaaagaataaaaagaaacaaacaaagcctccaagaaatatgggactatgtgaaaagaccaaatctacgtctgattagtgtacctgaaagtgacagggagaatggaaccaagttggaaaacactctgcaggatattatccaggagaacttccccaatctagcaaggcaggccaacattcagattcaggaaatacagagaacgccacaaagatactcctcgagaagagcaactccaaggcacataattgtcagattcagcaaagttgaaatgaaggaaaaaatgttaagggcagccagagagaaagaaatacaaactaacatcagagaatactacaaacaccgctacgcaaataaactagaaaatctagaagaaatggataaattcctcaacatatacacccttcgaagactaaaccaggaagaagttgaatctctgaacagaccaataagaggctctgaaattgtggcaataatcaatagtttaccaaccaaaaagagtccaggaccagatggattcacagccgaatactaccagaggtataaggaggaactggtaccattccttctgaaactattccaatcaatagaaaaagagggaatcctccctaactcattttatgaggccagcatcatcctgataccaaagccgggcagagacacaaccaaaaaagagaattttagaacaatatccttgatgaacattgatgcaaaaatcctcaataaaatactggcaaaccgaatccagcagcacatcaaaaagcttatccaccatgatcaagtgggcttcatccctgggatgcaaggctggttcaatatacgcaaatcaataaatgtaatccagcatataaacagaaccaaagacaaaaaccacgtgattatctcaatagatgcagaaaaggcctttgacaaaattcaacaactcttcttgctaaaaactctcaataaattaggtattgatgggacatatctcaaaataaaaagagctatctatgacaaacccacagccaatatcatactgaatgggcaaaaactggaagcattccctttgaaaactggcacaagacagggatgccctctctcaccactcctattcaacatagtgttggaagttctggccagggcaattaggcaggagaaggaaataaagggtattcaattaggaaaagaggaagtcaaattgtccctgtttgcagatgacatgattgtatatctagaaaaccccattgtctcagcccaaaatctccttaagctgataagcaacttcagcaaagtctcaggatacaaaatcaatgtacaaaaatcacaagcattcttatacaccaataacagacaaacagaaacccaaatcatgagtgaactcccattcacaattgcttcaaagagaataaaatacctaggaatccaacttacaagggacgtgaaggacctcttcaaggagaactacaaaccactgctcaaggaaataaaagaggatacaaagaaatggaagaatattccatgctcatgggtaggaagaatcaatatcatgaaaatggccatactgcacaaggtaatttatagattcaatgccatccccatcaagctaccaatgactttcttcacagaattggaaaaaactactttaaagttcacatggaaccaaaaaagagcccgcattgccaagtcaatcctaagccaaaagaacaaagctggaggcatcatgctacctgacttcaaactatactacaaggctacagtaaccaaaacagcatggtactggtaccaaaacagagatatagatcaatggaacagaacagagccctcagaaataacgccgcatatctacaactatctgatctttgacaaacctgagaaaaacaagcaatggggaaaggattccctattcaataaatggtgctgggaaaactggctagccatatggagaaagctgaaactggatcccttctttacaccttatacaaaaattaattcaagatggattaaagacttaaacgttagacctaaaaccataaaaaccctagaagaaaacctaggcattaccattcaggacataggtatgggcaaggacttcatgtctaaaacaccaaaagcaatagcaacaaaagccaaaattgacaaattggatctaattaaactaaagagcttctgcacagcaaaagaaactaccatcagagtgaacaggcaacctacagaatgggagaaaattttcgcaacctactcatctgacaaagggctaatatccagaatctacaatgaactcaaacaaattgacaagaaaaaaacaaacaaccccatcaaaaagtgggcaaaggacatgaacagacacttctcaaaagaagacatttatgcagccaaaaaacacatgaaaaaatgctcaccatcactggctatcagagaaatgcaaatcaaaaacacaatgagataccatctcacaccacttagaatggcaatcattaaaaagtcaggaaacaacaggtgggaactgaacaatgagaacacacggacacaggaaggggaacatcacactctggggactgttgtggggtggggggaggggggagggatagccgtgggagatatacctaatgctaaatga

SEQ ID NO: 151556 - DNA, 3048 bp, Homo sapiens
atggagtactatgcagccataaaaaaggatgagttcctgtcctttgcagagacatggatgaagctggaaaccatcattctcagcaaactatcacaaggacagaaaaccaaacaccgcatgttctcactcatagtgttggaagttctggccagggcaattaggcaggagaaggaaataaagggtattcaattaggaaaacaagaagtcaaattgtccctgtttgcagatgacatgattgtatatcgagaaaaccccattgtctctgcccaaaatctccttaagttgataagcaacttcagcaaactctcaggatacaaaatcaatgtgcaaaaatcacaagcattcttatacaccaataacagacaaacagagagccaaatcatgagtgaactcccattcacaattgcttcaaagataataaaatacctaggaatccaacttacaagggaagtgaaggacctcttcagggagaactacaaaccactgctcaatgaaataaaagaggatacaaacaaatggaagaacattccatgctcatgggtaggaagaatcaatatcatgaaaatggccatactgcccaaggtaatttatagattcagtgccatccccatcaagctaccaatgactttcttcacagaattggaaaaaactactttaaagttcatatggaaccaaaaaagagcccgcatcgccaagtcaatcctaagccaaaagaacaaagctggaggcatcatgctacctgacttcaaactatactacaaggctacagtaaccaaaacagcatggtactggtaccaaaacagaaatatagatcaatggaacataacagagccctcagaaataataccgcatatctacaactatctgatctttgacaaacctgagaaaaacaagcaatggggaaaggattccctatttaataaatggtgctgggaaaactggctagccatacgtagaaagctgaaactggatcccttccttataccttatacaaaaatcaattcaagatggattaaagacttaaacggtagacctaaaaccataaaaactgtagaagaaaacctaggcattaccattcaggacataggcacgggcaaggacttcatgtataaaacaccaaaagcaatggcaacaaaagccaaaattgacaaatgggatctaattaaactaaagagcttctacacagcaaaagaaactaccatcagagcgaacaggcaacctacaaaatgggagaaaattttcgcaacctactcatctgacaaagggctaatatccagaatctacaatcaactcaaacaaatttacaagaaaaaaacaaacaaccccatcaaaaagtgggcgaaggacatgaacagacacttctcaaaagaagacatttatgcagccaaaaaacacatgaaaaaatgctcactatcactggccatcagagaaatgcaaatcaaaaccacaatgcgatatcatctcacaccagttagaatggcaatcattaaaaagtcaggaaacaacaggtgctggagaggatgtggagaaatagtaacacttttacactgttggtgggactgtaaactagttcaaccattgtggaagtcagtgtggcgattcctcagggatctagaactagaaataccatttgacccagccatcccattcctgggtatatacccaaaggactataaatcatgctgctataaagacacatgcacactgttggaagttctggccagggcaattaggcaggagaaggaaataaagggtattcaattaggaaaacaagaagtcaaattgtccctgtttgcagatgacatgattgtatatcgagaaaaccccattgtctctgcccaaaatctccttaagttgataagcaacttcagcaaactctcaggatacaaaatcaatgtgcaaaaatcacaagcattcttatacaccaataacagacaaacagagagccaaatcatgagtgaactcccattcacaattgcttcaaagataataaaatacctaggaatccaacttacacgggatgtgaaggacctcttcaaggagaactacaaaccactgctcaatgaaataaaagaggatacaaacaaatggaagaacattccatgctcatgggtaggaagaatcaatatcatgaaaatggccatactgcccaaggtaatttgtagattcagtgccatccgcatcaagctaccaatgactttcttcaaaaaattggaagaaactactttaaagttcatatggaaccaaaaaagagcccacatcgccaagtcaatcctaagccaaaagaacaaagctggaggcatcatgctacctgacttcaaactatactacaaggctacagtaaccaaaacagcatggtactggtaccaaaacagaaatatagatcaatggaacataacagagccctcagaaataatgccgcatatctacaaccatctgatctttgacaaacctgacaaaaataagcaatggggaaaggattccctatttaataaatggtgctgggaaaactggctagccatatgtagaaagctgaaactgcatcccttccttacaccttatacaaaaattaattcaagatggattaaagagttaaatgttagacctaaaaccataaaaagcctagaagaaaacctaggcaataccattcaggacataggcatgggcaaggacttcatgtctaaaacaccaaaagcaatggcaacaaaagccaaaattgacaaatgggatctaattaaactaaagagcttctgcacagcaaaagaaactaccatcagagtgaacaggcaacctacaaaatgggagaaacttttcacaacctactcatctgacaaagggctaatatccagaatctacaatcaactcaaacaaatttacaagaaaaaaaacaaacaaccccatcaaaaagtgggcgaaggtcatgaacagacacttctcaaaagaagacatttatgcagccaaaaaacacatgaaaaaatgctcatcatcactggccatcagagaaatgcaaatcaaaaccacaatgagataccatctcatgccagttag

SEQ ID NO: 151557 - DNA, 2739 bp, Homo sapiens
atgattatctcaatagatgcagaaaaggcctttggcaaagttcaacaacccttcatgctacaaactctcaataaattaggtattgatgggtcatatctcaaaataataagagctgtctatgacaaacccacagccaatatcacactgaatgggcaaaaactggaagcattccctttgaaaactggcacaagacggggatgccctctctcaccactcctattcaacatagtgttggaagttctggccagggcaattaggcaggagaaggaaataaagggtattcaattaggaaaagaggaagtcaaattgtccctgtttgcagatgacatgattgtatatctagaaaaccccattgtctcagcccaaaatctccttaagctgataagcaacttcagcaaagtctcaggatacaaaatcaatgtacaaaaatcacaagcattcttatacaccaataacagacaaacagagagccaaatcatgagtgaactcccattcacaattgcttcaaagagaataaaatacctaggaatccatcttacaagggacatgaaagacctcttcaaggagaactacaaaccactgctcaatgaaataaaagaggatacaaacaaatggaagaacattccatgctcatgggtaggaagaatcaatatcgtgaaaatggccatactgcccaagattcaatgccatccccatcaagctaccaatgactttcttcacagaattggaaaaaactactttaaatttcatatggaaccaaaaagagcccgcatcgccaagtcaatcctaagccaaaagaacaaagccggaggcatcacactacctgccttcaaactatactacaaggctacagtaacaaaaacagcatggtactggtaccaaaacagagatatagatcaagggaacagaacagagccctcagaaataacgctgcgtatctacaactatctgatctttgacaaacctgagaaaaataagcaatggggaaaggattccctatttaataaatggtgctgggaaaactggctagccatatgtagaaagctgaaactggatcccttcctcacaccttatacaacaattaattcaagatggattaaagacttaaacgttagacctaaaaccataaaaaccctagaagaaaagctaggcattaccattcaggacatagtcatgggcaaggacttcatgtctaaaacaccaaaagcaatggcaacaaaagccaaaattgacaaatgggatctaattaaactaaagagcttctgcacagcaaaagaaactaccatcagagtgaacaggcaacctacaaaatgggagaaaatttttgaaacctactcatctgacaaagggctaatatccagaatctacaatgaactcaaacaaatttacaagaaaaagacaaacaaccctatcaaaaagtgggcgaaggccatgaacagacacttctcaaaagaagacatttatacagccaaaagacacatgaaaaaatgctcaccatcactggctatcggagaaatgcaaatcaaaaccacaatgagataccatctcacaccagttagaatggcaatcattaaaaagtcaggaaacaacagatctgcaatgatccaaatgtttgtgttcccccaagactcctatgttgaaatcctaaccatcaatgtcgtggtagtaggagttctgccttcccagcttcagaggacactgaaagactcctccaaagaggccttagaaacaccaagtccaccttcattccccagctctccattctgcttccctagaaagctgcacacagacttctccttcggccccaaagccaaagcttttatgcataagagactaaaccaggaagaagttgaatctctgaatagaccaataacaggatctgaaattgtggtaataatcaatagcttaccaaccaaaaagagtccaggaccagatggattcacagccgaattctaccagaggtacaaggaggaactgagaataaaatacctaggaatccaacttacaagggatgtgaaggacctcttcaaggagaactacaaaccactgctcaatgaaataaaagaggatacaaacaaatggaagaacattccatgctcatgggtaggaagaatcaatatcgtgaaaatggccatactgcccaagaattggaaaaaaactactttaaagttcatacggaaccaaaaaagagcccgcaccaccaagtcaatcctaagccaaaagaacaaagctggaggcatcacactacctgacttcaaactatactacaaggctacagtgaccaaaacagcatggtacttgtaccaatacagagatatagatcaatgggacagaacagagccctcagaaataacgccgcatatctacaactatctgatctttgacaaacctgagaaaaacaagcaatggggaaaggattccctatttaataaatggtgctgggaaaactggctagccatatgtagaaagctgaaactggatcccttccttacaccttatacaaaaatcaattcaagatggattaaagacttaaacattagacctaaaaccataaaaaccctagaagaaaatctaggcattaccattcaggacataggcacgggcaaggacttcatgtctaaaacaccaaaagcaatggcaacaaaagccaaaattgacaaatgggatctaattaaactaaagagcttctgcacagcaaaagaaactaccatcagagtgaacgggcaacccacaaaatag

SEQ ID NO: 151558 - DNA, 2958 bp, Homo sapiens
atggggaaaaaacagaacagaaaaactggaaactctaaaacgcagagcgcctctcctcctccaaaggaacgcagttcctcaccagcaacggaacaaagctggatggagaatgattttgacgagctgagagaagaaggcttcagacgatcaaattactctgagctacgggaggacattcaaaccaaaggcaaagaagttgaaaactttgaaaaaaatttagaagaatgtataactagaataatcaatacagagaagtgcttaaaggagctgatggagctgaaaaccaaggctcgagaactacgtgaagaatgcagaagcctcaggagccgatgcgatcaactggaagaaagggtatcagcaatggaagatgaaatgaatgaaatgaaaccaaatctacgtctaattggtgtacctgaaagtgatgcggagaatggaaccaagttggaaaacactctgcaggatattatccaggagaacttccccaatctagcaaggcaggccaacgttcagattcaggaaatacagagaacgccacaaagatactcctcgagaagagcaactccaagacacataattgtcagattcaccaaagttgaaatgaaggaaaaaatgttaagggcagccagagagaaagactttaaaccaacaaagatcaaaagagacaaagaaggccattacataatggtaaagggatcaattcaacaagaggagctaactatcctaaatatttatgcacccaatacaggagcacccagattcataaagcaagtcctgagtgacctacaaagagacttagactcccacacattaataatgggagactttaacaccccactgtcaacattagacagatcaacgagacagaaagtcaacaaggatacccaggaattgaactcagctctgcaccaagcagacctaatagacatctacagaactctccaccccaaatcaacagaatatacatttttttcagcaccacaccacacctattccaaaattgaacacatagttggaagtaaagctctcctcagcaaatgtaaaagaaaagaaattataacaaactatctctcagaccacagtgcaatcaaactagaactcaggattaagaatctcactcaaagccactcaactacatggaaactgaacaacctgctcctgaatgactactgggtacataacgaaatgaaggcagaaataaagatgttctttgaaaccaacgagaacaaagacaccacataccagaatctctgggatgcattcaaagcagtgtgtagagggaaatttatagcactaaacgcctacaagagaaagcaggaaagatccaaaattgacaccctaacatcacaattaaaagaactagaaaagcaagagcaaacacattcaaaagctggcagaaggcaagaaataactaaaatcagagcagaactgaaggaaatagagacacaaaaaacccttcaaaaaatcaatgaatccaggagctggttttttgaaaggatcaacaaaattgatagaccgctagcaagactaataaagaaaaaaagagagaagaatcaaatagacacaataaaaaatgataaaggggatatcaccaccgatcccacagaaatacaaactaccatcagagaatactacaaacacctctacgcaaataaactacaaaatctagaagaaatggatacattcctcgacacatacactctcccaagactaaaccaggaagaagttgaatctgtgaataaaccaataacaggctctgaaattgtggcaataatcaatagtttaccaaccaaaaagagtccaggaccagatggattcacagccgaattctaccagaggtacaaggaggaactggtaccattccttctgaaactattccaatcaatagaaaaagagggaatcctccctaactcattttatgaggccagcatcattctgataccaaagccgggcagagacacaaccaaaaaagagaattttagaccaatatccttgatgaacattgatgcaaaaatcctcaataaaatactggcaaaccgaatccagcagcacatcaaaaagcttatccaccatgatcaagtgggcttcatccctgggatgcaaggctggttcaatatacgcaaatcaataaatgtaatccagcatataaacagagccaaagacaaaaaccacatgattatctcaatagatgcagaaaaagcctttgacaaaattcaacaacccttcatgctaaaaactctcaataaattaggtattgatgggacgtatttcagaataataagagctatctatgacaaacccacagccaatatcatactgaatgggcaaaaactggaagcattccctttgaaaactggcacaagacagggatgccctctctcaccgctcctattcaacatagtgttggaagttctggccagggcagtcaggcaggagaaggaaataaagggtattcaattaggaaaagaggaagtcaaattgtccctgtttgcagacgacatgattgtttatctagaaaaccccattgtctcagcccaaaatctcctcaagctgataagcaacttcagcaaagtctcaggatacaaaatcaatgtacaaaaatcacaagcattcttatacaccaacaacagacaaacagagagccaaatcatgagtgaactcccattcacaattgcttcaaagagaataaaatacctaggaatccaacttacaagggatgtgaaggacctcttcaaggagaactacaaaccactgctcaaggaaataaaagaggacacaaacaaatggaagaacattccatgctcatgggtaggaagaatcaatatcgtgaaaatggccatactgcccaagcatgggtgggggtgtcttgttgctcctcacgtggtccctactgtcctcaccatacaactgaggtcgcctcgttacccctgcactgtggtgaacgtcctggctggagtctag

SEQ ID NO: 151559 - DNA, 3105 bp, Homo sapiens
atggggaaaaaacagaacagaaaaactggaaactctaaagagcagagcacctctcctcctccaaaggaatgcagttcctcaccagcaagggaacaaagctggacggagaatgactttgatgagctgagagaagaaggcttcagacgatcaaattactctgagctatgggaggacattcaaaccaaaggcaaagaagttgaaaactttgaaaaaaatttagaagaatgtataactagaataaccaatacaaagaagtgcttaaaggagctgatggagctgaaaaccaaggctcgagaactacgtgaagaatgcagaaacctcaggagccgatgcgatcaactggaagaaagacagatcaacgagacagaaagtcaacaaggatacccaggaattgaactcagctctgcaccaagcggacctaacacacatctacagaactctccaccccaaatcaacagaatatacattttttcagcaccacaccacacctattccaaaactgaccacatacttggaagtaaagctctcctcagcaaatgtaaaagaacagaaattataacaaactatctctcagaccacagtgcaatcaaactagaactcaggattaagaatctcactcaaagccgctcaactacatggaaactgaacaacctgctcctgaatgactactgggtacataacgaaatgaaggcagaaataaagatgttctttgaaaccaacgagaacaaagacacaacataccagaatctctgggacgcattcaaagcagtgtgtagagggaaatttatagcactaaatgcccacaagagaaagcaggaaagatccaaaattgataccctaacatcacaattaaaagaactagaaaagcaagagcaaacacattcaaaagctagcagaaggcaagaaataactaaaatcagagcagaactgaaggcaatggagacacaaaaaacccttcaaaaaatcaatgaatccaggagctggttttttgaaaggatcaacaaaatagatagactgctagcaagactaataaagaaaaaaagagagaagaatcaaatagacacaataaaaaatgataaaggggatatcaccaccgatcccacagaaatacaaactaccatcagagaatactacaaacacctctacgcaaataaactagaaaatctagaagaaatggataaattcctcgacacatacactctcccaagactaaaccaggaagaagttgaatctctgaatagaccaataacaggatctgaaattgtggcaataatcaatagcttaccaaccaaaaagagtccaggaccagatggattcacagccgaattctaccagaggtacaaggaggaactggtaccattccttctgaaactattccaatcaataggaaaagagggaatcctccctaactcattttatgaggccagcatcattctgataccaaagcctggcagagacacaaccaaaaaagagagttttagaccaatatccttgatgaacattgatgcaaaaatcctcaataaaatactggcaaaacgaatccagcagcacatcaaaaagcttatccaccatgatcaagtgggcttcatccctgggatgcaaggctggttcattatatgcaaatcaataaatgtaatccagcatataaacagagccaaagacaaaaaccacatgattatctcaatagatgcagaaaaggcctttgacaaaattcaacaacccttcatgctaaaaactctcaataaattaggtattgatgggacatatttaaaaataataagagctatctatgacaaacccacagccaatatcatactgaatggacaaaaactggaagcattccctttgaaaactggcacaagacagggatgccctctctcaccactcctattcaacatagtgttggaagttctggccagggcaatcaggcaggagaatgaaataaagggtattcaattaggaaaacaggaagtcaaattgtccctgtttgcagacgacatgattgtatatctagaaaaccccattgtctcagcccaaaatctccttaagctgataagcaacttcagcaaagtctcaggatacaaaatcaatgtacaaaaatcacaagcattcttatacaccaacaacagacaaacagagagccaaatcatgagtgaactcccattcacaattgcttcaaagagaataaaatacctaggaatccaacttacaagggatgtgaaggacctcttcaaggagaactacaaatcactgctcaaggaaataaaagaggatacaaacaaatggaagaacattccatgctcatgggtaggaagaatcaatatcgtgaaaatggccatactgcccaaggtaatttatagattcaatgccatccccatcaagctaccaatgcctttcttcacagaattggaaaaaactattttaaagttcatatggaaccaaaaaagagcccgcattgccaagtcaatcctaagccaaaagaacaaagctggaggcatcacactacctgacttcaaactatactacaaggctacagtaaccaaaacagcatggtactggtaccaaaacagagatatagatcaatggaacagaacagagccctctgaaataacgccgcatatctacaactatctgatctttgagaaacctgacaaaaacaagaaatggggaaaggattcgtatttaataaatggtcctcagagtaccatgtcagctcagccgtggatgcatggctactcagctcagccaaggcatcggttttctagaaggcaatgtactgctttagctcaggccgatggacaaatgcaacagttactgctgatttccacagactccattactgcaggctatgggagagcaccacctaatgcctgcgaggtgtggataaaagtctggattccccacttgacctctgctgatattcatggggaagatactcctcattatttatgccccggaccagactcactggcatccaaaatcaagaagagttacctgtggggtaatgaggaagaaaggcccccggacatggagaatggagggagccagatacaccgcattccagcaacaggcaaagggatccaggctcccctggaaggagcctga

SEQ ID NO: 151560 - DNA, 2826 bp, Homo sapiens
atggaatactatgcagccataaaaaatgatgagttcatgtcctttgcagggacatggatgaagctgggaaccatcattctcagcaaactaccacaaggacaaaaaaccaaacaccacatgttctcactcacagcaccacaccacacctattccaaaattgaccacataattggaagtaaagctctcctcagcaaatgtaaaagaacagaaattataacaaactatctctcagaccacagtgcaatcaaactagaactcaggattaagaaactcactcaaaaccgctcaactacatggaaactgaccaacctgctcctgaatgactactgggtacataacgaaatgaaggcagaaataaagatgttctttgaaacctacgagaacaaagacacaacataccagaatctctgggacgcattcaaagcagtgtgtagagggaaatttatagcactaaatgcccacaagagaaagcagaaaagatccaaaattgacatcctaacatcacaattaaaagaactagaaaagcaagagcaaacacattcaaaagctaacagaaggcaagaaataaccaaaatcagagcagaactgaaggaaatagagacacaaaaaacccttcaaaaaatcaatgaatccaggagctggttttttgaaaggatcaacaaaattgatagaccgctagcaagactaataaagaaaaaaagagagaagaatcaaatagacgcaataaaaaatgataaaggggatatcaccaccgatcccacagatataaaaactaccatcagagaatactacaaacgcctctacacaaataaactagaaaatctagaagaaatgcataaattcctcgacacacacactctcccaagactaaaccaggaagaagttgaatctctgaatagaccaataacaggagctgaaattgtggcaataatcaatagcttaccaaccaaaaagagtccaggactagatggattcacagccaaattctaccagaggtacaaggaggaactgcatcatcctgataccaaagccgggcagagacacaaccaaaaagagaattttagaccaatacccttgatgaacattgatgcaaaaatcctcaataaaatactggcaaaccgaatccagcagcacatcgaaaagcttatccaccatgatcaagtgggcttcatccctgggatgcaaggctggttcaatatacgcaaatcaataaatgtaatccagcatataaacagaaccaaagacaaaaaccacatgattatctcaatagatgcagaaaaggcctttgacaaaattcaacaacccttcatgctaaaaactctcaataaattaggtattgatgggacgtatctcaaaataataagagctatctacgacaaacccacagccaatatcatactgaatgggcaaaaactggaagcattccctttgaaaactggcacaagacagggatgccctctctcaccactcctattcaacatagtgttggaagttctggccagggcaattaggaaggagaaggaaataaagggtattcaattaggaaaggaggaagtcaaattgtccctgtttgcagatgacatgattgtatatctagaaaaccccatcgtctcagcccaaaatctccttaagctgataagcaacttcagcaaagtctcaggatacaaaatcaatgtacaaaaatcacaagcattcttatacaccaacaacagacaaacagagagccaaatcatgagtgaactcccattcacaattgcttcaaagagaataaaatacctaggaatccaacttacaagggatgtgaaggacctcttcaaggagaactacaaaccactgctcaaggaaataaaagaggatacaaacaaatggaagaacattccatgctcatgggtaggaagaatcaatatcgtgaaaatggccatactgcccaaggtaatttacagattcaatgccatccccatcaagctaccaatgactttcttcacagaattggaaaaaactactttaaagttcatatggaaccaaaaaagagcccgcatcgccaagtcaatcctgagccaaaagaacaaagctggaggcatcacactacctgacttcaaactatactacaaggctacagtaaccaaaacagcgtggtactggtaccaaaacagagatatagatcaatggaacagaacagagccctcagaaataatgccgcatatctacaactatctgatctttgacaaacctgacaaaaacaagcaatggggaaaggattccctagttaataaatggtgctgggaaaactggctagccatatgtagaaagctgaaactggatcccttccttacaccttatacaaaaatcaattcaagatggattaaagacttaaacgttagacctaaaaccataaaaaccctagaagaaaacctaggcaataccattcaggacataggcatgggcaaggacttcatgtctaaaacaccaaaagcaatggcaacaaaagacaaaattggcaaatgggatctaattaaactaaagagcttctgcacagcaaaagaaactaccatcagagtgaacaggcaacctacagaatgggagaaaatttttgcaacctactcatctgacaaagggctaatatccaggatctacaatgaactcaaacaaatttacaagaaaaaaacaaacaaccccatcaaaaagtgggcaaaggacatgaacagacacttctcaaaagaaggcatttatgcagccaaaaaacacatgaaaaaaatgctcaccatcactggccatcagagaaatgcaaatcaaaaccacaatgagataccatttcacaccagttag

SEQ ID NO: 151561 - DNA, 2973 bp, Homo sapiens
atggaagatgaaatgaatgaaatgaagcgagaagggaagtttagagaaaaaagaataaaaagaaacgaacaaagcctccaagaaatatgggaccatgtgaaaagaccaaatctacatctgattggtgtacctgaaagtgacagggagaatggaaccaagttggaaaacactctgcaggatattatccagcagaacttccccaatctagcaaggcaggccaacattcaaattcaggaaatacagagaacgccacaaagatactcctcaagaagagcaactccaagacacagaattgtcagattcaccaaagttgaaatgaaggaaaaaatcttaagggcagccagagagaaagactttaaaccaacaaagatcagaagagacaaagaaggccattacataatggtaaagggatcaattcaacaagaagagctaactatcctaaatatatatgaacccaatacaggagcacccagattcataaagcaagtccttagtgacctacaaagagacttagactcccacacattaataatgggagactttaacaccccactgtcaacactggaaagatcaacgagacagaaagttaacaaggatacccaggaattgaactcagctctgcaccaagcggacctaatagacatctacagaactctccaccccaaatcaacagaatatacattcttttcagcaccacaccacacctactccaaaattgaccacatagttggaagtaaagcactcctcagcaaacgtaaaagaacagaaattataacaaactgtctctcagaccacagtgcaatcaaactagaactcaggattaagaaactcactcaaaaccgctcaactacatggaaactgaacaacctgctccggaatgactactgggtacataacgaaatgaaggcagaaattaagatgttctttgaaaccaaccagaacaaagacacaacataccagaatctctgggacacattcaaagcagtgtgtagagggaaatttacaccactaaatgcccacaagagaaagcaggaaaggtctaaaattgacaccctaacatcacaattaaaagaactagaaaagcaagagcaaacacattcaaaagctagcagaaggcaagaaataattaaaatcagagcagaactgaaggaaacagagacacaaaaaacccttcaaaaaattaatgaatccaggagctggttttttgaaaggattagaaaaattgatagaccgctagcaagactaataaagaagaaaagagagaagaatcaagtagacgaagaagttgactctctgaataggccaataacaggctctgaaattgtggcaataatcaatagcttaccaaccaaaaaaagtccaggaccagatggattcacagccgaattctaccagaggtacaaagaggagctggtaccattccttctgaaactattccaatcaatagaaaaagagggaatcctccctaactcattttatgaggctagcatcatcctgataccaaagcctggcagagacacaaccaaaaaagagaattttagaccaatatccttgatgaacatcgatgcaaaaatcctcaataaaatactggcaaaccgaatccagcagcacatcaaaaagcttatccaccatggtcaagtgggcttcatccctggaatgcaaggctggttcaatatatgcaaatcaataaatgtaatccagcatataaacagaaccaaagacaaaaaccacatgattatctcaatagatgcagaaaaggcctttgataaaattcagcaacgcttcatgctaaaaactttcaataaattagtgttggatgttctggccagggcaatcaggcaggagaaggaaataaagggcattgaattaggaaaagaggaagtcaaattgtccctgtttgcagatgacatgattgtatatctagaaaaccccattgtctcagcccaaaatctccttaagctgataagcaacttcaacaaagtctcaggatacaaaatcaatgtacaaaaatcacaagcattcttacacaccaataacagacaaacagagagccaaatcacgagtgaactcccattcacaattgcttcaaagagaagaaaatacctaggaatccaacttacaagggacatgaaggacctcttcaaggacaactacaaaccactgctcaatgaaataaaagaggatacaaacaaatggaagaacattccatgctcatgggtaggaagaatcaatatcatgaaaatggccatactgcccaaggctacagtaaccgaaacagcatggtactggtaccaaaacagagatatcgatcaatggaacagaacagagccctcagaaataatgccgcgtatctaccactatctgatctttgagaaacctgacaaaaacaagcaatggggaaaggattccctatttaataaatggtgctgggaaaactggcttgccatatgtagaaagctgaaactggatcccttcctcacaccttatacaaaaattaattcaagatggattaaagacttaaatgttagacctaaaaccataaaaaccctagaagaaaacctaggcaataccattcaggacataggcatgggcaaggacttcatgtctaaaacaccaaaagcaatggcaacaaaagccaaaattgacaaatgggatctaattcaactaaagagcttctgcacagcaaaagaaactaccatcagagtgaacaggcaacctatagaatgggagaaaatttttgcaaactactcatctgacaaagggctaatatccagaatctacaatgaactcaaacaagtttacaagaaaaaaacaaacaaccccatcaaaaagtgggcaaaggacatgaacagacatttctcaaaagaagacatttatgcagacaaacaggcatatgaaaaaatgctcaagatcactggccatcagagaaatgcaaatccaaaccacaatgagataccatctcacaccagttag

SEQ ID NO: 151562 - DNA, 2859 bp, Homo sapiens
atggtaaagggatcaattcaacaagaagagctaactatcctaaatatatatgcacctgcaggagcacccagattcataaagcaagtcctgagtgacctacaaagagacttagacttccacacattaataatgggagactttaacaccccactgtcaacattagacagatcaacgagacagaaagtcaacaaggatacccaggaattgaactcagctctgcaccaagcagacctaatagacatctacagaactctccactccaaatcaacagaatatacatttttttcagcaccacaccacacctattccaaaattgaccatttacttggaagtaaagctttcctcagcaaatgtaaaagaacagaaattataacaaactatctctcagaccacagtgcaatcaaattagaactcaggattaagaatctcactcaaaaccgctcaactacatggaaaccgaacaacctgctcctgaatgactactgggtacataatgaaatgaaggcagaaataaagatgttctttgaaaccaacgagaacaaagacacaacataccagaatctctgggacgcattcaaagcagtgtgtagagggaaatttatagcactaaatgcccacaagagaaagcaggaaagatccaaaattgacaccctaacatcacaagtaaaagaactagaaaagcaagagcaaacacattcaaaagctagcagaagactaaaccaggaagaagttgaatctctgaatagaccaataacaggatctgaaattgtggcaataatcaatagcttaccaacaaaaagagtccaggaccagatggattcacagccaaattctaccagagaaaaagagggaatcctccctaactcattttatgaggccagcatcattctaataccaaagccgggcagagacacaaccaaaaaagagaattttagaccaatatccttgatgaacattgatgcaaaaatcctcaataaaatactggcaaaccaaatccagcagcacatcaaaaagcttatccaccatgatcaagtgggcttcatccctgggatgcaaggctggttcaatatacacaaatcagtaaatgtaatccagcatataaacagagccaaagacaaaaaccacatgattatctcaatagatgcagaaaaggcctttgacaaaattcaacaaccctacatgctaaaaactctcaataaattaggtattgatgggacatatttcaaaataataagagctatctatgacaaacccacagccaatatcatactgaatgggcaaaaactggaagcattccctttgaaaactggcacaagacagggatgctctctctcaccactcctatttaacatagtgttggaagttctggccagggcaattaggcaggagaaggaaataaagggtattcaattaggaaaagaggaagtcaaattgtccctgtttgcagactacatgattgtatatctagaaaaccccattgtctcagcccaaaatctccttaagctgataagcaacttcagcaaagtctcaggatacaaaatcaatgtacaaaaatcacaagcattcttatacaccaacaacagacaaacagagagccaaatcatgagtgaactcccattcacaattgcttcaaagagaataaaacacctaggaatccaacttacaagcgacatgaaggacttcttcaaggagaactgcaaaccactgctcaatgaaataaaagaggatacaaacaaatggaagaacattccatgctcatgggtaggaagaatcaatatcgtgaaaatggccatattgcccaagctacccatgactttcttcacagaattggaaaaaactactttaaagttcatatggaaccaaaaaagagcctgcatcaccaagtcaaacctaagccaaaagaacaaagctggaggcatcacgctacctgacttcaaactatactacaaggctacagtaaccaaaacagcatggtactggtaccaaaacagagatatagatcaatggaacagaacagagccctcagaaataacgccgcatatctacaactatctgatctttgacaaacctgagaaaaacaagcaatggggaaaggattccctatttaataaacggttctgggaaaactggctagccatatttagaaagctgaaactggatcccttccttacaccttatacaaaaattaattcaagatggattaaagacttacatgttagacctaaaaccataaaaaccctagaagaaaacctaggcattaccattcaggacacaggcatgggcaaggacttcacgtctaaaacaccaaaagcaatggcaacaaaagccaaaattgataaatgggatctaattaaactaaagagcttctgcacagcaaaagaaactaccatcagagtgaacaggcaacctagaaaatgggagaaaattttcgcaacctactcatctgacaaatggctaatatccagaatctacaatgaactcaaacaaatttacaagaaaaaaacaaataaccccatcaaaaagtgggcgaaggacatgaacagacacttctcaaaagaagacatttatgcagccaaaaaacacatgaaaaaatgctcaccatcactggccatcagagaaacgcaaatcaaaaccacaatgagataccatctcacaccaggccacccaatcctgaatttgaaacacagtgaattgcatcatgctccgcagtcttcatcatggaagagggagggactggaccttgaagaaagggtagaatttgggcagatcaagaagaatgcagggacacttcagaagaggagaggatgcgagccaaggcatggagacacaaacattggggacatatttgtgagacagtaa

SEQ ID NO: 151563 - DNA, 3786 bp, Homo sapiens; identical to SEQ ID NO: 116416

SEQ ID NO: 151564 - DNA, 3279 bp, Homo sapiens
atgggagactttaacaccccactgtcaacattagacagatcaacgagacagaaagttaacaagcatacccaggaattgaactcagctctgcaccaagcagacttaatagacatctacagaactctccaccccaaatcaacagaatatacattttgttcagcaccacaccacacctattccaaaattgatcacatagttggaagtaaagctctcctcagcaaatgtaaaagatcagaaattataacaaactgtctctcagaccacagtgccatcaaactagaactcaggattaagaaactcactcaaaaccgctcaactacatggaaactgaacaacctgctcctgaatgactactgggtacataacgaaatgaaggcagaaataaagatgttctttgaaaccaaccagaacaaagacacaacataccagaatctctgggacacattcaaagcagtgtgtagatggaaatttatagcactaaatgcccacaagagaaagcaggaaagatctaaaattgacaccctaacatcacaattaaaagaactagaaaagcaagagcaaacacattcaaaagctagcagaaggcaagaaataactaaaattagagcagaactgaaggaaatagagacacaaaaaacccttcaaaaaattaatgaatccaggagctggttttttgaaaggatcaacaaaactgatagaccgctagccagactaataaagaagaaaagacagaataatcaaatatacgcaataaaaaatgacaaacgggatatcaccaccgatcccacagaaatacaaactaccatcagggaatactacagatacctctacacaaataaactagaaaatctagaagagatggataaattcctcgacacatacaccctcccaagactaaaccaggaagaaggtgactctctgaatagaccaataacaggctctgaaattgtggcaataaccaatagcttaccaaccaaaaagagtccaggaccagatggattcacagccgaattctaccagaggtacaaggaggaactggtaccattccttctgaaactattccaatcaatagaaaaagagggaatcctccctaactcattttatgaggccagcatcatcctgataccaaagccgggcagacacacaacagaaaaagagaattttagaccaatatccttgatgaatattgatgcaaaaatcctcaataaaatactggcaaaccgaatccagcagcacatcaaaaagcttatccaccatgatcaagtgggcttcatccctgggatgcaaggctggttcaatatacgcaaatcaagaaatgtaatccagcatataaacagaaccaaagacaaaaaccacatgattatctcaatagatgcagaaaaggcctttgacaaaattcaacaacgcttcatgctaaaatctctcaataaactaggtgttgatgggacctatctcaaaataataagagctatctatgacaaacccacagccaatatcatactgaatgggcaaaaactggaagcattccctttgaaaactggcacaagagagggatgccctctctcaccactcctattcaacatagtgttggaagttctggccagggcaattaggcaggagaaggaaataaagggtattcaattaggaaaagaggaagtcaaattgtccctgtttgcagatgacatgattgtatatctagaaaaccccattgtctcagcccaaaatctccttaagctgataagcaacttcagcaaagtctcaggatacaaaatccatgtacaaaaatcacaagcattcttatacaccaataacagacaaacagagagccaaatcatgagtgaactcccattcacaattgcttcaaagagaataaaataccttggaatccaacctacaaaggacgtgaaggacctcttcaaggagaactacaaaccactgctcaaggaaataaaagaggatacaaacaaatggaagaacattccatgctcatgggtaggaagaatcaatatcgtgaaaatggccatactgcccaaggtaatttatagattcaatgccatccccatcaagctaccaatgactttcttcacacaattggaaaaaactactttaaagttcatatggaaccaaaaaagagcccgcattgccaagtcaatcctaagccaaatgaacaaagctggaggcatcatgctacctgacttcaaactatactacaaggctacagtaaccaaaacagcatggtactggtaccaaaacagagatattgaccaatggaacagaatagagccctcagaaataatgccacatatctacaactatctgatctttgacaaacctgagaaaaacaagcaatggggaaaggattccctatttaataaatggtgctgggaaaactggctagccatatggagaaagctgaaactggatcccttccttacaccttatacaaaaactaattcaagatggattaaagacttaaacgttagacctaaaaccataaaaaccctagaagaaaacctaggcattaccattcaggacataggcatgggcaaggacttcatgtctaaaacaccaaaagcaatagcaacaaaagccaaaattgacaaatgggatctaattaaactaaggagcttctgcacagcaaaagaaactaccatcagagtgaacaggcaacctacaaaatgggagaaaattttcacaacctactcatctgacaaagggctaatatccagaatctacaaagaactcaaacaaatttacaagaaaaaaacaaacagccccatcaaaaagtgggcgaaggacatgaacagacacttctcaaaagaagacatttatgcagccaaaagacacatgaaaaaatgctcaccatcactggctatcagagaaatgcaaatcaaaaccacaatgagataccatctcacaccagttagaatggcaatcactaaaaagtcaggaaacaaccggtgttggagaggatgtggagaaataggaacacttttacactgttggaatccaacttacaagggatgtgaaggacctcttcaaggagaacgacaaaccactgctcaaggaaataaaagaggatacaaacaaatggaagaacattccatgctcatgggtaggaagaatcaatatcgtgaaaatggccatactgcccaagaaagggtgcagcagctcatggtgctgaaccaggcaaacagttgctttgaatgcctggagatttgccttggtgtggagcggaaggggccctgcggcacctcaatttatgtccgtgaagggtga

SEQ ID NO: 151565 - DNA, 3045 bp, Homo sapiens; identical to SEQ ID NO: 120951

SEQ ID NO: 151566 - DNA, 3666 bp, Homo sapiens; identical to SEQ ID NO: 116259

SEQ ID NO: 151567 - DNA, 3147 bp, Homo sapiens; identical to SEQ ID NO: 124344

SEQ ID NO: 151568 - DNA, 3442 bp, Homo sapiens
atggtaaagggatcaattcaacaagaagagctaactatcctaaatatctatgcacccaatacaggagcacccagattcataaagcaagtcctgagtgacctacaaagagacttagactcccacacattaataatgggagactttaacaacccactgtcaacattagacagatcaatgagacagaaagtcaacaaggatacccaggaattgaactcagctctgcaccaagtggacctaatagacatctacagaactctccaccacaaatcaacagaatatagatttttttcagcaccacaccacacctattccaaaattgaccacatacttggaagtaaagctctcctcagcaaatgtaaaaggacagagattataacaaactatctctcaggccacagtgcaatcaaactagaactcaagattaagaatctcactcaaaaccgctcaactacatggaaactgaacaacctgctcctgaatgactactggatacataacgaaatgaaggcagaaataaagatgttctttgaaaccaatgagaacaaagacacaacataccagaatctctgggatgcattcaaagcagtgtgtagagggaaatttatagcactaaatgcccacaagagaaagcaggaaagatccaaaattgacaccctaacatcacaattaaaagaactagaaaagcaagagcaaacacattcaaaagctagcagaaggatcaacaaaattgatagaccgctagcaagactaataaagaaaaaaagagagaagaatcaaatagatgcaataaaaaatgataaaggggatatcaccaacgatcccacagaaatacaaactaccatcagagaatactacaaacacctctatgcaaataaactagaaaatctagaagaaatggataaattccttgacacatacaccctcccaagactaaaccaggaagaagttgaatctctgaatagaccaataacaggatctgaaattgtggcaataatcaatagcttaccaacaaaaagagtccaggaccagatggattcacagccaaattctaccagaggtacaaggaggaactgaaaaagagggaatcctccctaactcattttatgaggccagcatcattctgataccaaagccgggcagagacacaaccaaaaaagagaattttagaccaatatccttgatgaacattgatgcaaaaatcctcaataaaatactggcaaaacgaatccagcagcacatcaaaaagcttatccaccatgatcaagtgggcttcatccctgggatgcaaggctggttcaatatacacaaatcaataaatgtaatccagcatataaacagagccaaagacaaaaaccacataattatctcaatagatgcagaaaaagcctttgacaaaattcaacaacccttcatgctaaaaactctcaataaattaggtattgatgggacatatttcaaaataataagagctatctatgacaaacccacagccaatatcatactgaatgggcaaaaactggaagcattccctttgaaaactggcacaagacagggatgccctctctcaccactcctattcaacatagtgttggaagttctggccagggcaattaggcaggagaaggaaataaagggtattcaattaggaaaacaggaagtccaattgtccctgtttgcagatgagatgattgtatatctagaaaaccccattgtctcagcccaaaatctccttaagctgataagcaacttcagcaaagtctcaggatacaaaatcaatgtacaaaaatcacaagcattcttatacaccaacaacagacaaacagagagccaaatcatgagtgaactcccattcacaattgcttcaaagagaataaaatacctaggaatccaacttacaagggatgtgaaggacctcttcaaggagaactgcaaaccactgctcaatgagataaaagaggatacaaacaaatggaagaacattccatgctcatgggtaggaagaatcaatatcatgaaaatggccatactgcccaaggtaatttatagatttaatgccatccccaccaagccaccaatgactttcttcacagaattggaaaaaactactttaaagttcatatggaaccaaaaaagagcccgcatcgccaagtcaattctaagccaaaagaacaaagctggaggcatcacactacctgacttcaaactatactacaaggctacagtaaccaaaacagcatggtactggtaccaaaacagagatctagatcaatggaacagaacagagccctcagaaataacgccgcatatctacagctatctgatctttgacaaacctgagaaaaacaagcaatggggaaaggattccctatttaataaatggtgctgggaaaactggctacccatatgtagaaagctgaaactggatcccttccttacaccttatacaaaaatcaattcaagatggattaaagacttaaatgttagacctaaaaccataaaaaccctaaaagaaaacctaggcattaccattcaggacataggcatgggcaaggacttcatgtctaaaacaccaaaagcaatggcaacaaaagacaaaattgacaaatgggatctaattaaactaaagagcttctgcacagcaaaagaaactaccatcagagtgaacaggcaacctacaaaatgggagaaaattttcgcaacctactcatctgacaaagggctaatatcaagaatctacaatgaactcaaacaaatttacaagaaaaaaacaaacaaccccatcaacaagtgggtgaaggacatgaacagacacttctcaaaagaagacatttatgcagccaaaaaacacatgaaaaaatgctcatcatcactggccatcagagaaatgcaaatcaaaaccacaatgagataccatctcacaccacttagaatggcgatcattaaaaagtcaggaaacaacagtgccagccccactgccaggaacaagacagccaggaatcagaggaccaagatgatagcagtgacggccccccgaaacagggctccactggagctggagctgattctgtaccggcaaaacagacagagtaaaactcatattttggaaacaaacaatacatcagctgagcttctggttccatttgaagaagactacttaattgaaataagaacagtcagtgatggtggagatggaagcagcagtgaggaaattaggattccaaaaatgtcaacagggggtgaggagggcatggctgctgtctttaaaaacaaatgcagatgttcatggtctcgggtggtcatagcctatcacagcagctcagggaaccagatgggaaccaaccctgaacaggaccctggacagcatgccatcccattggagggtacactcacacacacccgcactcactcagactgggaccatttggacacagcaatgaactga

SEQ ID NO: 151569 - DNA, 3348 bp, Homo sapiens; identical to SEQ ID NO: 120176

SEQ ID NO: 151570 - DNA, 3432 bp, Homo sapiens; identical to SEQ ID NO: 118085

SEQ ID NO: 151571 - DNA, 3033 bp, Homo sapiens; identical to SEQ ID NO: 118078

SEQ ID NO: 151572 - DNA, 4170 bp, Homo sapiens
atgaactctcttgagcagaatccaaggagcaaatgggaactgctgcacagaggaacaatggagctgtggccaacaatgtgggctgacgaggaggagcaaggcctgaaagctgtgcttgctttgtcagcgaagaagtttgtgcctggggcaaggagcaagactggcctcactgactgcatgggagttggaggaggcctgttgctaccagctttcccccatatccctggcaaaagagacagccataatcccctctggaacataacccctgagaaccagtccccaacccccacagtggccatggaacgcagttcctcaccagcaacggaacaaagctggatggaaaatgactttgacgagttgagagaagaaggcttcagacgatcaaactactccgagctacaggaggaaattaaaaccaaaggcaaagaagttaaaaactttgaaaaaaatttagacgaatgtataactagaataaccaatacagagaagtgcttaaaggaggtgatgcagctgaaagccaaggctcgagaactacgtgaagaatgcagaagcctcaggagccgatggaatcaactggaagaaagggtatcagtgatggaagatgaaatgaatgaaatgaagcgagaagggaagtttagagaaaaaagaataaaaagaaacgaacaaagcctccaagaaatatgggactatgtgaaaagaccaaatctacgtctgattggtgtacctgaaagtgacggtgagaatgcaaccaggttggaaaacactctgcaggatatcatccaggagaacttccccaatctagcaaggcaggccaacattcagattcaggaaatacagagaatgccacaaagatactcctcaagaagagcatctccaagacacataattgtcagattcaccaaagttgaaatgaaggaaaaaatgttaagggcagccagagagaaaggtcgggttacccacaaagggaagcccatcagactaatagcggatctctcagcagaaactctacaagccagaagagagtggggaccaatattcaacattcttaaagaaaagaattttcaactcagaatttcatatccagccaaactaagcttcataagtgaaggagaaataaaatcctctacagacaagcaaatgctgagagattttgtcaccaccaggcctgccctaaaagagctcctgaaggaagcactaaacatggaaaggaacaaccgagacacacataggctcaaaacaaaaggatggaggaagatctaccaagcaaatggaaaacaaaaaaaggcaggggttgcaatcctagtctcggataaaacagactttaaaccaacaaagatcagaagagacaaagaaggccattacataatggtaaagggatcaattcaacaagaagagctaactatcctaaatatatatgcacccaatacaggagcacccagattcataaagcaagtccttagtgacctacaaagagacttagactcccacacaataataatgggagactttaacaccccactgtcaacattagacagatcaacgagacagaaagttaacaaggatacccaggaattgaactcagctctgcaccaagcagacctaatagacatctacagaactctccaccccaaatcaacagaatatacattcttttcagcaccacaccacacctattccaaaactgaccacatagttggaagtaaagctctcctcagcaaatgtaaaagaacagatattaaaacaaactgtctctcagaccacagtgcaatcaaactagaactcaggattaagaaactcactcaaaaccactcaactacatggaaagtgaacaacctgctcctgaatgactactgggtacataacgaaatgacggcagaaataaagatgttctttgaaaccaacgagaacaaagacacaacataccagaatctctgggacacattcaaagcagtgtgtacagggaaattcatagcattaaatgcccacaagagaaagcaggaaagatccaaaattgacaccctaacatcacaattaaaagaactagaaaagcaagaacaaacacattcaaaagctagcagaaggcaagaaataagtaaaatcagagcagaactgaaggaaatagagacacaaaaaacccttcaaaaaattaatgaatccaggagctggttttttgaaaggatcaacaatatcaatagactgctagaaagactaataaagaagaaaagagagaagaatcaaatagacacaacaaaaaatgataaaggagatatcaccaccgatcccacagaaatacaaactaccatcagagaatactacaaacacctctatgcaaataaactagaaaatctagaagaaatggataaattcctcgacacatacactctcccacgactaaaccaggaagaagttgaatctctgaatagaccaataacaggttctgaaattgtggcaataatcaatagcttaccaaccaaaaaaagtccaggaccagatggattcacaggcgaattctaccagaggtacaaggaggaactggtaccattccttctgaaactattccaatcaatggaaaaagagggaatcccccctaactcattttatgaggccagcatcatcctgatatcaaagccaggcagagacacaaccaaaaaagagaattttagaccaatatccttgatgaacattgatgcaaaaatcctcaataaaatactgacaaaacgaatccagcagcacatcaaaaagcttatccaccatgatcaagtgggcttcatccctgggatgcaaggctggttcaatatacgcaaatcaataaatgtaatccagcatataaacagaaccaaagacaaaaaccacatgattatctcaatagatgcagaaaaggcctttgacaaaattcaacaacacttcatgctaaaaactctcaagaaattaggtattgatgggatgtatctcaaaataataagagctacctatgacaaacccacagccaatatcatactgaatgggcaaaaactggaagcattccctttgaaaactggcacaagacagggatgccctctctcaccactcctattcaacatagtgttggaagttctggccagggcaatcaggcaggagaaggaaataaagggtattcaattaggaaaagaggaagtcaaattgtccctgtttgcagatgacatgattgtatatctagaaaaccccatcatctcagcccaaaatctccttaagctgataagcaacttcagcaaactctcaggatacaaaatcaatgtgcaaaaatcacaagcattcttatacaccaataacagacaaacagagagtcaaatcatgagtgaactcccattcacaattgcttcaaagagaataaaatacctaggaatccaacttacaagggacgtgaaggacctcttcaaggagaactacaaaccactgctcaatgaaataaaagaggatacaaacaaatggaagaacagtccatgctcatgggtaggaagaatcaatatcatgaaaatggccatactgcccaagctaccaatgactttcttcacagaattggaaaaaactactttaaagttcatatggaaccaaaaaagagcctgcatcgccaagtcaatcctaagccaaaagaacaaagctggaggcatcacactacctgacttcaaactacactacaaggctacagtaaccaaaacagcatggtactggtaccaaaacagagatatagatcaatggaacagaacagagccctcagaaataacaccgcatatctacaactatctgatctttgacaaacctgagaaaaacaagcaatggggaaaggattccctatttaataaatggtgctgggaaaactggctagccatatgtagaaagctgaaactggatcccttccttacaccttatacaaaaattaattcaagatggattaaagacttaaacgttagacctaaaaccataaaaaccctagaagaaaacctaggcattaccattcaggacataggcatgggcaaggacttcatgtctaaaacaccaaaagcaatggcaacaaaagccaaaattgacaaatgggatctaattaaagagcttctgcacagcaaaagaaactaccatcagagtgaacaggcaacctacaaaatgggagaaaattttcgcaacctactcatctga

SEQ ID NO: 151573 - DNA, 3924 bp, Homo sapiens; identical to SEQ ID NO: 120178

SEQ ID NO: 151574 - DNA, 4539 bp, Homo sapiens
atggtaaagggatcaattcaacaagaggagctaactatcctaaatatacatgcacccaatacaggagcacccagattcataaagcaagtcctgagtgacctacaaagagacttagactcccacacattaataatgggagactttaacaccccactgtcaacattagacagatcaatgagacagaaagtcaacaaggatacccaggaattgaactcagctctgcaccaagcagacctaatagacatctacagaactctccaccccaaatcaacagaatatacatttttttcattaccacaccacacctattccaaaattgaccacatagttggaagtaaagctctcctcagcaaatgtaaaagaacacaaattataacaaactatctctcagaccacagtgcaatcaaactagaactcaggattaagactctcactcaaagccgctcaactacatggaaactgaacaacctgctcctgaatgactactgggtacataacgaaatgaaggcagaaataaagatgttctttgaaaccaacgagaacaaagacacaacataccagaatctctgggatgcattcaaagcagtgtgtagagggaaatttatagcactaaatgcccacaagagaaagcaggaaagatccaaaattgacaccctaacatcacaattaaaagaactagaaaagcaagagcaaacacattcaaaagctagcagaaggcaagaaataactaaaatcagagcagaactgaaggaaacagagacacaaaaaacccttcaaaaaatcaatgaatccaggagctggttttttgaaaggatcaacaaaattgatagaccgctagcaagactaataaagaaaaaaagagagaagaatcaaatagacacaataaaaaatgataaaggggatatcaccaccgatcccacagaaatacaaactaccatcagagaatactacaaacacctctacgcaaataaactagaaaatctagaagaaatggatacattccttgacacatacactctcccaagactaaaccaggaagaagttgaatctctgaatagaccaataacaggagctgaaattgtggcaataatcaatagtttaccaaccaaaaagagtccaggaccagatggattcacagccgaattctaccagaggtacaaggaggaactgcatataaacagagccaaagacaaaaaccacatgattatctcaatacatgcagaaaaagcctttgacaaaattcaacaacccttcatgctaaaaactctcaataaattaggtattgatgggacgtatttcaaaataataagagctatttatgacaaacccacagccaatatcatactgaatgggcaaaaactggaagcattccctttgaaaactggcacaagacagggatgccctctctcaccgctcctattcaacatagtgttggaagttctggccagggcaatcaggcaggagaaggaaataaagggtattcaattaggaaaagaggaagtcaaattgtccctgtttgcagacgacatgattgtttatctagaaaaccccatcgtctcagcccaaaatctccttaagctgataagcaacttcagcaaagtctcaggatacaaaatcaatgtacaaaaatcacaagcattcctatacaccaacaacagacaaacagagagccaaatcatgagtgaactcccattcactattgcttcaaagagaataaaatacctaggaatccaacttacaagggatgtgaaggacctcttcaaggagaactacaaaccactgctcaaggaaataaaagaggatacaaacaaatggaagaacattccatgctcatgggtaggaagaatcaatatcgtgaaaatggccatactgcccaaggcaatttacagattcaatgccatccccatcaagctaccaatgactttcttcacagaattggaaaaaactactttaaagttcatatggaaccaaaaaagagcccgcatcaccaagtcaatcctaagccaaaagaacaaagctggaggcatcacactacctgacttcaaactatactacaaggctacagtaaccaaaacagcatggtactggtaccaaaacagagatatagatcaatggaacagaacagagccctcagaaataacgccgcatacctacaactatctgatctttgacaaacctgagaaaaacaagcaatggggaaaggattccctatttaataaatggtgctgggaaaactggctagccatatgtagaaagctgaaactggatcccttccttacaccttatacaaaaatcaattcaagatggattaaagatttaaacgttagacctaaaaccataaaaaccctagaagaaaacctagaaattaccattcaggacataggcgtgggcaaggacttcatgtccaaaacaccaaaagcaatggcaaccaaagccaaaattgacaaatgggatctaattaaactcaagagcttctgcacagcaaaagaaactaccatcagagtgaacaggcaacctacaacatgggagaaaattttcgcaacctactcatctgacaaagggctaatatccagaatctacaatgaactcaaacaaatttacaagaaaaaaacaaacaaccctatcaaaaagtgggcgagggacatgaacagacacttctcaaaagaagacatttatgcagccaaaaaacacatgaaaaaatgctcatcatcactggccatcagagaaatgcaaatcaaaaccactatgagatatcatctcacaccagttagaatggcaatcattaaaaagtcaggaaacaacaggaatatccagactgtgctcctactcaggatcccattccagggcctggttccttcccccagcgggcagacacatccagtaggcgaccagccagcagcgcatgtagacagcatcgacgccgataccaggctcagaggacagaaccatattccagaggagctggggagaggcgttgtctccaatccagttgaggcccaggtccccgtgggcttccacgcgcggcctctgctggtgtccagaactcgccgtccctttggctttgccacgccatcatggcttcccttctcctccttcttctttggcttttccaagaccttcaagtgtctgcattccctggagcaggaccatgagcctccacccgtgtctctctgcatccctgcaggttctgggatctcacacacggccaaagccatcgggcttcacgcaggtctcactgacttgaacttgaggaagcgctgttcactcagcggtgccctgtctggaggaaattcccgggtctttctgcacttcttacgattgcaaatgaccaggaaaagaacttggaggtcagaagagtggggctgcccagccctcaaagccctggcactgtgcagtttcaagctgcagttacctcggaaagaggaggctgcatttgcactgcaggtgcaggaacgttcacccacacggctcagaaacgttctcacacatgcggagctgtgtccagttggcaccggccgcaaagctgcacctaccacctgtggaagtgcgaggcaacacaaacatcctgactcatgtccccatcgtgacttggtgcatttcattggaagtacatctaagtgccattcggataaggatgaggataaggacaaagaccagtcttcactgcttcctgctgacaggagggtgctgttttgggaaacagtagtcagagcttcctccgaggcctatctaagggtccccggaagaagggaccattgtccgaggttccggttttataagcatttggagtttgatggcttgaaggacttcaaccagaagcatggaattgagtttggggcaaaaatgtgtcttgggagggctcgtggactcactaagacccagacggccctcacaggctgcagccagcagccgacaaccaacgtcacagggaccgaaaatgacctcactctgcagacaaccaaagcaacagggaccaaaaatgacctcactctgcaggtaaccaaagtcacagggaccaaaaatgacctcactctgaagacaaccaaagccacagggaacgaaaatgacctcactctgcaggtaaccaaagtcacagggaccgaaaatgacctcactctgcagacaaccaaagcgacagggaccaaaaatgacctcactctgaagacaaccaaagccacagggaatgaaaatgacctcaccctgcaggtaaccaaagtcacagggaccgaaaatgacctcactctgcaggtaaccaaagtcacagggaccaaaaatgacctcaccctgcagacaaccaaagccacagggaccaaaaatgacctcactctgcagataaccaaagtcacagggaccaaaaatgacctcacactgcagacaaccaaagtcacagggaccgaaaatgacctcactctgcaggtaaccaaagtcacagggaccgaaaatgacctcaccctgcagacaaccaaagtcacagggagtgaagactccacaggagactggaggaggggagccacagctcttgccacccagcgagtctaa

SEQ ID NO: 151575 - DNA, 3919 bp, Homo sapiens
atggagctgaaagccaaggctcgagaactatgggaagaatgcagaagcctcaggagccgatgtgatcaactgaaagaaagggtatcagtgatggaagatgagatgaatgaaatgaagcgagaagggaagtttagagaaaaaagaataaaaagaaacgaacaaagcctccaagaaatatgggactatgtgaaaagaccaaatctacgtctgattggtgtacctgaaagtgacggggagaatggaaccaagttggaaaacactctgcagggtattatccaggagaacttccccaatctagcaaggcaggccaacattcagattcaggaaatacagagaacaccacaaagatactcctcgagaagagcaactccaagacacataattgtcagattcaccaaagttgaaatgaaggaaaaaatgttaagggcagccagagagaaaggtcgggttacccacaaagggaagcccatcagactaacagtggatctctcggcagaaactctagaagccggaagagagtgggggccaatattcaacattcttaaagaaaagaattttcaacccagaacttcatatccagccaaactaagcttcataagtgaaggagaaataaaatactttacagacaagcaaatgctgagagattttgtcaccaccaggcctgccctaaaagagctcctgaaggaagcactaaacatggaaaggaacacccgcaaatgtaaaagatcagaaattataacaaactgtctctcagaccacagtgcaatcaaactagaactcaggaataagaaactcactcaaaaccgctcaactacatggaaaccgaacaacctgctcttgaatgactactgggtacgtaacgaaatgaaggcagagataaagatgttctttgaaaccaacgagaacaaagacagaacataccagaatctctgggacacattcaaagcagtgtgtagagggaaatttatagcactaaatgcccacaagagaaagcaggaaagatccaaaattgacaccctaacatcacaattaaaagaactagaaaagcaagagcaaagacattcaaaagctagcagaaggcaagaaataactaaaatcagagcagagctgaaggaaatagagacacaaaaaacccttcaaaaaattaatgaatccaggagctggttttttgaaaggatcaacaaaattgatagaccgctagcaagactagtaaagaagaaaagagagaagaatcaaatagacgcaataaaaaatgataaaggggatatcaccaccaatcccacagaaatgcaaactaccatcagagaatactacaaacacctctatgcaaataaactagaaaatctagaagaagtggataaattcctcaacacatacaccttcccaagactaaaccaggaagaagttgactctctgaatagaccaataacaggctctgaaattgtggcaataatcaatagcttaccaacgaaaaagagtccaggaccagatggattcacagccgaattctaccagagaaaaagagggaatcctctctaactcattttatgaggccagcatcattctgataccaaagccaggcagagacacaacaaaaaaagagaattttagaccaatatccttgatgaacattgatgcaaaaatcctcagtaaaatactggcaaaacgaatccagcagcacatcaaaaagcttatccaccatgatcaagtgggcttcatccctgggatgcaaggctgggtcaatatacacaaatcaataaatgtaatccagcatataaacagagccaaagacaaaaaccacatgattatctcaacagatgcagaaaaagcctttgacataattcaacaacccttcatgctaaaaactctcaataagttaggtattgatgggatgtatttcaaaataataagagctatctatgacaaacccacagctaatatcatactgaatgggcaaaaactggaagcattccctttgaaaactggcacaagacagggatgccctctctcaccactcctattcaacatagtgttggaagttctggccagggcaattaggcaggagaaggaaataaagggtattcaattaggaaaagaggaagtcaaattgtccctgtttgcagatgacatgactgtatatctagaaaaccccattgtctcagcccaaaatctccttaagctgataagcaacttcagcaaagtctcaggatacaaaatcaatgtgcaaaaatcacaaggattcttatacaccaacaacagacaaacagagagccaaatcatgagtgaactcccattcacaattgcttcaaagagaataaaatacctaggaatccaacttacaagggatgtgaaggacctcttcaaggagaactacaaaccactgctcaaggaaataaaagaggatacaaagaaatggaagaacattccatgctcatgggtaggaagaatcaatatcgtgaaaatggccatactgcccaaggtaatttacagtttcaatgccatccccatcaagctaccaatgcctttcttcacagaattggaaaaaactactttaaagttcatatggaaccaaaaaagagcccgcatcaccaagtcaatcctaagccaaaagaacaaagctggaggcatcacactacctgacttcaaactatactacaaggctacagtaaccaaaacagcatggtactggtaccaaaacagagatatagatcaatggaacagaacagagccctcagaaataacgccgcatatctacaactatctgatctttgacaaacctgagaaaaacaagcaatggggaaaggattccctatttaataaatggtgctgggaaaactggctagctatatgtagaaagctgaaactggatcccttccttacaccttatacaaaaatcaattcaagatggattaaagacttaaacgttagacctaaaaccataaaaaccctagaagaaaacctaggcaataccattcaggacataggcatgggcaaggacttcatgtctaaaacaccaaaagcaatggcaacaaaagccaaaattgacaaatgggatctaattaaactaaagagcttctgcacagcaaaagaaactaccatcagagtgaacaggcaacctacaaaatgggagaaaatttttgcaacctactcatctgacaaagggctaatatccagaatctacaatgaactcaaacaaatttacaagaaaaaaacaaacaaccccatcaaaaagtgggtgaaggacatgaacagacacttctcaaaagaagacatttatgcagccaaaaaacacatgaaaaaatgctcatcatcactggccatcagagaaatgcaaatcaaaaccacaatgagataccatctcacaccagttagagtggcaatcattaaaaagtcaggaaacaacaggtgctggagaggatgtggagaaattggaacacttttacactgttggtgggactgtaaactagttcaacccttgtggaagtcagtgtggcgattcctcagggatctagaactagaaataccatttgacccagccatcccattactgggtatatacccaaaggactataaatcatgctgctataaagacacgtgcacacgtatgtttattgcagcactattcacaatagcaaagacttggagccaacccaaatgtccaacaacgatagactggattaagaaaatgtggcacatatacaccatggaatactatgcagccataaaaaatgatgagttcatgtcctttgtagggacatggatgaaattggaaatcatcattctcagtaaaccattgcaagaacaaaaaaccaagcaccgcatgttctcactcatagtatcttcaaaagtaattaggcggctgtcccagaagttgcctttgaagattgttgcaatgtgtatacctgtcaaaaggaattga

SEQ ID NO: 151576 - DNA, 19313 bp, Homo sapiens
tcaaaacccagtggtgcagtcgttaaatcttaatgctctgaaataatctcctttgactccatccctcacatacaggtcacactgatgcaagtggtgggctcccacagccttgggtagctctgcccctgtggctctgcagggtagagcctcattcccggctgctttcatgggctggcattgagtgcctgtggcttttccaggtgcatggtgcaatctatcagtggatctacaattctgggttctggaagatagtgatcctcttctcacagatccactaagcagttcctcagtggtgactttgtgtagtggctctgactccacatttctcctccatattgccctagtagaagctctccatgagggctttgccctgcagcaggcttctgctggacatttagatgtttccgtacacctgtcagagtgaacatctgatgaaagcccaaatgcacttgcagaataaatatgttgctgtagcaaccagtcctcatttgttccaggtgtatctgtgagggtgtttctagaagagactggcttgtaagtcagtggactgagtgagatagattggccttcagtgtgggtgggcaccatccaatcacctggaggtagggaaaagagattgggcttctctccatatggtgactgtgttgtgctgaaagtgagactaaagccctcaggctctttgtttcttctccagtgcagaggcagcagggacaaaactgctgctgtgacagtgtctggggggctgttgattgtctcttggagacccttcttcagggaaacacagagccaccagaagtgggaatgctcagctgggtgtaggacagctgttctgaggtctagagctggtgatcttgcttggtaaacactgttgtttcctgacttttgaatgattgccattctaactggtgtgagatggtatctcattgtggttttgatttgcatttctctgatggccagggatgatgagcattttttcatgtgtcttttggctgcataaatgtcttcttttgagaagtgtctgttcatatcctttgcccattttttgatggggttgtttgtttttttcttgtaaatttgtttgagttcattgtagattctggatattagccctttgtcagatgagtaggttgcgaaaattttctcccattttgtaggttgcctgttcactctgatggtagtttcttttgctgtgcagaagctctttagtttaattagatcccattggtcaattttggcttctgttgccattgcttttggtgttttggacatgaagtccttgcccctgcctatgtcctgaatggtaatgtctaggttttcttctagggtttttatggttttaggtctggcatttaagtctttaatccaccttgaattaatttttatataatgtgtaaggaagggatccagtttcagctttccacatatggctagccagttttcccagcaccgtttatcaaataaggaatcctgttcccattgcttgtttctctcaggtttgtcacagatcagatagttgtagatatgcggcgttagttctgagggctctgttctgttccattgatctatatctctgttttggtaccagtaccatgctgctctggtgacagtagccttgtagtatagtttgaagtcaggtagcatgatgcctccagctttgttcttttggcttaggattgacttcgcgatgtggtctcttttttggttccatatgaactttaaaatagttttttccatttctgtgaagaaagtcattggtagcttgatggggatggcattgaatctataaattaccttgggcagtatggccattttcatgatattgattcttcctactacccatgagcatagaatgttcttccatttgtttgtatcctcttttatttcgttgagcagtggtttgtagttctccttgaagaggtccttcacatcccttgtaagttggattcctaggtattttattctctttgaagcaattgtgaatgggagttcactcatgatttggctctctgtttgtctgttattggtgtataagaatgcttgtgacttttgtacattgattttgtatcctgagactttgctgaagttgcttatcagcttaaggagattttgggctgagacaatggggttttctagatatacaatcatgtcatctgcaaacagggacaatttgacttcctcttttcctacttgaataccctttatttccttctcctgcctaattgccctggccagaacttccaacactaatttattaagagtttttagcatgaagggttgttgaattttgtcaaaggccctttctgcatctatgcagataatcatgtggtttttgtctttggctctgtttatatgctggattacatttattgatatgtgtatattgaaccagccttgcatcccagggatgaagcccacttgatcatggtggataagctttttgatgtgctgctggattcggtctgccagtattttattgagggtttttgcatcaatgttcatcaaggatattggtctaaaattctcttttttggttgtgtctctgcctggctttggtatcagaatgatgctggcctcataaaatgagttagggaggattccctctttttctattgattggaatagtttcagaaggaatggtaccagttccttcttgtacctctggtagaattcggctgtgaatccatctggtcctggactctttttggttggtaagctattgattattgccacaatttcagatcctgttattggtctattcagagattcaacttcttcctggtttagtcttgggagagtgtatgtgtcgaggaatttatccatttcttctagattttctagtttatttgcgtagaggtgtttgtagtattctctgatggtagtttgtatttctgtgggattggtggtgatgtcccctttatcattttttattgcatctatttgattcttctctctttttctctttattagtcttgctagcagtctatctattttgttgatcctttcaaaaaaccagctcctggattcattaattttttgaagggttttttgtgtctctatttccttcagttctgctctgattttagttatttcttgccttctgctagcttttgaatgtgtttgctcttgcttttctagttcttttaattgtgatgttagggtgtcaattttggatctttcctgctttctcttgtgggcatttagtgctataaatttccctctatacactgctttgaatgcgtcccagagattctggtatgttgtgtctttgttctcgttggtttcaaagaacatctttatttctagcttcatttcgttatgtacccagtagtcattcaggagcaggttgttcagtttccatgtagttgagcggttttgagtgagattcttaatcctgagttctagtttgattgcactgtggtctgagagatagtttgttataatttctgttcttttacatttgctgaggagagctttacttccaagtatgtggtcaattttggaatacgtgtggtgtggtgctgaaaaaaatgtgtattctgttgatttggggtggagagttctgtagatgtctattaggtccacttggtgcagagctgagttcaattcctgggtatccttgttgactttctgtctcgttgatctgtctaatgttgacagtggggtgttaaagtctcccattattaatgtgtgggagtctaagtctctttgtaggtcactcaggacttgctttatgaatctgggtgctcctttctctctggctgcccttaacattttttccttcatttcaactttggtgaatctgacaattatgtgtcttggagttgctcttctcgaggagtatctttgtggcgttctctgtatttcctgaatctgaatgttggcctgccttgctagattggggaaattctcctggataatatcctgcagagtgttttccaacttggttccattctccccgtcactttcaggtacaccaatcagacgtagatttggttttttcatatagccccatatttcttggaggctttgctcatttctttttattcttttgtctctaaacttcccttctcgcttcatttcattcacttcatcttccatcactgctaccctttcttccagttgatcgcatggcctcctgaggcttctgcattcttcacgtagttctcgagccttggttttcagctccatcagctcctttaagcacttctctgtattggttattctagttatacattcttctaaatttttttcaaagttttcaacttctttgcctttggtttgaatttcctcccatagctcggagtaatttgatcgtctgaagccttcttctctgagttcatcaaagtcattctccttccagctttgttctgttgctggtgaggaactgcgttccttgggcagtatggccattttcacgatattgattcttcctacccatgagcatggaatgttcttccatttgtttgtatcctcttttatttcattgagcagtggtttgtagttctccttgaagaggtccttcacgtcccttgtaagttggattcctaggtattttattctctttgaagcaattgtgaatgggagttcactcatgatttggctctctgtttgtctgttattgttgtgtaagaatgcttgtgatttttgcacattgattttgtatcctgagactttgctgaagttgcttatcagcttaaggagattttgggccgagacaatggggttttctagatatacaatcatggcatctgcaaacagggacaatttgacttcctcttttcctaactgaataccctttatttccttctcctgcctaattgccctggccagaacttccaacactagcctccgacccccgacaggccccggtgtgtgatgttcctctccctgtgtccatgtgttctcatttttcaactcccaattatgagtgagaacatgtggtgtttggttttctgatcttgtgatagtttgctgagaatgatggtttccagcttcatccaggtccctgttgtttcctgactttttaatgattgccattctaactggtgtgagatgatatctcatagtggttttgatttgcatttctctgatggccagtgatgatgagcatttcttcatgtgttttttggctgcataaatgtcttcttttgagaagtgtctgttcatgtccttcgcccactttttgatggggttgtttgtttttttcttgtaaatttgtttgagttcattgtagattctggatattagccctttgtcagatgagtaggttgcgaaaattttctcccatgttgtaggttgcctgttcactctgatggtagtttcttttgctgtgcagaagctctttagtttaattagatcccatttgtcaattttggcttttgttgccattgcttttggtgttttggacatgaagtccttgcccacgcctatgtcctgaatggtaatgcctaggttttcttctagggtttttatggttttaggtctaacgtttaaatctttaatccatcttgaattgatttttgtataaggtgtaaggaagggatccagtttcagctttctacatatggctagccagttttcccagcaccatttattaaatagggaatcctttccccattgcttgtttttctcaggtttgtcaaagatcagatagttgtagatatgcggcattatttctgagggctctgttctgttccattgatctatatctctgttttggtaccagtaccatgctgttttggttactgtagccttgtagtatagtttgaagtcaggtagtgtgatgcctccagctttgttcttttggcttaggattgacttggcgatgcgggctcttttttggttccatatgaactttaaagtagttttttccaattctgtgaagaaagtcattggtagcttgatggggatggcattgaatctgtaaattaccttgggcagtatggccattttcacgatattgattcttcctacccatgagcatggaatgttcttccatttgtttgtgtcctcttttatttccttgagcagtggtttgtagttctccttgaagaggtccttcacatcccttgtaagttggattcctaggtattttattctctttgaagcaattgtgaatgggagttcactcatgatttggctctctgtttgtctgttgttggtgtataagaatgcttgtgatttttgtacattgattttgtatcctgagactttgctgaagttgcttatcagcttaaggagattttgggctgagacaatggggttttctagataaacaatcatgtcgtctgcaaacagggacaatttgacttcctcttttcctaattgaataccctttatttccttctcctgcctgattgccctggccagaacttccaacactatgttgaataggagcggtgagagagggcatccctgtcttgtgccagttttcaaagggaatgcttccagtttttgcccattcagtatgatattggctgtgggtttgtcatagatagctcttattattttgaaatacgtcccatcaatacctaatttattgagagtttttagcatgaagggttgttgaattttgtcaaaggctttttctgcatctattgagataatcatgtggtttttgtctttggctctgtttatatgctggattacatttattgatttgcgtatattgaaccagccttgcatcccagggatgaagcccacttgatcatggtggataagctttttgatgtgctgctggattcggtttgccagtattttattgaggatttttgcatcaatgttcatcaaggatatcggtctaaaattctcttttttggttgtgtctctgcccgactttggtatcagaatgatgctggcctcataaaatgagttagggaggattccctctttttctattgattggaatagtttcagaaggaatggtaccagttcctccttgtacctctggtagaattcggctgtgaatccatctggtcctggactctttttggttggtaaactattgattactgccacaatttcagagcctgttattggtctattcagagattcaacttcttcctggtttagccttgggagagtgtatgtgtcgaggaatgtatccatttcttctagattttctagtttatttgcgtagaggtgtttgtagtattctctgatggtagtttgtatttctgtgggatcggtggtgatatcccctttatcattttttattgtgtctatttgattcttctcttttttctttattagtcttgctagcggtctatcaattttgttgatcctttcaaaaaaccagctcctggattcattgattttttgaagggttttttgtgtctctatttccttcagttctgctctgattttagttatttcttgccttctgctagcttttgaatgtgtttgctcttgcttttctagttcttttaattgtgatgttagggtgtcagttttggatctttcctgctttctccagtagtcattcaggagcaggttgttcggtttccatgtagttgagctgttttgagtgagtctcttaatcctgagttctagtttgattgcactgtggtctgagagacagtttgttataatttctattcttttacatttgctgaggagtgctttacttccaactatgtggtcaattttggaataagtgtggtgtggtgctgagaagaatgtatattctgctgatttggggtggagagttctgtagatgtctattaggtccgcttggtgcagagctgaattcaattcctggatatccttgttaactttctgtcttgttgatctgtctaatgttgacagtggggtgttaaagtctcccattattattgtgtgggagtctaagtctctttgtaggtctctacggacttgctttatgaatctgggtgctcctgtattggatgcatatatatttaagatatttagctcttcttgttgaattgatccctttaccattatgtaacggccttctttgtctcttttgatctttgttggtttaaagtctgttttatcagagactaggattgcaacccctgcctttttttgttttccattttcttggtagatcttcctccatccctttattttgagcctatgtgtttctctgttgtttcctgactttttaatgattgccattctaactggtgtgagatggtatctcattgtggttttgatttgcatttctctgatggccagtgatggtgagcattttttcatgcgtttttttggctgcataaatgtcttcttttgagaagtgtctgttcatgtccttcacccactttttgatggggttgtttgttttttttcttgtaaatttgtttgagttctttgtagaatctggatattagtcctttgtcagatgggtagattgcaaaatttttctcccattctgtaggttgcctgttcactctgatggtagtttcttctgctgtgcagaagctctttaggttaattatatcccatttgtcaattttggcttttgttgccattgcttttggtgttttagtcatgaagtccttgcccatgcctatgtcctgaatggtattgcctaggttttcttctaggacttttatggctttaggtctaacatttaagtctttaatccatcttgaattgatttttgtataaggtgtaaggaagggatccagtttcagctttctacatatggctagccagttttcccagcaccatttattaaatagggaatcctttccccattgcttgtttttctcaggtttgtcaaagatcagatagttgtagatatgcggcattatttctgagggctctgttctgttccattgatctatatctctgttttggtaccagtaccatgctgtttcggttactgtagccttgtagtatagtttgaatagtgatgcctccagctttattcttgctttgttcctttggcttaggattgacttggcaatgggggctcttttttggttccatatgaactttaaagtagttttttccaattctgtgaagaaaggcattggtagcttgatggggatggcactgaatctgtaaattaccttgggcagtatggccattttcacgatattgattcttcctacccatgagcatggaatgttcttccatttgtttgtatcctcttttatttccttgagcagtggtttgtagttctccttgaagaggtccttcacatcccttgtaagatggattcctaggtattttattctctttgaagcaattgtgaatgggagttcactcatgatttggctctctgtttgtctgttattggtgtataagaatgcttgtgatttttgcacattgattttgtgtcctgagactttgctgaagtcgcttatcagcttaaggagattttgggctgagacaatggggttttctagatatacaatcatgtcatctgcaaacagggacaatttgacttccttttttcctaattgaataccctttatttccttctcctgcctaattgccctggccagaacttccaacactatgttgaataggagtggtgagagagggcatccctgtcttgtgcccccctgtcttgtgctggttttcaaagggaatgcttccagtttttgcccattcagtatgatattggctgtgggtttgtcatagatagctcttattattttgaaatacgtcccatcaatacctaatttattgagagtttttagcatgaagggttgttgaattttgtcaaaggctttttctgcatctattgagataatcatgtggtttttgtctttggctctgtttatatgctggattacatttattgatttgcgtatattgaaccagccttgcatcccagggatgaagcccacttgatcatggtggataagctttttgatgtgctgctggattcggtttgccagtattttattgaggatttttgcatcaatgttcatcaaggatattggtctaaaattctcttttttggttgtgtctctgcccggctttggtatcagaatgatgctggcctcataaaatgagttagggaggattccctctttttctattgattggaatagtttcagaaggaatggtaccagttcctccttgtacctctggtagaattcggctgtgaatccatctggtcctggactctttttggttggtaaactattgattattgccacaatttcagagcctgttattggtctattcagagattcaacttcttcctggtttagtcttgggagagtgtatgtgtcgaggaatgtatccatttcttctagattttctagtttatttgcgtagaggtgtttgtagtattctctgatggtagtttgtatttctgtgggatcggtggtgatatcccctttatcattttttattgtgtctatttgattcttctctctttttttctttattagtcttgctagcggtctatcaattttgttgatcctttcgaaaaaccagctcctggattcattgattttttgaagggttttttgtgtctctatttccttcagttctgctctgattttagttatttcttgccttctgctagcttttgaatgtgtttgctcttgcttttctagttcttttaattgtgatgttagggtgtcaattttggatctttcctgctttctcttgtaggcatttagtgctataaatttccctctacacactgctttgaatgcgtcccagagattctggtatgtggtgtctttgttctcgttggtttcaaagaacatctttatttctgccttcatttcgttatgtacccagtagtcattcaggagcaggttgttcagtttccatgtagttgagcggctttgagtgagattcttaatcctgagttctagtttgattgcactgtggtctgagagatagtttgttataatttctgttcttttacatttgctgaggagagctttacttccaactatgtggtcaattttggaataggtgtggtgtggtgctgaaaaaaatgtatattctgttgatttggggtggagagttctgtagatgtctattaggtctgcttggtgcagagctgagttcaattcctgggtatccttgttgactttctgtctcattgatctgtctaatgttgacagtggggtgttaaagtctcccattattaatgtgtgggagtctaagtctctttgtaggtcactgaggacttgctttatgaatctgggtgctcctgtattgggtgcataaatatttaggatagttagctcctcttgttgaattgatccctttaccattatgtaatggccttctttgtctcttttgatctttgttggtttaaagtctgttttatcagagactaggattgcaacccctgcctttttttgttttccattggcttggtagatcttcctccatccttttattttgagcctatgtgtgtctctgcacgtgagatgggtttcctgaatacagcacactgatgggtcttgactctttatccaacttgccagtctgtgtcttttaattgcagaatttagtccatttatatttaaagttaatattgttatgtgtgaatttgatcctgtcattatgatgttagctggcgattttgctcattagttgatgcagtttcttcctagtctcgatggtctttacattttggcatgattttgcagcggctggtaccggttgttcctttccatgtttaccgcttccttcaggagctcttttagggcaggcctggtggtgacaaaatctctcagcatttgcttgtctataaagtattttatttctccttcacttatgaagcttagtttggctggatatgaaattctgggttgaaaattcttttctttaagaatgttgaatattggcccccactctcttctggcttgtagggtttctgccgagagatccgctgttagtctgatgggctttcctttgagggtaacccgaactttctctctggctgcccttaacattttttccttcatttcaactttggtgaatctgacaattatgtgtcttggagttgctcttctcgaggagtatctttgtggcgttctctgtatttcctgaatctgaacgttggcctgccttgctagattggggaagttctcctggataatatcctgcagagtgttttccaacttggttccattctccacatcactttcaggtacaccaatcagacgtagatttggtcttttcacatagtcccatatttcttggaggctttgctcatttctttttattcttttttctctaaacttcccttctcgcttcatttcattcatttcatcttccattgctgataccctttcttccagttgatcgcatcggctcctgaggcttctgcattcttcacgtagttctcgagccttggttttcagctccatcagctcctttaagcacttctctgtattggttattctagttatacattcttctaaatttttttcaaagttttcaacttctttgcctttggtttgaatgtcctcccgtagctcagagtaatttgatcgtctgaagccttcttctctcagctcgtcaaaatcattctccatccagctttgttctgttgctggtgaggaactgcgttcctttggaggaggagaggcgctctgcgttttagagtttccagtttttctgttctgttttttccccatctttgtggttttatctacttttggtctttgatgatggtgatgtacagatgggttttcagtgtagatgtcctttctggttgttagttttccttctaacagacaggaccctcagctgcaggtctgttggaataccctgccgtgtgaggtgtcagtgtgcctctgctggggggtgcctcccagttaggctgctcgggggtcaggggtcagggacccacttgaggaggcagtctgcccgttctcagatctccagctgcgtgctgggagaaccactgctctcttcaaagctgtcagacagggacacttaagtctgcagaggttactgctgtctttttgtttgtctgtgccctgcccccagaggtggagcctacagaggcaggcaggcctccttgagctgtggtgggctccacccagttcgagcttcccggctgctttgtttacctaagcaagcctgggctatggcgggcgcccctcccccagcctcgttgccgccttgcagtttgatctcagactgctgtgctagcaatcagcgagattccgtgggcgtaggaccctctgagccaggtgtgggatatagtctcgtggtgcgccgtttcttaagccggtctgaaaagcgcaatattcgggtgggagtgacccgattttccaggtgcgtccgtcacccctttctttgactcggaaagggaactccctgatcccttgcgcttcccaggtgaggcaatgcctcgccctgcttcggctcgcgcacggtgcgcgcacacactggcctgcgcccactgtctggcgctccctagtgagatgaacccggtacctcagatggaaatgcagaaatcacccgtcttctgcgtcgctcacgctgggagctgtagaccggagctgttcctattcggccatcttggctcctccctccaattcttttgggtatatatccagcagtgggattgctggatcacatggtaatttttaattttttgaagaatcatcatactgttttccacggcagcagcaccattttatgttcccaccaacagttcattctagtttctccacatccttgccaacacttgctattttctctttttgacagtacccatcctaatgagtgtgaggtcctgtctcattgtggttttgattcttgaggctttttaaagctttttgtttcattataatttttattggattacaaaaggaacacaggtaattttatttggaaactatgaaaaataataaaaattatcttctcagaaaatgattcttgttaacatttaagctcagttaagctctctcactttctctcccttctctctctttgtacaacttttaaaaaatatagtaggggtgagactatatgtatctatactatagtaggggtgagactatatgtatccttcctttttcacttaatctcatgccttgagtagctttccactttattaaaaatgtgatgccattcaattgtatagtaaatacatatatgtaagcaaaacactgaaaactcttattctgggttccagcaagccatacctggaatggtgtaagcaggtagtttgcttggtgtgaacgtgttgttgaggcagctgccattgtgttgtgagtgggccacacgaacttgttctgttgtgtgtagacagtgtgtgctgatcctattaggaacagccaacgctttgtgtgagccacacacggttctaagtgctttgcttctgttaactcagtgaatcctcacaactccatgacggaatgctctaattatccccattttatagatggggcaactgaggtccaagagactacataatttcccgaagttcacacaggtagcagatggcagagccgggtcaggagtccaccatcttaccacgcagactgttttagccagagactctccggatctgctgtaggggacagaatacagctttatcgccgcacctgtccaccaagatggccgtagccacagagcttggttgggtaacgtcctctttatgtgacaggaacgttgctgatggggtttctgaaggtacttcctgctctttgtctcctggaagactgtgtcttcaggaatgtctctgaccctgcccagagttgaacggatgctgggaacccagcacctgcacacggccttccctccaggactctgcgcacctctgtgctccacaggagacatgcaggtgctttctctcatgagctcaggctcctgggctgacagctctccgaagctcgtggtgaggctcggtctctaactgtgccacttgccgatggcctctgttcacaaggcttcccctgctcttcgatcttgcatcaccccttgaatttgaaatccagagcagcccactcagagaccagtgtgaggaattagtgtccaggccacagatccagggactgggcacaaacatctgcctgttgagtaggaactgagctgtggccattggcaaaaaaggaggggtgagcatggctgtttcttggggagctaacattcactatcttgtctcctccctcaggatgtggggcaatcaagttggggatgaaggagcaaaagccttcgcagaggctctgcggaaccaccccagcttgaccaccctgaggtaactgtggccctgctgtctccaggggccaacctggtccctcccagctgctctaggtttgctggggaagggtgattcgtgctcctaatagaagaggaatttgcatgtgtgattttccttactcttgtcaaacctttctttgatgcataagaggccatctagtaaagcacattcttctctttttttaactttaagttctgggatacatgtagaagatgtgcaggtttgttacataggcaaatgcatgccatggtgatttgctgcacctatcaacctgtcatctaggttttaagccctgcatgcattaggtatttgtcctaatgcttgccctccccttgccccccacccccaacaggccctggtgtgtgttgttcccctccatgtgtccatgtgttctcattgttcaactcccacttatgagtgagaacatgcggtgtttggttttctgttcttgtgttagtttgccgagaatgatggtttccagcttctttgcagcgtctgtgttcttccaatagttcccagccgcactattttggacttgagtcatataggcagggatggtataggggtcctgtaagagaaggtgggcaataagggagaagagaagggtgcaggattgagcagctgtggctcctaaattgtcatcatcattttcatagctatggtaatcaccaaccctgttgtttcctgactttttaatgattgccattctaactggtgtgagatgatatctcatagtggttttgatttgcatttctctgatggccagtgatgatgagcatttcttcatgtgttttttggctgcataaatgtcttcttttgagaagtgtctgttcatgtccttcgcccactttttgatggggttgtttgtttttttcttgtaaatttgtttgagttcattgtagattctggatattagccctttgtcagatgagtaggttgcgaaaattttctcccatgttgtaggttgcctgttcactctgatggtagtttcttttgctgtgcagaagctctttagtttaattagatcccatttgtcaattttgtcttttgttgccattgcttttggtgttttggacatgaagtccttgcccacgcctatgtcctgaatggtaatgcctaggttttcttctagggtttttatggttttaggtttaacgtttaaatctttaatccatcttgaattgatttttgtataaggtgtaaggaagggatccagtttcagctttctacatatggctagccagttttcccagcaccatttattaaatagggaatcctttccccattgcttgtttttctcaggtttgtcaaagatcagatagttgtagatatgtggcattatttctgagggctctgttctgttccattgatctatatctctgttttggtaccagtaccatgctgttttggttactgtagccttgtagtatagtttgaagtcaggtagtgtgatgcctccagctttgttcttttggcttaggattgacttggcaatgcgggctcttttttggttccatatgaactttaaagtagttttttccaattctgtgaagaaagtcattggtagcttgatggggatggcattgaatctgtaaattaccttgggcagtatggccattttcatgatattgattcttcctacccatgagcatggaatgttcttccatttgtttgtgtcctcttttatttccttgagcagtggtttgtagttctccttgaagaggtccttcacatcccttgtaagttggattcctaggtattttattctctttgaagcaattgtgaatgggagttcacccatgatttggctctctgtttgtctgttgttggtgtataagaatgcttgtgatttttgtacattgattttgtatcctgagactttgctgaagttgcttatcagcttaaggagattttgggctgagacgatggggttttctagataaacaatcatgtcatctgcaaacagggacaatttgacttcctcttttcctaattgaataccctttatttccttctcctgcctgattgccctggccagaacttccaacactatgttgaataggagcggtgagagagggcatccctgtcttgtgccagttttcaaagggaatgcttccagtttttgcccattcagtatgatattggctgtgggtttgtcatagatagctcttattattttgaaatacgtcccatcaatacctaatttattgagagtttttagcatgaagggttgttgaattttgtcaaaggctttttctgcatctattgagataatcatgtggtttttgtctttggctctgtttatatgctggattacatttattgatttgcgtatattgaaccagccttgcatcccagggatgaagcccacttgatcatggtggataagctttttgatgtgctgctggattcggtttgccagtattttattgaggatttttgcatcaatgttcatcaaggatattggtctaaaattctcttttttggttgtgtctctgcccggctttggtatcagaatgatgctggcctcataaaatgagttagggagtattccctctttttctattgattggaatagtttcagaaggaatggtaccagttcctccttgtacctctggtagaattcggctgtgaatccatctggtcctggactctttttggttggtaaactattgattattgccacaatttcagagcctgttattggtctattcagagattcaacttcttcctggtttagtcttgggagagtgtatgtgtcgaggaatgtatccatttcttctagattttctagtttatttgcgtagaggtgtttgtagtattctctgatggtagtttgtatttctgtgggatcggtggtgatatcccctttatcattttttattgtgtctatttgattcttctctctttttttctttattagtcttgctagcagtctatcaattttgttgatcctttcaaaaaaccagctcctggattcattgattttttgaagggttttttgtgtctctatttccttcagttctgctctgattttagttatttcttgccttctgctagcttttgaatgtgtttgctcttgcttttctagttcttttaattgtgatgttagggtgtcaattttggatctttcctgctttctcttgtaggcatttagtgctataaatttccctctacacactgctttgaatgcgtcccagagattctggtatgtggtgtctttgttctccttggtttcaaagaacatctttatttctgccttcatttcgttatgtacccagtagtcattcaggagcaggttgttcagtttccatgtagttgagcggctttgagtgagattcttaatcctgagttctagtttgattgcactgtggtctgagagatagtttgttataatttctgttcttttacatttgctgaggagagctttacttccaactatgtggtcaattttggaataggtgtggtgtggtgctgaaaaaaatgtatattctgttgatttggggtggagagttctgtagatgtctattaggtccgcttggtgcagagctgaattcaattcctgggtatccttgttgactttctgtctcgttgatctgtcggttgttcctttccatgcttagcgcttccttcaggagctcttttagggcaggcctggtggtgacaaaatctctcagcatttgcttgtctgtaaagtattttatttctccttcacttatgaagcttagtttggctggatatgaaattctgggttgaaaattcttttctttaagaatgttgaatattggcccccactctcttctagcttgtagggtttctgccgagagatccgctgttagtctgatgggcttccctttgagggtaacccgacctttctctctggctgcccttaacattttttccttcatttcaactttggtgaatctgacaattatgtgtcttggagttgctcttctcgaggagtatctttgtggcgttctctgtatttcctgaatctgaacgttggcctgccttgctagattggggaagttctcctggataatatcctgtagagtgttttccaacttggttccattctccgcatcactttcaggtacaccaatcagacgtagatttggtcttttcacatagtcccatattt

SEQ ID NO: 151577 - DNA, 450 bp, Homo sapiens
  misc_feature (1)...(450): n = a,t,c or g
ccggccggaattccgnnnaacccacgcgtccgcccacgcgtccggagctgaagtatcaggctctggctctagctttagctctggcactggaactgcgtcggagtctgggtctgagtctggcagcccgaagcctggacaccttttcttgattctctaagcgggggctgcctgcgtccaagcagctggtttgcagcgttccaacgctgggagggagttcccttacctggggtccagtctgtaaagttgtcgccgctttctagggaccccgccccaccggctgggactcttccatgcgtggcactggaagcagactggttcctggacatgcccggtggaaggaggggccctagtcggcaacagctaagccgttcagctttaccttctttgcagactttggttgggggaggctgggggaaaggaacaggcttgagaaacaggaaagggagggct

SEQ ID NO: 151578 - DNA, 885 bp, Homo sapiens
tttcgtggaggctagggatgggtgctgaagtatcaggctctggctctagctttagctctggcactggaactgcgtcggagtctgggtctgagtccggcagcccgaagcctggacaccttttcttgattctctaggcgggggctgcctgcgtccaagcagctggtttgcagcgttccaacgctgggagggagttcccttacctggggtccagtctgtaaagttgtcgccgctttctagggaccccgccccaccggctggggctcttccatgcagttgaaactggttgacaaccattaacctggggttgcaactacaggtggcactggaagcagactggttcctggacatgcccggtggaaggaggggccctagtcggcaacagctaagccgttcagctttaccttctttgcaaactttggttggtggaggctgtggcaatggaacaggcttgagaaacaggaatggtagtgctattggccttccagtcccacctatcacagccttaatcaccccaggtcctgttcgtcattgccaaattcctgacttgcctgtggatgggagcctactctttgaattcctttttttcatctacctgttggctgctcttttcattcagtacatcaacatttataaaacagcgtgggggtatccttacaatcatcctgcttcttgcacatcactgaattttcatctcactgattatgatctggcagcattcatcacaaagatgcttgcgaagaggcttgtatgggctctcatctcacaggctactaaggcaggtgcagcatcaatgattcactacatggatctgacatcagcccgcttgggactactcactctatgtggatgggtactttgttggaccctcgtcaatctctttcgaac

SEQ ID NO: 151579 - DNA, 378 bp, Homo sapiens
ctgcggcctcccccttgaggcccctcgctgccctacgttccgaacccccctgcccgccttgtcccgccaccgtcgccgtcgtcttacggaggccgtttccaccgaggaaaaggaatcggatcgtatgtccgctatccagaacctccactctttcgacccctttgctgatgcaagagagggcgatgacctgcttcctgctgggcctgaggattatttgcatataaaaatccaacacagaatcggcgggaagacccttactactggccaagggatcgctgatgatcacgataaaaagaaacttgtggtggcgtcaaagaaaaggtccggctgcgatggtactgtaactggccctccggattatggagaagttattgaggt

SEQ ID NO: 151580 - DNA, 518 bp, Homo sapiens
cggaagcgcgcccgggctcctgcaggcggggcgctgtgcgcgccgcgatccggtacgtgggcctccgggctgtcccctctgggggcggcgatcctccctccggagccccccttcaaccctcccggaagtgagcatttgcaggaccagggatgctgtgctgctctcccatgagccagtcaccgagtcgggctgctgcagccctttctgaacctctggccgtctggatgctccactgtgcttgccaagatgaagagcgtcttggtggccactgagggcgcagaggtcctcttctactggacagatcaggagtttgaagagagtctccggctgaagttcgggcagtcagagaatgaggaagaagaggttggcctcttgatgctctgagctcggtgaccccacccccacaccccaccagtcctctctggactaaatgagggcaagaagaagtcgaattttatcacgtaacagaagaacttggagccatcagtttctgtaacctaaaaagtttaacaaggctg

SEQ ID NO: 151581 - DNA, 528 bp, Homo sapiens
tttcgtggctcttgcaggcggggcgctgtgcgcgccgcgatccggtacgtgggcctccgggctgtcccctctgggggcggcgatcctccctccggagccccccttcaaccctcccggaagtgagcatttgcaggaccagggatgctgtgctgctctcccatgagccagtcaccgagtcggtctgctgcagccctttctgaacctctggccgtctggatgctccactgtgcttgccaagatgaagtgcgtcttggtggccactgagggcgcagaggtcctcttctactggacagatcaggagtttgaagagagtctccggctgaagttcgggcagtcagagaatgaggaagaagagctccctgccctggaggaccagctcagcaccctcctagccccggtcatcatcttctccatgacgatgctggagaagctctcggacacctacacctgcttctccacggaaaatggcaacttcctgtatgtccttcacctgtttggagaatgcctgttcattgccatcaatggtga

SEQ ID NO: 151582 - DNA, 1125 bp, Homo sapiens
atggtgctgttgacactcgatggtgattacactcatgcagacaggaaccttgagtggtgggggctgaaggtgctgagcgcaacgccccaggcagacaagaagaaacttgcaagtgcagataatcagccagagactgtttctctgctcctcgctaaaaatgctttgtttccctgccgctcggttggagtctccacgaccgagctggtctcggcacaaatccatgcaggcccaggtcctgaagtcagccttgtggagcctgtgggcgccatgtggaccatggttctcagggcagtgctaaagcagtcacaggtggaggctccctccagggcactaaaactcccatccctggagtgtgcagccagtcttgggcagctccacaccccagctgacctcacttactattgccaggaaaaagtcctgtttgtggacttcttgctgcaaggggggattggctttaagacaacgggttcctggctgatctccaataaggaacaccataaaacattttttaaagcccaacaagccctggaggaagagggaatatctgctttccagtttctgcattataaggttcagagtccagtcaacaacaaaaacaacaaagaaggcataaaaaaggggaaagaacacagctcctcgccagcaacagaacaaagctggacagagaatgactttgatgagttgagagaagaaggcttcagacgatcggtaataacaaacttctctgagctaaaggaggatgttcgagcccattgcaaagaagctaaaaactttgaaagaagattggacgaatggctaactagaataaacagcaaagagaagaccttaaatgatctgatggagctgaaaaccatggcacgagaactatgtgatgcatgcacaagcttcagtagccaattcgatcaagtggaagaaagggtatcagtgattgaagatcaaatgattgaaatgaagcaagaagagaagtttagggaaaaaagagtaaaaacaaatgaacaaagcctccaagaaatacgggactatgtgaaaagaccaaatctacgtctgattggtgtacctagttcaaccattgtggaagatagtgtggcaattcctcaaggatctggaactagaaataccatttga

SEQ ID NO: 151583 - DNA, 561 bp, Homo sapiens
atgccagggaactcagaggcaaaaagctattacaatgcaaagacagttttggaatcatgcacactactatgggagcagttcaagaaagtaactaagccctactggagtcagggaaagcttctcagagaagcccttgaaagtgatgacacctgcctgtggttgtgtagtattttgccggatgaagagcaagaagaaaaacattcctttgcagaggtgtcagtaagtcctattggcctgtccctaacccaaccaccactactatatttactgctgaaaccctggcacaactatcatcttctcacccagattactgcaaagcacaacagaaacacagctcctccagcaacggaacaaagtgggacagagaatgactttgacgagttgagagaagaaggcttcagacgattggtaataacaaacttctccaagctaaagggggaagttcgaacccatctcaaagaagctaaaaaccttgaagaaagattagacgaatggctaactagaataaacagcgtacagaagaccttaaatgaccagatggagctgaaaaccatggcatga

SEQ ID NO: 151584 - DNA, 498 bp, Homo sapiens; identical to SEQ ID NO: 151169

SEQ ID NO: 151585 - DNA, 579 bp, Homo sapiens
cgtcgactttggatcctgtttcatggacttgtaaattaaaaacagaatgattacgcagctcctcaccagcaacggaacaaagctggacggagaatgactttgacaagttgagagaagaaggcttcagatgatcaaactactccgagctacaggaggaaattcaaaccaaaggcaaagaagttgaaaactttgaaaaaaatttagaagaatgtataactagaataaccaatacagagaagtgcttaaaggacctgatggagctgaaagccaaggctcgagaactacatgaagaatgcagaagcctcaggagccgatgcgatcaactggaagaaagggtatcagtgatggaagatgaaatgaatgaaatgaagcgagaagggaagtttagagaaaaaagaataaaaagaaacgaacaaagcctccaagaaatatgggactatgtgaaaagaccaaatctacatctgattggtgtacctgaaagtgacggggagaatggaaccaaattggaaaacactctgcaggatattatccaggagaacttccccaatctagcaaggcaggccaacattcagattcagg

SEQ ID NO: 151586 - DNA, 456 bp, Homo sapiens
gtaaaatccaggttattttgttctgctcacgagttgagcctgtaagcctttctgtttgcctttctgcagaaagctgtttgtgagaaccctgtcttgagtacatgactggactgcacatgcagcaggcctgggcccttcaactccaactacatctggaggaggggtcccagtgtgaaggggttggataatagtcatagtggttctgtacaatcagaataaatcctggctcctgaagagaagaggggcaggcagcagggctcacactgtgcgtgctgggtgttgtgattctgccatctgtcctcaacttcttggggaggggctgatggaacttgtagagaaggtggacctttagggggcttcatggggccttctcaccagtgagaatccagccctgtcccagaagcagcctcaagcttccgcacttttaagtccagtgctgtctcccaaagccccctt

SEQ ID NO: 151587 - DNA, 1758 bp, Homo sapiens
atggacgatatcccgcaagaggcccggcagtaccggcataaccaagcctatgcctacagcatccagggtgacggtgccgaggatgacgatgagcgcattgttagatttcatacacgggtcaccgtcgacagcgacacacttgcatcggatgcagcccggttaacgtgccggcacggcctgggtaaccaggatcgcagctcctcgccagcaatggaacaaagctggacggagaatgactttgatgagttgacagaagtaggcttcagaaggtcggtaataacaaacttctccgagctaaaggaggatgttcgaacccatcgcaaggaagaccacagtgcaatcaaattagaactcaggattaagaaactcattcaaaacctcacaactacatggaaactgaacaacctgctcctgaatgactaccgggtaaataatgaaatgaaggcagaaataaagatgttctttgaaaccaatgagaacaaagacacaacatatcagaatctctgcgacacatttaaagcagtgtgtagagggaaatttatagcactaaatgctcacaagagaaagcaggaaagatctaaaatcgacaccctaacatcacaattaaaagaactagagaagcaagagcaaacacattcaaaagcttgcagaaggcaagaaataactaagatccaagcagaactgaaggaaatagagacacaaaaaacccttcaaaaaatcaatgaatccaggagctggttttttgaaaagatcaacaaaattgacagaccactagcaagactaatcaagaagaagagagagaagaatcaaatagatgcaataaaaaatgataaagggtatatcaccaccaatcccacagaaatacaaactaccatcagagaatactataaacacctctacgcaaataaactagaaaatctagaagaaatggataaatttctggacacatacacactcccaaggctaaaccaggaagaagtggaatccctgaatagaccaataacaggctttgaaattgaggcaataattaatagcctaccaaccgaaaaacgtccggtaccagacggattcacagccaaattctaccacagttctgcagactgtacaagaagcatggcaccagcacctgcttctggtgaggccctcaggctgcttcctctcatgggagaaggtgaaggagagctgacgtgcagagatcacattgcaagagaggaagcacaagaatgcagctcctcgccagcaacggaacaaagctggatggagaatgactttgaggagttgggagaagaaggcttcagacgatcggtaataacaaacttctctgagctaaaggaggatgttcaaacccatttcaaagaagctaaaaaccttgaaaaaagattagacgaatggctaactagaataaacagcgtagagaagaccttaaatgacctgatgtagctgaaaaccgtggcatgagaactacgtgacacatacacaagcttcaatagccgattcgatcaagtggaagaaagggtatcagtgattgaagatcaaatgaatgaaatggagcgagaagagaagtttagagaaaaaagagtataaagaaatgaacaaagcctcaagaaatatggaactatgtgaaaagaccaaatcttcatctgattggtgtatctgaaattgacagggagaatggaaccaagttggaaaacactcttcaggatattttccaggagaacttcacctacctagcaaggcaggccaacattcaaattcagg

SEQ ID NO: 151588 - DNA, 324 bp, Homo sapiens
  misc_feature (1)...(324): n = a,t,c or g
nnnnnnnnnnnnnnnnnnnnnnnnnnnnnnnnnnnnnnnnnnnnnnnnnnnnnnnnnnnnnnnnnnnnnnnnnnnnnnnnnnnnnnnnnnnnnnnnnnnnnnnnnnnnnnnnnnnnnnnnnnnnnnnnnnnactctnggcctatactatacgggctgctacggaatttcaaggatgcccgatctttcccgggcaccttggaaggatagcttctacttactgccggtgcccatggtggagccaggaataccacccatttccgggtttcgaggacccaaagggcagatgggagaacctctcttacccggttatactggaaaaaaag

SEQ ID NO: 151589 - DNA, 528 bp, Homo sapiens
atgaagaccattctcagcaatcagactgttgacattccagaaaatgtcaacgttactctgaagggacgcacagttatcataaagggccccagaggaaccctgcggaaggacttcaatcacatcaacgtagaactcagactccttggaaagaaaaaaaagaggctccgggttgacaaatggtggggtaacagaaaggaactggctaccgttcggactatttgtagtcataatgggtctcttgttgaaatccgaaatttcttgggtgaaaaatacatccgcagggttcagatgagaccaggtgttgcctgttcagtacctcaagcccagaaagatgaattaatccttgaaggaaatgacactgagcttgtttcaaattcagcagctttgattcagcaacccacaacagttaaaaacaaggatatcaggaaatttttggatggtatctatgtctctgaaaaaggaactgttcagcaggttgatgaatcagatctaagagttatccagctacagaaagaagatgccagatga

SEQ ID NO: 151590 - DNA, 1142 bp, Homo sapiens
ggaaaggctgcggcgcggctcccactctcggaaccttgtcctgtttgtcccccagctcggcaagcgccatatgagcctggcggcgccagatgcgaatcctgttgtgggctttttggcctattcccgcccctcagtcttgccgggatggcaccgcccgcataggacttccagggttgggctgagtgggagttcgactgctgggcctcgtaattctcgctttggggctgctccttccaggctgggacacactggggcccgctgtcggtctcccgtcctccgacatcttgtctggaacttccgcctggcagtctccagtaggagtggagctctgtgcggcgtagtttggtggaaaaacgggccttgcgtcggcctcacccccagtgtttgtgtttcagaatgaagactattctcaagcaatcagacctgtcgaccattcccagaaaaatgtcgacattactctgaagggacgcacagttatcgtgaagggcccccagaaggaaccctgcggagggacttcaatcacatccaatgtagaactcagccttctttggaaagaaaaaaaaagaggcttccgggttgacaaaatggtggggtaacagaaaggaacttggctaccggtcgggactaatttgtaagtcatgtacagaacatgatcaaggggtgttacactggggcttccggttacaagatgaaggtcctgtggtatgctcacttccccattcaacgtttgttattccagggagaattgggtccttctttgttgaaatcccgaaattttcttggggggtggaaaaatacatcccgcagggtttccggatgaggaccaggttgtttgcttgtttcagtatctcaaggccccagaaaagatgaaattaatcccttgaagggaaaatgacattgagcttgtttccaaatttcagcgggctttgattcagcaaagccacaacagttaaaaacaaagggtatcaggaaattttttggatgggtatcaatgtctctggaaaaaggaactgttcaaccaggcttgattgaataagatctaagaagttacctggctacagaaagaagatgccagatgacacttaagacctacttgtgatatttaaatgatgcaataaaagacctattgatttggaaaaaaa

SEQ ID NO: 151591 - DNA, 338 bp, Homo sapiens
  misc_feature (1)...(338): n = a,t,c or g
gcggcggcggcgaggaggggaatttccttgtgcctccattcccgggaggggggagcggcgttggaggccaccgtttcnnnnnnnnnnnnnnnnnnnnnnnnnnnnnnnnnnnnnnnnnnnnnnnnnnnnnnnnnnnnnnnnnnnnnnnnnnnnnnnnnnnnnnnnnnnnnnnnnnnnnnnnnnnnnnnnnnnnnnnnnnnttatatcctgtgttgtgacctcatggtttaagtgggaataaagatgagtataagcagtgatgaggtcaacttcttggtatatagatacttgcaagagtcaggattttctcattcagcatttacctttggtatagaaag

SEQ ID NO: 151592 - DNA, 792 bp, Homo sapiens; identical to SEQ ID NO: 126056

SEQ ID NO: 151593 - DNA, 413 bp, Homo sapiens
cagctctcacataagtcggattcagtggttttggtatcacagtctagacaaaggacatgtaggcgtaaatatccaaattatggtagaagaaatcgtagctggcgtgagttatcttctggaaatgagtcttcaagctctgtaagacatgagacttcctgtgatcagagtgaaggttctggttcttcagaagaggatgaatggagaagtgacagaaaaagtgagagttacagcgaaagttcaagtgactcttcatctagatattccgattggacagctgatgcgggcatcaatttgcagcctcctttaagaacatcatgtcgtcgacgaattactcgattttgtagtagttcagaagatgaaatatctactgagaatttatctcctccaaaaagaagacgaaagagaaaaaaaaa

SEQ ID NO: 151594 - DNA, 3705 bp, Homo sapiens
gctttccatgtcagaagagatcattctccaccctgttgtcctatctctagccttaggagggccactacagtgcatttcttccagggctgccctggctttagtgtttgggccctatgcagttggtgaaggcctatgggaaaaaattgtggtcttgtccaataagcatgtggctcctgatcatcttttgcaaatctgccagcgcatcggtcctatgttggataaagaaattccacccagtatttcaagagtcacttctttacttggtgcaggaaggcagtctttgctacgtacagcaaaagactgcaggcacacagtttggaagggctctgcctttgctgctcttcatagaggaagacctcctgaaatgccagtgaattatggttccccaccaaatcttgtggagatacatcgaggaaaacaactcacagggtgttccacttttagtacagcatttccaggaactatgtatcagcatataaaaatgcacagaaggattctcggacatctatctgctgtttactgtgtagcatttgataggacaggacatagaatctttacaggttcagatgactgtttggtaaagatttggtcaacacataatggccgcttgttatctacattaagaggtcattctgcagaaatttcagatatggcagtaaactatgagaatacaatgattgctgcggggagctgtgataaaattattagagtgtggtgcttgagaacttgtgccccagttgctgtgctccaaggacacacaggatcaattacatctttacagtttagcccgatggccaaaggctctcaaagatacatggtttccactggtgctgatgggacagtttgcttttggcaatgggatttagaatccttaaaatttaggttcctaagtggtagcagagatggaacagcacggatttggagatttgagcagttagaatggaggagcattttattggatatggctaccagaatctcaggtcggattcagtggttttggtatcacagtctagacaaaggacatgtaggcgtaaatatccaaattatggtagaagaaatcgtagctggcgagacttcctgtgatcagagtgaaggttctggttcttcagaagaggatgaatggagaagtgacagaaaaagtgagagttacagcgaaagttcaagtgactcttcatctagatattccgattggacagctgatgcgggcatcaatttgcagcctcctttaagaacatcatgtcgtcgacgaattactcgattttgtagtagttcagaagatgaaatatctactgagaatttatctcctccaaaaagaagacgaaagagaaagaaagaaaataagcctaagaaggagatctggcaggaccggagacaactgggaattgccacagtggtttgggatgtggccatggttctctccacacatctggagatgggagctgtggagctcttgggctgccccgcagtgaaactgggtgctggcatagggctgatgggcatagtggctgccctgctgggtgctcatgtgactgtcatagatcgaaaaaatttgcggaggatgactccagcagagcttgcaaatatggagcatttatatgaatttcaccctccagtttggattactgacaccacacttagaaaatctccttttgttcctcaaatgggtgatgaggtaatatattttcgacagggtcatgaagcttatattgaggctgtaagaagaaataatatttatgaactgaaccctaataaggagccatggagaaaaatggatcttaggctcaagaaagaattccacattttagcaagtggcaaagatgttggtttgttaacagttattcagattgctggtggggatcaagaattggttaaaatagttggaatacgatatgaagttgggccccctacactctgttgcctaaaactagcatttatagatccagcaactggaaaacttatggacaaatctttctctattagatatcatgatatgccagatgttattgactttcttgtattgcgtcaattttatgatgaagcaagacagaggaattggcagtcttgtgacagattccgctctattattgatgatgcttggtggtttggaacagtgttaagtcaagagccatatcaaccacagtatcctgatagtcatttccagtgttatattgttaggtgggataatactgaaattgaaaaacttagcccatgggacatggaaccaattcctgataatgttgatccacctgaagaattaggagctagtatttctgtcacaacagatgagctagagaaattgctctataaaccacaagctggtgaatggggtcagaaatcaagagatgaagaatgtgatagaattatcagtggtatagatcaacttttgaatcttgatatagcagcagcttttgcaggccctgttgatttgtgtacatacccgaagtactgtactgtagtagcttatccaaccgatctttacacaattcgaatgagacttgttaatcgattttacaggttagtagaaacctgctttcaaaatgtttaaaaagctatatttggcaatattgactagggtaaacaaagaaagagatagtggtagaattgggggctgattagcattttctgtttcattattctctttcattgtcagatggtgttagatgcctatgggtaggtgtgggtagggccaggcagaagattgactaccatatttcaccctcgtttttttttcagtgattatttccatatcactgaaattttacttttattccacttatttcagtaaactttcactggtactttagtaatgagaatttttctatcctcatacatgattgaagacataatttgttttaaaattaatagccataattgaagaaacagttgtttgtttttctaatcaggtaaccaaggtgcagaatcttaaggcctcagtaaatgttgtgttttattatttgaacaataagaccttctattttaattattcttgggaaatagtggttttgtttctccagtggttttcatttgccaaactcatgacagatggtttaacaggggggctactgctcccagggaactgtcagataaatcctcatttccagtgcagcagctgttggcagtctttcatcaaaagtccatccatctggagttacctattgtgattggccaagtagttttgctttggctaccagggcttcgttctgttgaatatgataatccggaaatcgcttggatattctttgtgtcatttaaaaataatttttgtgggaggccaggcgcattggcttatgcctgtaatcccagcacttcatgaggcccaggcgggtagatcacctgaggtcaggagtttgagaccagcctggccaacatggtgaaaccctgtctctactaaaaaatacaaaaattagctgggcatggtggcgtgcacctgtaatcctagctactcaggagattgaagcagaagaattgcttgagcccagcagtcagaggttgtggtgagccgagatcaggccactgcactctaatgtgggtgtcagagggagactccgtctcaggaaaagaaaaaaaagacacacccaccagtgttctgtgtcagtttaccatcgccatggcaacactcccacccctttccatggcaatgactcagtgacccagaagtgactactccttccccagaaatttctgcataaactgccccttaatctg

SEQ ID NO: 151595 - DNA, 4791 bp, Homo sapiens
agggcttgaaaggactttattgtggctgtggtgaagcaggccctggtcttggcagatgataccagaagggcactgagtgccagcgtgcaacttgaatttgatcccataaagtcaggcatcaggaagccattcagaatttttcaccctgtcagatgctcagatttgctagagaactctggtagtggcaagaaccagagctgttactcagaattgggacagaggcattgtcccaaaaaaaaaaaagcccaaatcagagcagtggcaatgtaagtgcagggaggacatgatgtgggattatttagaaaacaggccaaatgacatgcaactactctgcggatacagacgaagcaggaatcagggacccaataagtctcaggtgctttcaagtaagagcatgtaggtggaaaggggcaggactctgggttccattctaagtaactgagactgaagcaacagtggaacctccagatacagataacccctgacagactgaaatacgatctggcgacagcaaggaggtggcagcttgagagaggtctacaacccacctaatggtttagagccacctgactaccaggcctgtgtgtggacgggaaagtcctgaggattggactctggaaaaccatcacacttaagagacagaggaaaaagagcagtcacggaggtaggtcacgaaatgggtcaacaggacccccgaagagttcaagatactggaaagcactggccatgagtgccagatctccagcacacacatcatgaatttgcttctccccagaggaaaagaagctccttcagggtggtgcctggctcagggtagctggtcaacaactagcttttaaaaaaacagagacacggtctcactatgtagcccaggctggacttgaaatcctgggctcaagcggtcatcccactcagcctcccaaaatgctgggactacaggcgtgagccactgtgcacagccaataactacttgttaagtgaatgaagaggtaggagctgggctctaagtggccactggacttgctgattagaagggagtgatgccataaaccacagccactttcaggacagcagcctgcctcctctcctcctacccctatcctgtccaacacctaagcatagtagtaccactgggagtctgtctcctcaaaagcaagaatgttcaggtacacatgtgtgagttcacctcctaactataggggagaaagcctgtctttatgtataagtctcattcacccattttgaccaaaacccttcagagggagatgctgtcattatgatgggtacctcttcaagactacgcaacagtaacagagcctataaaagctacacagaggccgggtgcggtggctcacgcctgtaatcccagcactctgggaggccaaggcaggcggatcacctgaggtcaggagttcgagaccagcctggccaacatggtgaaatcctgtctctactaaaaatacaaaaattagctgggcgtgctggctcacgcctgtagtcccagctactcgagaggctgagattataccaccgcactccagcctgagtgacagagtgagatatggcctcaaaaaacaaaaaaaagccacacagaatacaagcaagaaagtacttttagattaaaattcgtcttatgtgaattatggcaaatgaaatcaccccactgtttacctgttttatgagtttttacatttgcttaaaattagcatacttgatcttttacagttcccatctccaccaattagtattggcagatttccactatatgtagaagtcaaaagatcagactgtaaaaatatcagatattgtaattaagagctccaaacaagtcttgcagtttcaaaggtagaaacccacccagccagttcagctgcttggacttcaaagccctccgcctagccatctcagccaggctcaggttccttctcccacccatcaggccaagcaggacttgtcaaacatacacattcaagttcctagcacacagtaggtgctaagtgggaattgattataaacttgaattcttccatcaacaaatatccacctctcctgtccagcttgcctcagatcttcaggttctctcttctctgaggcagctaagcttctacatccttcatgaagtttcctttacttctcgacagaagacagttccctttaggcctatcatctctaaatgcaactggctttccattttccacttactcaacactccacaaagtacacttgctacatggtatttattcaatgactgtatatttagtcaccacctcaatcactgctaagctctcttcatgtctatctgtaccagtttcccatcttagactgtgacgtcagctggcaagggctggctgttggccgattcatcatgactgacatggtgtgtcacaaagagctccaagtaaatgctgtgaaggaagaggatgaggatggagatgaggatcctgagaagggcccagactggctgcccaacccatggacctgaggcctgagtaaggcctgggagctgctttcccctctgcccaggaactctgtccaggggcgattctaaggcacagtggtgaaggacatgattggtcccccaagtgtggtcctcaggtctcatggcagccactcgcctgggaacagtgcaacaagcattccatttagaagatcttccagaacacacacaagaagcattgtctaatgaaaatggagacaaggtctttcttggaagagagtgcccaagtagatactctctgccccaagactaaccaggtcccttttaaggtccctgagaacagcagcctgggagcaaccaagcctttcaaaggctgacaaggcacagagtggatgaatggaacgaacgatacatgaaaaaaacactttggctgataaaacctccaacctgaggcagggacagtgtcgctcgctgacatgcagaaacatgactgtagcagagatgatgatgatgagaaatgcttcgcatttcccacactgccgatatcccaagccctgtgctaccaccctctccccgaacacacacacacacacacacacacacacacacacacacacacacacacacacacacacacacacacagagcatctgcagaataagtcagaggttgacacccagagcctgacgtcaggataggactcttggcactccgcactgaaacaccgtgattagtcctgactagacagcaaaagtaacgccagcctaagcttgaaatgaagggtccatcttgtgaaaagttaggctgcgcccaagacagccaggtctgggaagtctttcacttctcctacttcgctgaaaggctgtccaccttggttgaatgtcagcttgtaccgtaagcggataggttctttgtgtggattgtcaagcagcagcatctgagatatcacagctggaggcatcaaaggactgaatgcaggaagcttggagctggatgccggctgcagcttcactctcattgactttggcacagccacttgaaacatgatatcccagacaggctggggagccgtgctcatcatggtcaagagcagcacctgtacctctgggtgcccaggggctcccgtctgggagaagtggagcagaattctgaatccattccggtcatacacaatgagaggcggcaggctgctgggcttaacagactccaaagggacaaacacttgagccagaggtgtattctgtgaagatggggaaggagccaacgggccagcctcccaggaccaacctggagaggacttagtacctggtggcacttccttggggacacttttctgcgaaacataattcagagggcacggagctggctgtgctgagaggaggtccagcaaattcctgtctgcagaagggttctgaacaccaccgcctggcagcgtgctggaggagggattcctcttttcctcacagcaattctgaccagaaaccatgcctgtaacaggagcatcactgattcccaaggctgccaggtcctgatgaagcaaagatggcaccacagtccccatctgcgcaggtccattgtccacctccaagtcaatcagggggcaggtcttcatgcagcctgctggattctgaaagactctggagacagggatgtctcccaatgagctggtcactctgtttccaaaggtgacccggccctccatcacctgtttgtacagcagaactccttgggtgaggaggtcatttgcctggagaatttccgcgagtgcatcatcgtcatcagtggtgtcactcgccaaccggaacagcgtgggccgcagcttttcacacctctcatacacgacctgcagggcctcctggtcgggcggggcctgccctggcctgcggtacatgctcagcatctcctgcagcaccttcacatggcttcgcacttcctccaccgcactgaccctcttggacaccttctccgatttttcttgttcctccttgaccaaattcttgattaaccggtttgcagcctgaaggtcctcggggtggttgctctttagaagccttgtcagaagcttggacttttcttcatcagcatcaaagatggagctcttgggccagggagatggtgggggtaagattttatccactggtagtttagggtcttgttttataattccttgtttcttcagcatctgataagcgtctcgaatcttgatgtcttccggaaaccagactgtccaactgaagagtatttcaatgactcttcctttaacttttcctgtggcccaggaccccaggtactttggggacaacactttgatcagttcgttcaggaaacgaaatttggccacctcgctgtggaac

SEQ ID NO: 151596 - DNA, 345 bp, Homo sapiens
ttttaacacaggagttaccgggcgcggaggctcacgcctgtaatcccagcactttgggaggccaaggcgggcagatcatgaggtcaggagctcgagatcagcctggccaacacagtggaaccccctctctactaaaaatacaaaaaattagccgggcgtggtggcacgcacctgtagtcccaactactcaggaggctgaggcaggagaatcgcttgaacctgggaagtggaggttgcagtgaactgagattacgccattgcactccagcctgggtgacagactccgtctccaaaaaaaacgaattagaaaaagaaagttatctgatattttctagtttgacttaa

SEQ ID NO: 151597 - DNA, 336 bp, Homo sapiens; identical to SEQ ID NO: 150833

SEQ ID NO: 151598 - DNA, 1624 bp, Homo sapiens; identical to SEQ ID NO: 151297

SEQ ID NO: 151599 - DNA, 730 bp, Homo sapiens
ctgggcctcagatattgaagagtatagttagggcccagaaagaaaagggcttcttaagtggccccaggttgtgtggtttccaaacccgaaagcatagaggtcagaaggtgccttgcaggcagttttaacagttccaagtgtcccgaactgacttgttcaaattgcaacgtcatgacttgtggcgttattaaaacttcctgtattcctggttggctggatataatcttgaacaaaaggcatgcacttaaacaggaaaggtgaaaggcggaatgcaggttttcagctaaggagcttcccttttaaagaattgatgaagtgtcattattgggggtgggtgtgaaaggtgttagctaggaaaattaactttgcacttgcattgatattaagaaattattttcggacgggcgcggtggctcacgcctgtaatcccagcactttgggaggccgaggcgggcggatcacctgaggtcaggagttcgagactggcctggccaacatggtgaggccttgtctctgctaaaaatacaaaagttggctgagtgtggtggcgtgtgcctgtggtctcagctactcaggaggttgaggcaggggaatcgcttgaacctgggggacagaggttgcagtgagccaagatcgtaccgctgcactccagcctgggtgacagagcaggactctgtctcaggaaaaagaaaagaaaaaggaatgaaaagaaaaaaaaaaaaaaaaaaaa

SEQ ID NO: 151600 - DNA, 8008 bp, Homo sapiens
  misc_feature (1)...(8008): n = a,t,c or g
tttttttttttttttttttgacacacacagggatttcattaatacaactgtcttgaaatggcaaaattttacaaatagaaaacagtctcctgggttgcagggatataagcaggagtgagagctgaaagaggtgggtttggctgtaaaagtgctccttggggaggccgggcgcagtggctcacgcctgtaatcccagcactttgggaggccgaggcgggcggatcacccgaggtcaggagttcgagaccagcctggccaacatggtgaaaccccgtctttactaaaaatacaaaaaatttaggtgggcgtggtggtatacgcctgtaatcccagcactttggggaggccgaggcaggagaattgcttgaacctggagaaggaggttgcagtgagccgagtttctgccactgcactccagcctggggaaagagtgtgaccgtctcaaaaaaaaaaaattatatatatataaatatgtgtgtgtatatatgtatattatatatgtatgtattatatgtatgtatattatatatatatagtacacaaggttataagtggtgcacccgaagaggagggcacttaccatgaatggagcttgctgagctggaagttgccctggttgagtcggtgactgaatgtgaaggcctcagacattacactactggagactttataatctgtacacctaggctacactaaatttataaaaatatatttttcttcagaataaatcaaccttagcttactgtaactttataaactttttacttcgactgttgtaataatacttagcttaaaacaaacacattatttagctgtacgtaaatattttctctgcttatctccttatttataagttttctattttaaaattttttaatttttttcttaaaaaatttttttttgttaactaagacacaaacacagcacacacagtagccttgacctacacagggtcaggatcatcaagacatcactaggagataggaatttttcagctctgttataatcttatgggggccaccatcacatacgcagtctgtacttgcaaaacattatgtggcatgtgactgtaattgtagacctaaaatccatttcctacctgccctaatttcggtctttattttaaacccttgtttcatttattcttggggaaaattcccaaatcctgtgtttgtttttttagtaattattttgccaaagaaacataagaagaaaaaggagcggaagtcattgccagaagaagatgtagccgtgagtagtaatgtgtttgacttcactttgactaaaaagaaagtttacttaaataacaaactaaaggaaagaagtgtttttaaaggtttccaaggaatgggccagcattggtagtcattgtgtagattcgaaaaagcactgaaatgacacagccccagacagtccaagtgtccttcaggcatagcttactaaatggtgctggccttaccaactgctgtctctgaatttgtcttccttatgccacccacagacccgccatccccctttctctttaaatgtttggacccatcttagtgacatttcacttcccctctgtactcctggttcatttcttctctctctttcccttggaggtcccagtgaaaaggcataggaagccttgttttctgtttaaaaggcatacatttccatggcagtaatggaattgttcaaaatcgggtgggaagtttaataggttatatttctgtcctgtcgaaggaaatacaacacgctgaagaatttcttatcaaacctgaatccaaagttgctaagttggacacgtctcagtggccccttttgctaaaggtatgtggttaaaatcgtgcatcagatgaatgcctgcttttacgttatttccaagtgttaaacaattgattgagaatgcttactgctggcatccttgactttgggaagtgcccactgatacagtttaaagcaggattccttaaggtatctgaaatgagaaccaagtttttaaaaaattggcagtgcactcaacactgttgtagaacacatgtccccacaatgttaaattgctgagtttgtcaacagttctcagtttttgtacttagtccatcttgcagacctatgccagtttgtgggccacatagtggtactgactctttttttacatgtgctcacgacatggtattttgttttgtgttgtgtcgttgctttgtagaattttgataagctgaatgtaaggacaacacactatacacctcttgcatgtggttaaaatcctctgaagagagagattggggactatatcaggtaagtgttgggaggaggcactgtgcaaacttactttcttttgaaaatgctttcacatcagctattcaggaaggcagtggcatgccagaatagctttgtcttgaatatataacctgtacccgcagtgaattatttttctttttaacttttcagatttgttgtttcactggagcattaagagtgggtgatacattaattttttttttttccattccaggacaggtttcattaatcttgacaagccctctaacccctcttcccatgaggtggtagcctggattcgacggatacttcgggtggagaagacagggcacagtggtactctggatcccaaggtgactggttgtttaatcgtgtgcatagaacgagccactcgcttggtgaagtcacaacagagtgcaggtatgtgggagagggagggaaggactggctagagtgaaaagctttctgtatttcccttctatgttttgtctgctggaaactatttcttcattaagaaaaaaaaaaatcctaaagcaaggatattgttttggtttctgtgtacgttctgtcccctgccagatcttggtggtccgcgctttttggaattccacatactaagcatgtattcatcaagctgactggatccatttgtccgggttcagctctcagcttgtcactccaggcttctcactctgtgctaccgcttctgcctaaagtatccttcgttcatttttatctgagaaaagcctgcttatcttgcaaggctttttccacgcagcttctacactgagtactcccaactgtccctgttagtacattgaattcccagtgagaaagtgtcttcattctttcccacatcatcaccatgaaatctctcttaatgcaaattttatagaaacacaaggtcaaactgccgcttttcctgctgtgcaaaatgggagtgactgagcatataagaaatatggaaaacagaaaactcagtggccacacctgactactcttttgtcatttttcaggcaaagagtatgtggggattgtccggctgcacaatgctattgaaggggggacccagctttctagggtaagtctgcaattgtagggaggacaccctttgttgacttggatctctgagcccctaaacatctggagatgggttagctgtcctgactgactccttttgtccccttttcagtcggctgctgcagccagcctggaccagtgactgcacatgtacattctgatgaggtgtttgttttcatttgtgtttgttcttaggccctagaaactctgacaggtgccttattccagcgacccccacttattgctgcagtaaagaggcagctccgagtgaggaccatctacgagagcaaaatgattgaatacgatcctgaaagaagattaggtgagtcattaggcctgtgagtgggtatgaacacattcttcaggattctgttctcttattaaaagtagatgcccttgaagttgaagactttctaaaacctgccctacagctgggatattgtctgtgggcgatagtttttgttatcttttgttgaaaaagtgaacagtgcctagtaaagtgagatggcttttacaccttttatgatgactgcttctgctggagttgaaatgttttcattctgcatttgtgtagttcggtgctttgttcaaaggtaagtgttttcaccaaagtatgttttgcatgtgttttttatttgctgcaattttgactgcttagaagtttctgttgtcagaagtaaatttaagacaatgccaattttcctcccatccatgaaacataccatgctgaatatacctgcaacttaagtgttaaaaattctgctaatatcagaattacagatctttttttttttttttttttttttgagacggagtctcgctctgtcgcccaggctggagtgcggtggcatgatctcggctcactgcaaactctgtctcccgggttcacaccattttcctgcctcagcctcccaagtagctgggactataggcgcccgccatcatgcccggctaattttttgtacatttagtagagacggggtttcaccatgttagccaggatggtcttgacctcctgacgtcgtgatccacccgcctctgcctcccaaagtgctggaattacaggcgtgagccaccgtgcctggccagaattacagatctttacagcaaatgcttatattttaagaagtgtgtctgtcacctctagtcttggtggctcagatgaaggataactgcatttctcaaccagtgatgtatttacagtaggtgctgcttttcttttgtgtgtgtgtatcttaggaatcttttgggtgagttgtgaggctgacacctacagtcggacattatgtgtgcaccttggtttgttattgggagttggtggtcagatgcaggagcttcggagggttcgttctggagtcatgagtgaaaaggtatgtgttacggggctagaagttttagagctggttcttaccatctgccagcctttgatggcactccacttgcttcatgtcgtgggaaagatgctttccaaagtgttgagttcagtccagggcagcttccctgttctgttaattaaactttgggacattaaaatgggctaagggagatgattgggtagaaagtattattctattcatttgcctcccagcctacaaaaatgcctgcttggggtctaatacttcaacggttaaagatgcctggaagagggcgcggtggctcacgcctgtaatcccagcactttgggaggccgaggcgggtggatcatgaggtcaggagatcgagaccatcctggctaacaaggtgaaaccccgtctctactaaaaatacaaaaaaaattagccgggcgcggtggcgggcgcctgtagtcccagctactcgggaggctgaggcaggagaatggcgtgaacccgggaagcggagcttgcagtgagccgagattgcgccactgcagtccgcagtcccacctgggcgacagagcgagactccgtctcaaaaaaaaaaaaaaaaaaaaaaaaagatgcctggaagagccaggactgaagaggctgaaaacataatgagcttggactagtaaacaagtgacattcagttttaggaagtttggggtctgatgggctgagatacaaataaactgaattattttcatacatggctgcttttcaggaccacatggtgacaatgcatgatgtgcttgatgctcagtggctgtatgataaccacaaggatgagagttacctacggcgagttgtttaccctttggaaaagctgttgacatctcataaacggctggttatgaaagacagtgcagtaagttccgggttaggagtttatatttggaaagaacgtactccaaagatgacgcttgctctttttattgttttccttgggttttattttatttttttcaagtccaaaccaagtatattaatttaaagtaaaagtttaatggtaggcatacttaaaaataaggcacattaggccaggcacagtggctgatgcctataatcctagcactttggcaggctgaggcaagaggatcacttgagtccaggaaggagtttgagaccagcttgagcccaggagatcaaggctgtgagctgtgtttttatgatgatcagagagttggccttttataaattaaaacattgtctttttctctaacttgagggataaaaatttctggatatttaaaatgtttgtagttggtaattatttatattcaaatcttgtatagatgttcacattttttgtatgtgtataggctgtaataaatactgaaagatggcaccataatagttgaaaaaactcagtcacaaaacagtggacaacataaatgtgatgtcctctccttatcaaaccattggcttctgggtgaatgtaaagggaggggagaatgtgatcaaaagaggtctaggtgagtggagatggtatgaggcagatgggtgcattgggtaccattgaacctctggagaggtagccttaacttgtacccactgacctataaattctgcaccaagacttttgtgtgattggttcaacagggctcagtaatcttgttctcaagttctttaagagcctgttattgcctggatctccagtaaatctgttctttctcctcataaggaggagagaggagtaattaaggaatgccaaggctatttttatgtttcaaatgaaaatatggaccacgtgcggtggctcacacccataatcccagcgctttgggaggccgggccaggcaaattgcttgagctcaggagtttgagaccagcctgggcaatatggtgaaaccctgtctctattaaaaatacaaaaattaggtgggtgtggtggcacgtgcctataatcctagctactgggatggttgagacaggagaatcacttgaacttgggagatggaggttgcagtgagccgagaatgtgccactgcactccaccctggacaacagagggaggttctgcctgaaaattaaaaaaaaaaaaaaaaaaaagaaaatacttgtgagtctctagaacctgaaaacctgaaagtcttctttactacttttgagtcgtgtgtaatgtgcggagagtggtacctatagcacagtgaggtggctcttctgagtaccactcatgccccttgcagctagtgggctataagtgtcatccctgtttcctggtgtcaggccccactcccttgttgtcctcctttactctggtgtgggagtggggtggagggcagcagctgggccccttacacttggtgccatctctgcaggtaaatgccatctgctatggggccaagattatgcttccaggtgttattcgatatgaggacggcattgaggtcaatcaggagattgtggttatcaccaccaaaggagaagcaatctgcatgggtnagaggggatgtttatttcccaaattctaaatgtttgtggttacatactaggtgtatatatttatggggttcatgagatgttttgatacaggcatgcaatacataataatcacatcatggagaatggggcatccatcttaagcatttatcctttgtgttacaaacaatcctattttactgttagttatttatcaccttagttattttaaaatatacacttaagttattattgattatagtcaccccgttgtgctattaaatagtctcactcttcttgttcattcttttggttttttggtggtggtgttttttttttttttttttttttgagacggagttttgctcttgtcacccaggctggagtccaatggctcgatctcggtgtcaccgcaacctctgcctcccaggttcaagcaattctcctgcctcagcctcccgagtagctgagattacaagcatgcaccactatgcccggctaattttctgtatttttagtagaggcggggtttctccatgttggccaggctggtctcaaactcctgacctcaggtgatccacccgcctcggcctcccaaaagtgctgggattacaggcgtgaaccaccacgccaagaattacttttaacttttaaaacaaaacatcaattaaagagaaatatcgttattactaggcctcatatatcaagcattggatatctcttgtattttcttggtagttcttggaaatctgtcagcatttatccaaagattttttttaaaaggattcatagcagatatgaatattattattccaactaaaggttgatcaaatgtccatgctacttgttaattgaaatgtggt

SEQ ID NO: 151601 - DNA, 395 bp, Homo sapiens
tttcgttgcactgctgaatcccacagggagctcacgctccagtctctccacggggcttccacggcaggacggtgacatcacaagccttctcttcagagttgggtgggattgcagagtgtctgctggctcccaggtccagctgggaaaggcgggagggaaatgaagtgtgtgagtgaacagccacccgaagggagctacttctgagcatcttgagcctcgggggccaacaagcaagcccttaggaagaacaggctggaccctgagtctgagactcggttactccccaagtctccagaaggcagtaacacactcccttggttgccttttagtccgtgcactggagaaggcgaggtcaagtgcccaactgcagaccaactacccctcctcagacaacg

SEQ ID NO: 151602 - DNA, 404 bp, Homo sapiens
tttcgtctgaggggtacggagactctgggggagggagacggcagcggcatggcggccgggtgtaagacgcccgaccctcctcttccctgtcttcgccgccgccgctgctggagtcactgggaccctgtagtctgcgtgtgttagttgtaatcccgccgccctcctgtcagccctccgctccgccggccctccttccttccgccgccgcagccagcccgagggtcggccggctgtgtaacactctcccaccccacccaccagcccgcgggccagcaccatggaggacgtgaagctggagttcccttcccttccacagtgcaaggaagacgccgaggagtggacctaccctatgagacgagagatgcagctacctgtactacagaaacatggaataacccatataa

SEQ ID NO: 151603 - DNA, 968 bp, Homo sapiens
tgaggggtacggagactctgggggagggatacggctttggcatggcggccggggtgtaagacgcccagaccctcctcttccctgtcttcgccgccgccgctgctggagtcactgggaccctctagtctgcgtgtgttagttgtaatcccgccgccctcctgttagccctccgctccgccggccctccttccttcctgccgccgcatccagcccgagggtcggccggctgtgtaacactctcccaccccacccaccagcccgctggccagcaccatggatggactgtgaagctggaagttcccttcccttccacagtgcaagggaagacgccgaaggagtggacctaccctatgagacgagagatgcagggaaattttacctgggattgttcttaggcccatattcatctgctatggaaaaagcaagatccctcccttcttgctgtatcctcacacggccaagagaacgagttcttgcctcttcttacaagggtacaatcctgtcatggaggtttctaccctcatgacctcaatctaaaactgattatcttccagagactccaccatcacatcttggggctacctgtactacagaaacatggaataacccatataatatgcatacgacaaaatattgaagcaaactttattaaaccaaactttcagcagttatttagtgcagcctttgttattgcatacattatggaaacatttggaatgaagtacagagatgcttttgcttatgttcaagaaagaagattttgtattaatcctaatgctggatttgtccatcaacttcaggaatatgaagccatctacctagcaaaattaacaatacagatgatgtcaccactccagatagaaaggtcattatctgttcattctggtaccacaggcagtttgaagagaacacatgaagaagaggatgattttggaaccatgcaagtggcgactgcacagaatggctga

SEQ ID NO: 151604 - DNA, 927 bp, Homo sapiens; identical to SEQ ID NO: 132221

SEQ ID NO: 151605 - DNA, 707 bp, Homo sapiens
atgaggagcgtggaccgtccggattcccggtcgacccacgcgtccgagaccggcgcgtgaggaacctaccggtaccggccgcgcgctgtgtattcgccggtgtggctgcacctcaccaatcccgtgcgccgcggctgggccgtcggagagtgcgtgtgcttctctcctgcacgcggtgcttgggctcggccaggcggggtccgccgccagggtttgaggatgggggagtagctacagggaagcgaccccgcgatggcaaggtatatttttgtggaatgaaaaggaagtattagaaatgagctgaagaccattcacagattaatattgttggggacagatttgtgatgcttgattcaccccttgaagtaatgtagaacggaattctcaaatatgcatattacatcaactggaaccagcagtgaatcttaatgttcacttaaatcagaacttgcataagaaagagaatgggagtctggttaaataaagatgactatatcagagacttgaaaatgatcattctctgttgtctgatagtgtatatggccatattagtgggcacagatcatgattattacagtttactcggagtgtccaacactgcaagcagtagagatataagacaagctttcaagagattggcatcgaagttacatcctgataaatacccgaataacccatatgcacatggcgattttttaaaaataaag

SEQ ID NO: 151606 - DNA, 464 bp, Homo sapiens
gaactggaaaatccggacattcctggggcgacgatttcgtagtctaccatatttgtgagagtgagaagaggagttcgtttctttaaacagaggctgaagactctatagaatcagcgcagaaagtggagaaggtccaggacgcagttgcagactctacaggaggctcttaaagcggaaattcagggtcaccagaaactggctgctcaaatgaagcaagatccacagaatgctgacttatagaaacagctttatgaactccaagccaaaatcacagctttgagtgagaaacagaaaagagtagttgaacagctacggaagaacctgatagtaaagcaagaacaaccggacaagttccaaatacagccattgccacaatctgataacaaactacgaacagcacagcagcaacctctacagcaactacaacaacagcagtagtaccaccaccaccactcccagcagtc

SEQ ID NO: 151607 - DNA, 670 bp, Homo sapiens
tttttgttttttaaagatggggtcttgttctgtcacccaggctggagtgcagaactagaaattcagaggccgaaggacttgcctgagctcacacagcgagtggcagccggaagacgaactctggctgctgccttactccactttatcccacagcatggcacaaaaccaaatccaatcttaaggccatcacatgaaaccaaatgtaaaaatgttttgcaatatatacaatcattaagtttgaacatgtttattatctttacagctgcagtgagaagaggagtttgttactttaaacagaggctgaagaaactatagaattagcagagaaagtggagaaggtagaggatggagttgcagactctacaggaggctcttaaagtggaaattcaggttcaccagaaactggttgctcaaatgaagcaggatccacagaatgctgacttaaagaaacagcttcatgaactccaagccaaaatcacagctttgagtgagaaacagaaaagagtagttgaacagctacggaagaacctgatagtaaagcaagaacaaccggacaagttccaaatacagccattgccacaatctgaaaacaaactacaaacagcacagcagcaaccactacagcaactacaacaacagcagcagtaccaccaccaccacgcccagcagt

SEQ ID NO: 151608 - DNA, 445 bp, Homo sapiens
  misc_feature (1)...(445): n = a,t,c or g
tccaggaattcttttcttataattatcaatttgacctggaacttgcatgtcctgattcttagatcttgcatgattatacacgtgttatctaattgatgaatttcaaatatgatctatttcaacagttaaatggctgaacagtcattaatttcaggtggtcctaaacccaaatcagtaaattctttgaggtggataaacctacnnnnnnnnnnnnnnnnnnnnnnnnnnnnnnnnnnnnnnnnnnaaagtnnnnnnnnnnnnnnnnnnnnnnnnnnnnnnnnnnnnnnnnnnnnnnnnnnnnnnnnnnnnnnnnnnnnnnnnnnnnnnnnnnnnnnnnnnnnnnnnnnnnnnnnnnnnnnnnnnnnnnnnnnntcctgggtcgataagtgactttatccttctaagctataaaatgaaggagctacactagatagtctctaagcan

SEQ ID NO: 151609 - DNA, 531 bp, Homo sapiens; identical to SEQ ID NO: 112720
  misc_feature (1)...(531): n = a,t,c or g

SEQ ID NO: 151610 - DNA, 945 bp, Homo sapiens
ctcctttgtcaatggtttatttattctgtgggaggtcgctgagattttatctgtggatttcaagaatgtcaccaggagatgccaagggtgtgtctttttctttaaagtaaccctgcctggagctctaccaacactttcactgtgcagactcatgccctcttctgatcagggaaaatttccactattatttattcatcatattaatcatctccagacctggtcctttcttcttccagagcctataacattcacaggtgaatgaagaagcaaccaccaagcctatcttttctttcatgacttccatttgggtttctgattttctgggaggcctttgcatcctggaaacaggaaatccatcctcttttccacttcagctttttaattttctaaagctgaaaatcctcgttctagaacctcttttcttgggaagtatctggatttccctcggttttggaaactgaacacttgcccaggatgtgccactggactttacttctccctccagcagggggcccctcgaggcccctccatgtcccttgaagctaggtccagctgtggggtccccttcctgtgggtgcatggtcacgcctctggccccagacttgccaaggtgacagcaacagcagcaaggtgtggtagggacagagcagaaagacccttacgcctcttgcctttgttgggaggccccactcccacaaggccccactcaagtctcccaggagaggcactggttcccactttctcttttgacttgtttcagcgcccttcggcgaggggcttggtctccttcacccagaagaacccatcctcaggaacagtgtgggctgtggggccggcctccattggaggagcctcctcaccccctttctgagcgcacgaggaggcctccagtcacaccagcagaagcggaaccctgtctcccaactccaaagcattctgtctact

SEQ ID NO: 151611 - DNA, 564 bp, Homo sapiens
agggcattaagggaaatgaggctggctttttacttgtagtactctacaacagtaggaaaacattatgtctagtctttctggaggggctaatgggaagaattgcaagaactgcttagagagtgagagatgggatgaggcaggacaagagggtgttccagcatacatcattttctccttaaagaaccaacttctctgtcttctttccatttggagttataggtattgttctaaggcctccagattattcagtccttatgccttgtagctttttggaaaaagagggtctttggaggccaagcaggctggctggcggaatcatggctcatgctgggctggctagtttttcccttaattcttgcttctcaaatgtatgtccctgggaagctgcatgatgtggaacacgtgctcatcgatgtgggaactgggtactatgtagagaaggtgagtgagagcatgttggatgcccctctaaacagggaagggaaattcaggggaagctctatagcgcagcatggccagagggagtctccttttagccccttattcacctctgatcttgtagaa

SEQ ID NO: 151612 - DNA, 602 bp, Homo sapiens
  misc_feature (1)...(602): n = a,t,c or g
gccttcccaacatggcgcagtctattaacatcacggagctgaatctgccgcagctagagaatgctcaagaaccagctggaccaggaagtggagttcttgtccacgtccattgctcagctcaaagtggtacagaccaagtatgtggaagccaaggactgtctgaacgtgctgaacaagagcaacgaggggaaagaattactcgtccctactgacggagttctatgtatgtcccctgggaagctgcattgatgtggaacacgtgctcatcgattgtcggaactgggtactatgtaaaaaagacagctgtaggatgccaaggacttcttcaagaggaagattagatttttttaaccaagcagatggagaaaatccaaccagctcttcaggagaagcacgccatgaaacaggccgtcatggtaaatgatgagtccagaagattcagcagctcacagcccctgggggaggctcaggctactgctaaggcctgagagtttttgcagaaatggggcagagggacaccctttgggcgtgggcttcctggtgatgggaagggtcttgtgttttaatgcccaataaaaatgtgcccanctgggcaaaaaaaa

SEQ ID NO: 151613 - DNA, 423 bp, Homo sapiens
cgatggctgggcttgagtaaccttaccctccgcttatgcaagtgatggagctactgacgtgatggtaatttagcctgagaggaaggaaaagccctttgatgtaccccgggctttgatcccgtatcagctgttcggcctcccctggtggcctgtttttccctatcatgggggcttccccacctctaaaacctcaggcaacgaaagcagggaagtagctcctattcactcaggagagcccacggtcaattctccaggaagtttgtgggccagtttttattattattattttttagacacagtctcgctgtggcccagcctacaagtttcagtggcacaatctcggctcactgcagcctccacttcctgggttccagcgattctcctgcctcagcctcccaggcagccgggactacagcgcccgcc

SEQ ID NO: 151614 - DNA, 918 bp, Homo sapiens
tttgttcttgttcagctttgaacacaaggaaaacacttttatggtgtaggtgtgctgcaccgaggtccttgtatttgtattgtagactttctttgacacttatccatggatccatcctctattgagtttgtctgtaaaatgtaataagtagtttctgcctatattacatatttgatggaaggattaagtgagaatgttttacatcaaaaatgctgtgtaactagaagattactaggatagatgtactaattcatctactgtcagaaagttccagcacaggacaccaacatccacaaatgactgttgaatgaaataggcacacatagtgagagcctaagacttgggctgctgcaagaatatgtagccctttcagaatatttttgaattcagtttttaaatgaattcgtaaattgctttctttttcccaggaacagaaattataatttttaacatttgtgtttttaaccttccccagtagcacaataatcttagctttaaccttcccctttctgacttctctgggatctttttttcttaatccccatggtatctttggagaacctacctctgtagagaggcagtagactctgaagtcacctgtcgtaagaacgtgagctttcctcttcacatgctgcttatattccctattaagtttgtttcttttctagaaaaaattgaaagaactgtccagattgaggcttcaactgttgaaattgaagagcgaggggtcaagctacgcctgacagtggtagatacccctggctatggtgacgctatcaactgcagagattggtatgctcccccatgcccagggatctgcatttgtttacttaatatacttcataaatttatagatagtgttaatgagtgattattaagtttgggattgctgtatataataaaacacctagacaattt

SEQ ID NO: 151615 - DNA, 3439 bp, Homo sapiens
  misc_feature (1)...(3439): n = a,t,c or g
atctcggctcactgcaacttctgcctcccacgttcaagcgattcccctggctcagcctccggagtagctgggactgcagacacgtgccaccacgctggctaattttttggattttagtaaattcggggtttcaccgtgttggccaggatggccttgatctgttgacctcgtgatccacccgctttggccccccgaagtgttgggattacagcaacagccaactcagtttataaatccagaaacacctggctatgttggatttgcaaacctccccaatcaagttcaccgaaaatcagtgaaaaaaggttttgagttcacactgatggtggtcggtgaatcaggtctaggaaaatcgagctgtcataaaacagcctattcctaactgatctgtacccagaaagagtcatacctggagcagcagtttgattcttttctagaaaaaattgaaaagaacttgtccagattgaggcttcaacctgttgaaattttaagagcgagggggtcaagcttacggcttgncagtggttaggatacccctgggctatgggtgaccgctattcaactgacagagattgtttttaaggacaatttatctcctattatttgatgaggcaattttgaggagggtacctggcatgacgagagcggctttgaacaggcggcacatcattgataatagggtgcattgttgctttcactttatttcacccttttggacatggacttcagcccttagatgtggcgtttatgaaggccatacacaacaaggtgaatattgtgcctgtcattgcaaaagctgacactctcaccctgaaggaacgggagcggctgaagaaaaggattctggatgaaattgaagaacataacatcaaaatctatcacttacctgatgcagaatcagatgaagatgaagattttaaagagcagactagacttctcaaggctagcatcccattctctgtggttggatccaatcagttgattgaagccaaaggaaagaaggtcagaggccgcctctacccctggggtgttgtggaagtggagaacccagagcacaatgactttctgaagctgagaaccatgctcatcacccacatgcaggatctccaggaggtgacccaggaccttcattatgaaaacttccgttctgagagactcaagagaggcggcaggaaagtggagaatgaggacatgaataaagaccagatcttgctggaaaaagaagctgagctccgccgcatgcaagagatgattgcaaggatgcaggcgcagatgcagatgcagatgcagggcggggatggcgatggcggggctctcgggcaccacgtgtaaggtgatgtgcacatatcaagaagtcagagaaaacactttcctggataaaaaagaaaacattccagatgcatgatccagctgtgtgttttcaatccttgggagggtgccatccacattttaacagtacctgtgcctgagaatttaatttttaaaagactttgatgtgtttttgtatgaagtacttttaacgtatgtatttcattgctgtgtcacactctgtgttttgtgaggtgaatgtcttccttttctttctccctaaccaactaatgttagaattgatttccaagaatcggcatgtatacttaatactgaatttctttgatttaactgacttaacaactgactaaccattgatgagcactggtgatttttatctagaacattcagatttaccataatgttccttagtggtagaggtgtgtgcctagtgatgttaagaaagatacactgacttggtgcaaggccatctgcttaccacatcacaccacttggagatctttgcttccttgcttttatgtttgtacacaacacctaaaaccagttttgctgctataattctatactgttgattcgtctgcgattttatctgttaaccaaataaaacataatagaatttcctaatgagatatatctttatacttaaacagcttttttagaggtgagttttaaagaagtctcttaattctgatgctaggttgtttttaaaaccactatgcaaaggaacaactcaccacaagccaccttttgtagttgttctccactaatactggttatcctgtgctacagagaaaatgcaaagcagtcataagctccagttttccgtattgcaaataagactcttacctacaaaatgagattccagtgaactaattttggtttttactcaaccaaattaaaaatttttttaaggaaaattagcagttggtctattcagaatcaaacctttttatattttatactgcactttagtgtattttctgtcactgtaggtatagaagatctgcctcccctgtggaaattggggtctgttggtgggcttgcccctgaagcctggcttgggttgaaaagtgttcccgccctaaggccttggtgccctgaacctctgatgcctaccgggttctcctgatttgagtttcctttaaatactccctttttgagtaattttctgatgggaggaaagtagcagtcatcatctttttgtgtgcaggctgtctcatttatttttagccattgtcgtttcattcattttgtgtaatataaaccgtgtgtcatgtcaaagtgaaagacatttcaaatctgtagcataggctagtgggcaggtccgcacagtcgaagccacacctggtctgttttctgtgcactgtagccttagtgtcacctttcttcttgtgtctccttatggtacactccagcggttgccttttttatcatttctactgaagttgggaaattcaaccccagaaattgacagatgaaaggagacaatggttgtgtgtagggagatggagaaaatgcttaatctgaggatgagacagggctttttcatttttgtgggggctagaaaaaacataaaatgaggcagttaaaataataatagttaatgaaggtgtgctacagaaaataatctggtgttcttgctaactttgcccttcactgttgcttaattgtgaacagccaaaagctatatgttatggcttattgtgtgaaggtaactaagaagtggtgttccatgacttcagagtcacatccatgcggagtccattatttgagtttgacatttaataactttgctggaaaatctgtaaaaaagaaaaacaagtttgctagtgactaagccccgcatatgtgagtgaaagtacttcaggtacgctgcctcctggtaacagctatgcagggagggaggacccacactgctacacttctgatcccctttggttttactacccaaatctaaatagatacttttgataatagataactgctcttttactaagacatagtctctacctatagaaatgtattttgaaaactcttattttacacagcaattttgtatccatttaaactaaccttttatcaataaagcactattgtttagatattaaaa

SEQ ID NO: 151616 - DNA, 645 bp, Homo sapiens
aatttcttcatcctagaacattagctctttaatctgttaaaatagctatatctccatcaattgtgagatgtaatgaacatgaggtatgttttaacttactggtactaggttaaactataggaaattgctgttgttttgtagttggaaccaatcaaatattagcaattttacacagctcaccaaagtatcaaagtatcaaagagtgaataatttacttaaaaaatataaactagcacagatttattttactgccataataaaatgactaatacagctgacttccaataatctttctcaagtgggaattatttttcttgataaaatactttgttgtagactaaaaataggccccaaagatttccatgccctaatccctagtattaatgcctgtgtatgttaaatgacctagcaaaagagactttgcagatggaattaatgttttttggttttttggggttttttttgagacggagtctcactctgtcacccaggcgagagtacagaggtgcaaacacagctcactgcaccctcgagttcccagtcccaggccatcctcccacgtcagctgcccagtagctggtaccataggcacacgacactatgtccagctaattctaaaaaactttttgtagagaccctcgtgcc

SEQ ID NO: 151617 - DNA, 375 bp, Homo sapiens
  misc_feature (1)...(375): n = a,t,c or g
tggagccgaagctcggctcgtgaacacacactgacagctatagggcaggcggcgggaccgtccccgcttcccctcnnnnnnnnnntgtcccgtcggcggccctgaagtgacccataaacatgtcttgtgagaggaaaggcctctcggagctgcgatcggagctctacttcctcatcgcccggttcctggaagatggaccctgtcagcaggcggctcaggtgctgatccgcgaggtggccgagaaggagctgctgccccggcgcaccgactggaccgggaaggagcatcccaggacctaccagaatctggtgaagtattacagacacttagcacctgatcacttgctgcaaatatgtcatcgactaagacctcttn

SEQ ID NO: 151618 - DNA, 574 bp, Homo sapiens
tttttttttttaaaggctataccaaagggtttatttgcaaagctgtaaaaaactacacagtgtgcagagcagagtgggaagaggtcctgggacccggttaacacaggcagcccctgcactcatgtttgcaggggaagggaggaggagagcttcttttccagccatggttcagtgtcctggagaccaagactgctgggtctggatgcctcctttgccttctactagcaaacactttatttccttgctcgtattttctaatctacctagaatctcaaacccccaaaagcatggaggacttctgctatggtgtgaatgttgctgtctcccccaatatacaggttgaatcctaatcccgacactacagaattaagagatagggccttaagaggtgagatcatgaggactccaccttcatgaatgggattagtgccttaaagaaaaggctcaaggaagcccttttgcccttcccttctgccatgtgaggatgcagcaaaaaggcatcatctttgaagcagatggcaagccctcaccagacactgaatctgctggcaccttgatattggacttcccagcc

SEQ ID NO: 151619 - DNA, 475 bp, Homo sapiens
gcaccactgagaaggacagcagagagatgaaggtcttagaatcattgattggaatgatccagaaattttcttatgatgactctacttacgataaactccatgaagacttagacaagaacagaggaaaatttaaacagttttgttcgttactcaatgttcagccagactttaaaattagtgcagaaggttccggactttcattttgaggaggatggatgaacagagaccgaacgtcgaggaacagatgtgtgtgtgacgtgtttagaaatgcggtgaagggccagacggtgctgggaaggcagttgttcattgggagggtgagggttccggttcggccgggggagggcttccttccctggggttttctgcctgtgtcaccttggtgcccgtcttggggcctctccacacatgccctttggtgggccgaagccgtccctggcagagccctcgtgcattgacttgacagcctcttcgg

SEQ ID NO: 151620 - DNA, 767 bp, Homo sapiens
cggacgcgggggcggacgcgcgggctcctcccaagcggagcatttgagcctgaagctgccgggtctgctacggcaccgcggggctgcaaaaacccgggggccaagggcgggctgcttgccgctatggctggcagacaggacatattccatgccatcgtgaaggcggatgaaaggtttcatggggaagggtatcgggaaggctatgaaaaaggcagcattttgggtgtgaaggagggaaggcagcatggcacgctgcatggagccaaaatcggcactgagatcggccgctaccaacgttttgcttttgcatggaaatgtctactgcacagttgcaccactgagaaggacagcctaaacatgaaggtcttaacatgcttggattggaaggatccagatattcccttatgatgaccctacttacgataaactccatgaagacttagacaagatcagaggaaaatttaaacaggtgcgtgcactgtgtgtttcctcctgctaggagcacctgattgcgcctttcccaggcggggcagcgcactcccggggccgctgcggcaatggcctggggctgcgtgcgccgcggaactgtccgtagaggcgcctcatccttgagtcgcagtgcaggaaaactgaagacagtccagagaaaaggagttagaactcatttatgggctggccacatagacaggaaaagctatagctagagatagagttatcttctcataattcagcaaaaatgcccaagattaaaaataaaaaaaaaaaaa

SEQ ID NO: 151621 - DNA, 788 bp, Homo sapiens
tagaatcaaggtgggcctcagaaatagggctgggtctccataaggaggtaggccacgttcagtccacccctagcatagatggaactggggtctcgggcaaccaggagttacaggaattttgctaaagattcccaccttcccttgagtggggacacaatccctctggttggaaccttgttcccccctaaaatgaaaaaatgtaatgccagtaacatgtaaggggcccctactgtattctttttctgggggaaagctcttggtgttcacaatggctcaggcttacagtacctcccagcccatgtgccccatttcccacaagtctttggggaaggccatgagctgagctgagagggttctctggggcctgggatgacttaagaaccaaatggcagataatgggatagggggcagatgcagaggaccaacgggaagttttaacacaaatccccttccccagatgatatggtttgcctttctgtaggtgggtggcccaggccaatttttggcaatatccttaacccacctgataggagaagcgccctcccctgcctgccttgcccattctacccaacaaggactccctggtgaggcccttcacttccatgtcacgtttgagctgcagctacagtctccttgccctcatggtggtcttcggcaggtgccacagggccccctccagggtcctcctggcctactgtcccttcccggacctcctccccactgcctgggccctcacccagctccaggatggtgggtaggtggccctgctttggggagcgcttgcgccc

SEQ ID NO: 151622 - DNA, 676 bp, Homo sapiens
taaaaatatgaaatctctcaatgtttaaatgttggcaacaaattcaaatgtctaaaaacactttggaaaccaaagtaaatgtgtctgtaggtgcaatattgcctgctgggcaccaggctgggaactttggagtaaacagggcaaggtaatgtctcagaatatggtcacatcagagcacattggttctaggccccatcacaattcaggaggcccccagggtcaccttgagttcatggcaagttgtatatgccaagcaccccatcccatcaggcaggtcccacctggcacccaagggcaaggggcctgccctagcagaggagttcttgggagagcagcagggatggggcttcagcttgggcttgaggcatggactctgacgcagagctgacgtgttgaccaggacctgccatcaatctcaggtagaccaggctagttctcagctcatggctgctccacaccctttggatgtcattcttcctttatgtttagggggtagtcctcaagcaaatgtctgcagatgagctactccctggggctcctgccaggacccagcaggcttgatctagcctagtctctctggattctcccatttctttttgtttttttctcatttgagacaaggtctcgctctgttgtccaggctggagtgcagtggtgtaatcacagcttactacgg

SEQ ID NO: 151623 - DNA, 394 bp, Homo sapiens
  misc_feature (1)...(394): n = a,t,c or g
aaaggaggatcgatgcacatgtatgccaagaacttctacgggggcaatggcatcgtgggagcgcagggccagatattcgaagcttacaacatggcagctttgtggaaattaccttgtattttcatctgtgagaataatcgctatggaatgggaacgtctgttgagagagcggcancaagcacttgattactacaagagaggcgatttcattcctgggctgagagtggatggaatggatatcctgtgcgtccgagaggcaacaaggtttgctgctgcctattgtagatctgggaaggggcccatcctgatggagcttgcagacttaccgttaccacggacacagtatgagtgaccctggagtcagttaccgtacacgagaagaaattcaggaagt

SEQ ID NO: 151624 - DNA, 722 bp, Homo sapiens
tgaccgagagcatcggcacgacttcccgtgtcgagccacgcgcacgcgtcgatcacaagagacttacgggggcacatacctgtgaaggagctcacctttgctctacatcagcgcttggcaaaggccctgtggtaaaggacctccccacaacctattgcaaaacaatacagacccattctcttggatgtccggactggcagtgtcaaattcggataatagcgtctgagtcctaactcagtttctatgcttctcttgttaccgagtaatccccagtctgtggccagcactctgtgaagccctgttctagaggctgattcttaggtgctggttcactctggctatccagtgggcctgatagatttcatattgatcttttttccagtgtgttccttactgctagcatggccccaaagaaacaagtagtagatgggttgtcaccttccttagttgcaagagtatgatgcctgctacttctcctccaccacccaccccgctttccctcaccacccaaagctcggttttagaagaggaggctttctgtgctttatggaaagctttctgtgccaggcagagcaggcagctgttaggagatgatgaagccgggggagaaagaagccaaatggaaacccctttttcgtaactacttccagggccagatatttcgaagctttacaacatggcagctttgtggaaattaccttgtattttcatctgtgagaatg

SEQ ID NO: 151625 - DNA, 1503 bp, Homo sapiens
tctgtcacgccgcggtgcgactgaggcgtggcgtctgctggggcacctgaaggagacttgggggcacccgcgtcgtgcctcctgggttgtgaggagtcgccgctgccgccactgcctgtgcttcatgaggaagatgctcgccgccgtctcccgcgtgctgtctggcgcttctcagaagccggcaagcagagtgctggtagcatcccgtaattttgcaaatgatgctacatttgaaattaagaaatgtgaccttcaccggctggaagaaggccctcctgtcacaacagtgctcaccagggaggatgggctcaaatactacaggatgatgcagactgtacgccgaatggagttgaaagcagatcagctgtataaacagaaaattattcgtggtttctgtcacttgtgtgatggtcaggaagcttgctgtgtgggcctggaggccggcatcaaccccacagaccatctcatcacagcctaccgggctcacggctttactttcacccggggcctttccgtccgagaaattctcgcagagcttacaggacgaaaaggaggttgtgctaaagggaaaggaggatcgatgcacatgtatgccaagaacttctacgggggcaatggcatcgtgggagcgcaggtgcccctgggctgctgggattgctctagcctgtaagtataatggaaaagatgaggtctgcctgactttatatggcgatggtgctgctaaccagggccagatattcgaagcttacaacatggcagctttgtggaaattaccttgtattttcatctgtgagaataatcgctatggaatgggaacgtctgttgagagagcggcagccagcactgattactacaagagaggcgatttcattcctggggctgagagtggatggaatggatatcctgtgcgtccgagaggcgacctatgattggtcgtgcctattgtagatctgggaaggggcccatcctgatggagctgcagacttaccgttaccacggacacagtatgagtgaccctggagtcagttaccgcacacgagaagaaattcaggaagtaagaaagtaagagtgaccctattatgcttctcaaggacaggatggtgaacagcaatcttgccagtgtggaagaactaaagggaatttgatgtggaagtgaggaaggagattgaggatgctgcccagtttgccacggccgatcctgagccacctttggaagagctgggctaccacatctactccagcgacccaccttttgaagttcgtggtgccaatcagtggatcaagtttaagtcagtcagttaaggggaggagaaggagaggttataccttcagggggctaccagacagtgttctcaacttggttaaggaggaagaaaacccagtcaatgaaattcaatgaaattcttggaaacttccattaagtgtgtagattgagcaggtagcaattgcatgcagtttgtacattactgcattaaaagatgaattaatgagtgcttaaagatt

SEQ ID NO: 151626 - DNA, 511 bp, Homo sapiens
cgaactaagcacacccctctgctgggactccaaactaatcggctatggttctgcagctcagcatctcccctacctcaccagcctgctgcccatgaagctcctgcagtactgcctggccgatgcctgggtagctgagatcggcctggccttcaacatcctggagatggtggtctttgcctttgccactatcacgcctctcatgttcacaggatatgggttgcttttcctgtcattagtcatcacacctgtcatccgggctaaactctccaagctggtgagagagacagagcagggtgctctcttttctgctgaggcctgtgtgaatagcctgaccatgctgacggcctccggcatcttcaactcactctacccagccactctgaactttatgaagggggtccccttcctcctgggagctggccttatgctcatcccggctgttctgattgagatgctggaacaggctgatcctcatctcgagttccagcaggttccccagagcccctgatct

SEQ ID NO: 151627 - DNA, 1458 bp, Homo sapiens
  misc_feature (1)...(1458): n = a,t,c or g
atggaggggagcgcgagccccccggaaaagccccgcgcccgccctgcggctgccgtgctgtgccggggcccggtagagccgctggtcttcctggccaactttgccttggtcctgcagggcccgctcaccacgcagtatctgtggcaccgcttcagcgccgacctcggctacaatggcacccgccaaagggggggctgcagcaaccgcagcgcggaccccaccatgcaggaagtggagacccttacctcccactggaccctctacatgaacgtgggcggcttcctggtggggctcttctcgtccaccctgctgggagcttggagcgacagtgtgggccgccgcccgctgctagtgctggcctcgctgggcctgctgctccaggccctagtgtccgtttttgtggtgcagctgcagctccacgtcggctacttcgtgctgggtcgcatcctttgtgccctcctcggcgacttcggtggccttctggctgctagctttgcgtccgtggcagatgtcagctccagtcgcagccgcaccttccggatggccctgctggaagccagcatcggggtggctgggatgctggcaagcctcctcgggggccactggctccgggcccagggttatgccaaccccttctggctggccttggccttgctgatagccatgactctctatgcagctttctgctttggtgagaccttaaaggagccaaagtccacccggctcttcacgttccgtcaccaccgatccattgtccagctctatgtggctcccgccccagagaagtccaggaaacatttagccctctactcactggccatcttcgtggtgatcactgtgcactttggggcccaggacatcttaaccctttatgaactaagcacacccctctgctgggactccaaactaatcggctatggttctgcagctcagcatctcccctacctcaccagcntgctggccctgaagctcctgcagtactgcctggccgatgcctgggtagctgagatcggcctggccttcaacatcctggggatggtggtctttgcctttgccactatcacgcctctcatgttcacaggtagtatttacaggttccagggctatgaatctgatgccattgggcaccattattcagcctcctatgcctcagaaccatcctgtgatgaaggccttattatcttcctcatacagggagtcaggatcagagagggatatgggttgcttttcctgtcattagtcatcacacctgtcatccgggctaaactctccaagctggtgagagagacagagcagggtgctctcttttctgctgtggcctgtgtgaatagcctggccatgctgacggcctccggcatcttcaactcactctacccagccactctgaactttatgaaggggttccccttcctcctgggagctggcctcctgctcatcccggctgttctgattgggtaa

SEQ ID NO: 151628 - DNA, 839 bp, Homo sapiens
accaattgactctcctcctctttgtgccttctcaattctgtcggtgccaaatctccgtctgctttcctcttataaagatatgtgtgacggcatttagggcccaacctaatccaggataactctgctctctcaggaggcttaactgcacacctgcatagactcattttccaaataaggtagtatttacaggttccagggctatgaatctgatgccattgggcaccattattcagcctcctatgcctcagaaccatcctgtgatgaaggccttattatcttcctcatacagggagtcaggatcagagagggtaagtaccccaggccacacagataatatgtaatggcatcaggttttgaactcagggctgactccaaagcccatgcttgttttctgtgccctgccatatccttactaagtgccaagtgggtgggtgatgcctgctgtgaccacaagaggttcagacaagaaagcaatcaatgggaattagcattcattcatgagagctagcaggtggccaagcccagacaagggcagtctccattcctccttgactactgtcttcccaccctcaccatcaaggaagttcttcctgggtctaacctaagccccacatggggtatggataggagctctgctgcctttcccttggacgcccctctccccagccccattttcctgatgagtgtttgtttctccacaggatatgggttgcttttcctgtcattagtcatcacacctgtcatccgggctaaactctccaagctggtgagagagacagagcagggtgagtgtcagaacccacctgtgtgtggttcctcatgtccaggaattcgccgct

SEQ ID NO: 151629 - DNA, 438 bp, Homo sapiens
  misc_feature (1)...(438): n = a,t,c or g
ggaaggtctctgggtggganaaagccaagatgnaactccccctacttctggctcttctatttgggtgctaagacgctgcctgaggatgnggagacaccagagcaggagatggaggagaccccttgcagggagctggaggaagaggaggagtggggctctggaagtgaagatgcctccaagaaagatggggctgttgagtctatctcagtgccagatatggtggacaaaaaccttacgtgtcctgaggaagaggacacagtaaaagtggtnggcatccctgggtgccagacctgccgctacctcctggtgagaagtcttcagacgtttagtcaagctttgtttacttgccggagttgcttacaggggcaacctggttttccatccacaacttcatttttaattattcgattccatgttcttttcagcgcgttcaaccag

SEQ ID NO: 151630 - DNA, 1419 bp, Homo sapiens
ctatgcaattgcagagggactttctttccaagtacggcattcccgatataccagaaaggggtggaagaatgtcagaagaatggcaagcatgaacatcacattcacgtaaaatgggtcattctgaagggagcctttgatgagggtgaagatggggaactggagcagagacaccacagccgacaaggccatcaccagcccaaagagcttgccaaagtgctctgaagggaaagcaagggtgaggaaggccgcgttgctcccatagaggaaggagcggctgatcacttgcaggatgaaggtgaggtactggagagggaggatggggactgaggcacagagggcgaagcccaggcacagcagggatgtcagggccagcgaaggcaccgtcgagcagagggccaccgccaaagtggaggaacctgtctttcttgcttccttctggtacttctgtttaagccggtccatgagcaggccattccagggggcacacagcactccgaactgagtgaaggcaaaggcatttgtgtaggtgctgacttccttcgctgaaaggaactcctttgactgtagctccctgttttcatgctcagctgtttccttctcttcctttgtggtgccattcccagggcacaggccatagctgtagttggggggcagtgggtatgggatgtgcccccggggcatcaggaggaaagtgcgtgctacatgccaggtactgcagacagagatgaagatgaaggaggccctgaggctgatgcctttttcataaagaagcttaataataaggaagactgccgaggaagagtcaaatgctccattgtacagagtgatgatggtcgaacggtgttggccaaataggttcccaatctgcaggttggtgatgagaaacaggattcccccaatggtgagcattggcatggccaggaagagcagcacggctgagcctgcagaggtgaaggctatgatgagtgtggcggtggtgtagaaaaatcttacaacaccgccgccgttattaggaagaagctctgtttgatgacgtcccacactgtgggtacctttatgaacaggaatttgctttttcaaatcccagagaagtaagattaaagttggctgttctccatccatataggccttttctgccctctcccgtgcagcatctggaggaacattgcagcaccccacgacagatccctgcttaatgtcagcctccacttccccatcctccagcaccatggaaactgttccagtctcttccggcttccctttgcctttttccacaacaaaagtccagtgttcaatcggccccagcagtttcctgctcttttcatctttggggtgttgggcaaagctctcaatgtgaaaaaccccgttgttttcactcaggagtcgtctccttctcctggatccatttcctcttttcat

SEQ ID NO: 151631 - DNA, 579 bp, Homo sapiens
tttgctgtccctagtcagtgtggtgaattccctacctcttcattggcactctcaactccttgctgaccaacatggccggtggggacatggcacgagtcagcacctacacaaatgcctttgccttcactcagttcggagtgctgtgtgccccctggaatggcctgctcatggaccggcttaaacagaagtaccagaaggaagcaagaaagacaggttcctccactttggcggtggccctctgctcgacggtgccttcgctggccctgacatccctgctgtgcctgggcttcgccctctgtgcctcagtccccatcctccctctccagtacctcaccttcatcctgcaagtgatcagccgctccttcctctatgggagcaacgcggccttcctcacccttgctttcccttcagagcactttggcaagctctttgggctggtgatggccttgtcggctgtggtgtctctgctccagttccccatcttcaccctcatcaaaggctcccttcagaatgacccattttaacgtgaatgtgatgttcatgcttgccattcttctgacattcttccacccctttctg

SEQ ID NO: 151632 - DNA, 1251 bp, Homo sapiens
ggtcttttaacatccgaggaccacattctttgtgctttccaaatcatcacctgccccatgcaacttacagggataaagccaagatgaaactccccctacttctggctcttctatttggggcagtttctgctcttcatctaaggtctgagacttccacctttgagacccctttgggtgctaagacgctgcctgaggatgaggagacaccagagcaggagatggaggagaccccttgcagggagctggaggaagaggaggagtggggctctggaagtgaagatgcctccaagaaagatggggctgttgagtctatctcagtgccagatatggtggacaaaaaccttacgtgtcctgaggaagaggacacagtaaaagtggtgggcatccctgggtgccagacctgccgctacctcctggtgagaagtcttcagacgtttagtcaagcttggtttacttgccggaggtgctacaggggcaacctggtttccatccacaacttcaatattaattatcgaatccagtgttctgtcagcgcgctcaaccagggtcaagtctggattggaggcaggatcacaggctcgggtcgctgcagacgctttcagtgggttgacggcagccgctggaactttgcgtactgggctgctcaccagccctggtcccgcggtggtcactgcgtggccctgtgtacccgagagaatgatgccccccatctggagagcctagagacacaggcagacctaggccaggatctggatagttcaaaggagcaggagagagacttggctctgacggaggaggtgattcaggcagagggagaggaggtcaaggcttctgcctgtcaagacaactttgaggatgaggaagccatggagtcggacccagctgccttagacaaggacttccagtgccccagggaagaagacattgttgaagtgcagggaagtccaaggtgcaagacctgccgctacctattggtgcggactcctaaaacttttgcagaagctcagaatgtctgcagcagatgctacggaggcaaccttgtctctatccatgacttcaacttcaactatcgcattcagtgctgcactagtacagtcaaccaagcccaggtctggattggaggcaacctcaggggctggttcctgtggaagcggttttgctggactgatgggagccactggaattttgcttactggtccccagggcaacctgggaatgggcaaggctcctgtgtggccctatgcaccaaag

SEQ ID NO: 151633 - DNA, 3364 bp, Homo sapiens
  misc_feature (1)...(3364): n = a,t,c or g
gcagctgtcgcactagtgattttcccgggtcgacgatttcgtcgagtcctaggcgagggtcatgggagttgggggtatttctggcagtagaatggcctgcgtcgtgactaannnnnnnnnnnnnnnnnnnnnnnnnncctgaaatccatgggagcttttgtttcattgtcagtaaactgaagataacaccaacttggcagcgggagtttgtgtcttctgtatgaaatctccccgcctctgcacctggttgagttgctgtcattattttaggggacggtattcagaattcgagcgcaggagctccgcttctccacctgctcccggggagctattgggcctcctcttccagcagcctctatctttattctacaggatccagagaatcacccgctgatggtttttgcccaggcctgaaacaaccagagagctacgggaaaggaagggcttggcttgccagaggaattttccaagtgctcaaacgccaggcttacggcgcctgtgatccgtccaggaggacaaagtgggatttgaagatccactccacttctgctcatggcgggccagggcctgcccctgcacgtggccacactgctgactgggctgctggaatgcctgggctttgctggcgtcctctttggctggccttcactagtgtttgtcttcaagaatgaagattactttaaggatctgtgtggaccagatgctgggccgattggcaatgccacagggcaggctgactgcaaagcccaggatgagaggttctcactcatcttcaccctggggtccttcatgaacaacttcatgacattccccactggctacatctttgaccggttcaagaccaccgtggcacgcctcatagccatatttttctacaccaccgccacactcatcatagccttcacctctgcaggctcagccgtgctgctcttcctggccatgccaatgctcaccattgggggaatcctgtttctcatcaccaacctgcagattgggaacctatttggccaacaccgttcgaccatcatcactctgtacaatggagcatttgactcttcctcggcagtcttccttattattaagcttctttatgaaaaaggcatcagcctcagggcctccttcatcttcatctctgtctgcagtacctggcatgtagcacgcactttcctcctgatgccccgggggcacatcccatacccactgccccccaactacagctatggcctgtgccctgggaatggcaccacaaaggaagagaaggaaacagctgagcatgaaaacagggagctacagtcaaaggagttccttttaagcgaagggaagagaccccagggcaagggcagaagcaggaactccgctccttctggagctacggntttctctcgggcgctttgcctgggnacctggtgtgggcttgtctgtgatacagttgtggcactacctcttcattggcactctcaactccttgctgaccaacatggccggtggggacatggcacgagtcagcacctacacaaatgcctttgccttcactcagttcggagtgctgtgtgccccctggaatggcctgctcatggaccggcttaaacagaagtaccagaaggaagcaagaaagacagttcccccgcttcttccgaggagacagcggaggcgaggccaccgggctgtcaggctgaagctccgtggcggccgggtcctgcacgcagagaagaccccagcgccggcgcggctcagggctgggcccacgggactccggacgcgccgcgaaagcgttgcgctcccggaggcgtccgcagctgctggctgctcatttgccggtgaccggaggctcggggccagcatggcccccacgctgcaacaggcgtaccggaggcgctggtggatggcctgcacggctgtgctggagaacctcttcttctctgctgtactcctgggctggggctccctgttgatcattctgaagaacgagggcttctattccagcacgtgcccaggaaagtctgagaaggaagatagggatggaaaaagggaaggcctcatccacgtggtcccattatggcttaaagctgtaggaaggcgccagtacagcccccccaccttcaaccgagctcctttacctgccaggtgggttttcttgcacgagaaggcttaccaggtacgggacacagccattgagtcctcggtggtaaccaaggtgaagggctccggactctacgccaacagagtcatggatgtgtctgattacgtgacgccacctcagggcacctcggtctttgtcatcatcaccaagatgattgttactgaaaatcacatgcaaggattctgcccagagagtgaggagaaataccgctgtgtatcagacagccagtgcgggcctgagcgcttgccaggtggggggtctgagacttccacctttgagacccctttgggtgctaagacgctgcctgaggatgaggagacaccagagcaggagatggaggagaccccttgcagggagctggaggaagaggaggagtggggctctggaagtgaagatgcctccaagaaagatggggctgttgagtctatctcagtgccagatatggtggacaaaaaccttacgtgtcctgaggaagaggacacagtaaaagtggtgggcatccctgggtgccagacctgccgctacctcctggtgagaagtcttcagacgtttagtcaagcttggtttacttgccggaggtgctacaggggcaacctggtttccatccacaacttcaatattaattatcgaatccagtgttctgtcagcgcgctcaaccagggtcaagtctggattggaggcaggatcacaggctcgggtcgctgcagacgctttcagtgggttgacggcagccgctggaactttgcatactgggctgctcaccagccctggtcccgcggtggtcactgcgtggccctgtgtacccgaggttcctccactttggcggtggccctctgctcgacggtgccttcgctggccctgacatccctgctgtgcctgggcttcgccctctgtgcctcagtccccatcctccctctccagtacctcaccttcatcctgcaagtgatcagccgctccttcctctatgggagcaacgcggccttcctcacccttgctttcccttcagagcactttggcaagctctttgggctggtgatggccttgtcggctgtggtgtctctgctccagttccccatcttcaccctcatcaaaggctcccttcagaatgacccattttacgtgaatgtgatgttcatgcttgccattcttctgacattcttccacccctttctggtatatcgggaatgccgtacttggaaagaaagtccctctgcaattgcatag

SEQ ID NO: 151634 - DNA, 1744 bp, Homo sapiens
aatattctgcttttcctgttatgtgtttcagatttttctacaccaccgccacactcatcatagccttcacctctgcaggctcagccgtgctgctcttcctggccatgccaatgctcaccattgggggaatcctgtttctcatcaccaacctgcagattgggaacctatttggccaacaccgttcgaccatcatcactctgtacaatggagcatttgactcttcctcggcagtcttccttattattaagcttctttatgaaaaaggcatcagcctcagggcctccttcatcttcatctctgtctgcagtacctggcatgtagcacgcactttcctcctgatgccccgggggcacatcccatacccactgccccccaactacagcataggcctgtgccctgggaatggcaccacaaaggaagagaaggaaacagctgagcatgaaaacagggagctacagtcaaaggagttcctttcagcgaaggaagagaccccaggggcagggcagaagcaggaactccgctccttctggagctacgctttctctcggcgctttagcctggcacctggagtggctgtctgtgatacaattgtggcactacctcttcattggcactctcaactccttgctgaccaacatggccggtggggacatggcacgagtcagcacctacacaaatgcctttgccttcactcagttcggagtgctgagtgccccctggaatggcctgctcatggaccggcttaaacagaagtaccagaaggaagcaagaaagacagggtcttttaacatccgaggaccacattctttatactttccaaatcatcacctgccccatgcaacttacagggataaagccaagatgaaactccccttacttctggctcttctatttggggcagtttctgctctagcatctaaggtctgagacttccacctttgagacccctttgggtgtctaagacgctgcctgaggatgaggagacaccagagcaggagatgggaggagaccccttgcaggggagctgggaggaagagggagggagtgggggctctgggaagttgaagatgcctcccaagaaagatgggggctgtttgagtctattcttcagtgcccagatatgggtgggacaaaaacctttacgtgttcctgagggaaggagggacaccagttaaaagtgggttggggcatccctgggggttgccccagacctgcccgctaccttcctgggtgagaaagtctttccagacgttttagttcaaagctttggttttactttgcccggagttgcttacagggggcaaacctgggttttccattccacaacttttcaatattaattatcggaatccaagtgttctgtcaagcgcgctcaacccagggtcaagtctggattgggaggcaggatccacaggctcgggtcgcttgcagacgctttcagtgggttgacggcagccgctgggaacttttgcgtactggggttgctcaccagccctgggtcccgcggtggtcactgcgtggccctgtgtaacccgagggaggctactgggcttcgagcccacttgccttcagaagaatttccctttcatctgtttcccattgagctggtcccagccagcagttcaagtagtgccctctcctgggcagctgcctcccctcctctgcttgccatccctccctccacctccctgcaataacaatgggttttactgaaaaaaaaaaaaaaaaaaaaaaccggaattcc

SEQ ID NO: 151635 - DNA, 441 bp, Homo sapiens
tgtcgtaccggctcggaatttccggaacgacgatttcgtgtatggggcggcagtcgggggtggtgggagattgaggatgcgtccaatcacttataaatggcgccggaacaggacccgaagcctaaagtccaggagggtgagcgagtgctgtgctttcatgggcctcttctttatgaagcaaagagtgtaaaggttgccataaaggacaaacaagggaaatacttcatacattacagggggtggaataaaaattgggatgaatggcttccggagagcagagtactcaaatacttggacaccaatttgcagaaacagcgagaacttcaaaaagccaatcagaaaacgaaaaacaacaaacagaaaacacctggaaatggagatggtggcagtaccagagagacccctcaacctcctcggaagaaaagggcccgggtagatcct

SEQ ID NO: 151636 - DNA, 435 bp, Homo sapiens
  misc_feature (1)...(435): n = a,t,c or g
gcggcgaatcacttataaatggcgccgaagcaggacccgaagcctaaattccaggagggtgagcgagtgctgtgctttcatgggcctcttctttatgaagcaaagtgtgtaaaggttgccataaaggacaaacaagtgaaatacttcatacattacagtggttggaataaaaaaagtgctgtgaggcccaggcgctctgaaaaatctttgaagacacatgaggatattgtagccctttttcctgttcctgaaggagctccctcagtacaccaccccctcctgacctctagttgggatgaatgggttccggagagcagagtactcaaatacgtggacaccaatttgcagaaacagcgagaacttcaaaaagccaatcaggagcagtatgcagaggggaagatgagaggtgctgccccaggaaagagacatctgtcn

SEQ ID NO: 151637 - DNA, 414 bp, Homo sapiens
ccacgcgtccgcaaaaagctgaaattcttgccaggcgtgagccactatgcccggcctaaaatcatgtattttaaaggaattggtggtgtttgctcacataattaaaatacatggttgtagtgcccctgccttggatgtaactttggataaattctcttgtttaaacagtacgaattggagcaatgttggcttatacacctctggatgagaagagccttgctttattactcaattatcttcacgatttcctaaagtaagtctgtgcttgaaattataaacatggatttgaaaattagcgtgtaatgggagggattggcagtatagatgctaaaacattaaacattatattggtacaggcatagatagttggtaatggagcagtaaaagtaagtgcaaacacatgggagtctcaga

SEQ ID NO: 151638 - DNA, 2033 bp, Homo sapiens
ggcaaatccggcccaggatgtagagctggcagtgcctgaccggcgcgtctgacgcggagttgggtggggtagagagtagggggcggtagtcgggggtggtgggagaaggaggaggcggcgaatcacttataaatgtttgccgaagcttgacccgaagcctaaattccaggagggtgagcgagtgctgtgctttcatgggcctcttctttatgaagcaaagtgtgtaaaggttgccataaaggacaaacaagtgaaatacttcatacattacaggggttggaataaaaattgggatgaatgggttccggagagcagagtactcaaataccgtggacaccaatttgcagaaacagcgagaacttcaaaaagccaatcaggagcagtatgcagaggggaagatgagaaggggctgccccaggaaagaagacatctggtctgcaacagaaaaatgttgaagtgaaaacgaaaaagaacaaacagaaaacaccttggaaattggagatggtgggcagtaccagtgagacccctccagcctcctcggaagaaaagggcccgggtagattcctactgtttgaaaatgaggaaacattcatgaaacagagttgaagttaaggtaaagattcctgaagagctaaaaccgtggcttgttgatgacctgggactttaattaccagggcaaaaacagctcttttatcttcctgccaagaagaatgtggattccattcttgaggattatgcaaattacaagaaatctccgtgggaaacacagataataaggagtatgccggttaaatgaagttgtggcaggggattaaaagaatactttcaacgtaaatgttggggtacccagctactctataaatttgagagaccacagtatgctgaaattcttgcagatcatcccgatgcacccatgtccccaggtgtatggagcgcccaacatctcctggagattatttggtaccgaattggagcaatgttggcttatacacctctggatgaggaagaggccttgctttattactcaattatcttcacgatttcctaaagtacctggcaaagaattctgcaactttgttcagtgccagcgattatgaatgtggctcctcctgagtaccatcggaaagctgtgtggaaaagcactctcactcacttatgtttggatctccgtaaacacatttttgttcttagtctatctccttggtacaaaccgatgtgctttgaagatgttagtgtataacaattgatgtttggttttctgtttgattttaaacagagaaaaaataaaagggggtaatagctccttttttcttttctttcttttttttttttcatttcaaaattgctgcccagtgttttccaatggatggaccaaccagaggggatatgcctgtaagagggtttatggccctagttggaccaaagctgcttttggaatgctgggtggtcctattccctttgaccactacggcacttttaataataccatgttaatgcctatatgacaaaaatgctctgattcctagtgcccaaaggttcaattcagtgtatataactgaacacactcatccatttgtgcttttgtttttttttaatggcgcttaaaagtaaagagcccatcctttgcaagtcatcccaggttgttacttaggcattttatcttggctcgaaattgttgaagaatggtggcttgtttcgatggtttttgtatttgtgtctaatgcacgttttaacatgatagatgcaatcgcactcgtgtagctagttttctggaaaagtcaatcttttaggaattgtttttcagatcttcaataaattttttctttaaatttcaaagaaaaaaaaaagaaaaccagaaaacaacaacaacaacatgaaaaaaaaagaccccacaaaaacctcattcagaggtcagcaacctcaaagactgaagatagatagcccccaaagattgagaaagaatcaatacaaaagcactgaaaactcaaaaagtcagagttcctcttctctaaatggactgcaacacccctcca

SEQ ID NO: 151639 - DNA, 1029 bp, Homo sapiens
  misc_feature (1)...(1029): n = a,t,c or g
tttgagacccatcgtagaccctagtcagngtggtggaattcggaggtcccccacgggcccttcaggatgaaagctgcggtgctgacccttggcccgtgctcttctctgacgggtgagccaggcgtcggcatttctggcagggaggatgaagcccccccagagccgcctgggatcgagtagaaggaacctggccactcgtgtaccgtggactgtgctcaaagaacagcggacagagacttatgtgtcccagtttgaagggctccgccttggggaaaacagctaaaccttaaagctcctttgacaactggggacagcgttgaccttccacctttcagccaagctgcgcgaanacagtttcgggccctgttgacccagggatttcttggggattaacctggggaaaagggagacaagaggggccttgaggcaagggagattgaggcaaaggatctttggaaggaggttgaaaggcccaaggttgcagccttaacttggggacgattttcccagaaagaaattggccaggaaggagattggagctcttacccgccagaaaggttggagccgcttgcgcgcaagaacttccaagaagggcgcgcgcccagaaagcttgcacgagcttgcaagaagaagcttgagcccactgggcgaggcagtatcgcgaccgcgcgcgcgccccatgtgggacgcgctgcgcacgcatctggccccctacagcgacgagatgatgccagcgcttgggcgcgcgcccttggggctttaagggaaaacgggggggccagaatgggccagtaccacgccccaggccaccgagcaatctgagcacgctgagcgagaaggccaagcccgcgctcgaggaccatccgccaaggcctgctgcccgtgctggagagcttcaaggtcagcttcctgagcgctctcgaggagtacactaagaagctcaacacccagttgaggcgcccgccgccgcccccctacccggtgctcagaataaacgtttccaaagtgggaaaaaaaaaaaaaaaaaaa

SEQ ID NO: 151640 - DNA, 552 bp, Homo sapiens; identical to SEQ ID NO: 145721

SEQ ID NO: 151641 - DNA, 705 bp, Homo sapiens; identical to SEQ ID NO: 145722
  misc_feature (1)...(705): n = a,t,c or g

SEQ ID NO: 151642 - DNA, 645 bp, Homo sapiens
aagatatttttgagcgactgcctggcatgtgacagctgtatgactgcagagaaaggagtccaactttcccagcaaaatgccaaggacttcttccgcgttctgaacctaacaagaaatgtgatacctcaaagcacaaagtgctggtagtgtctgtgtgtcctcaatctttgccttattttgctgctaaattcaacctcagtgtaactgatgcatccagaagactctgtggtttcctcaaaagtcttggggtgcactatgtatttgatacgacgatagctgcggattttagtatcctggaggatgcttaaatggcagaggccaagcccagactccagacggacatgcggataaggccctgctgcggcagatggaaggcatttacgctgacatccctgtgcggcgtccggagtccagtgcaaacgtgcaggagctgtaccaggagtggctggaggggatcaactcccccaaggcccgagaggtgctgcataccacgtaccagagccaggagcgtggcacacacagcctggacatcaagtggtgaagtcaggccagggccttccagctgctcttggggccagagccaagagcctctcagtagagggaggggctgccctgagtggagtattaaagacacttaagaaaacc

SEQ ID NO: 151643 - DNA, 564 bp, Homo sapiens
aaaaagaccataagcatctggagcacctgcaagagcctgtgcatgggctcggcgtgactgagagtcctccgccttgcccgagcatcaggcaggccctcccaagacccctcaagatgctagaatgggactttctgcaaagtttaaacatctgtacaggatttagcttctttggtggcgagacttggattgtgatgccctcaggaagtctggtttcactctttctgtcactgtacgtcagcattcatgaaggacttgtattttctctgccttgtgaggtttggagacttgaaggaggacaaagtgacgcgccatgatggagccagctcagacgggcacctggcacacatcttcagacatgcggccaaggagctgttcaacgaggatgtggaggaggtcacttaccgagccctgagaaacaaagacttccaagaggtcacccttgagaagaacggagaggtggtgttacgctttgctgcagcctatggctttcgaaacatccagaacatgatcctgaagcttaagaagggaagttccattcactttgtgaggtctcgctgtctggag

SEQ ID NO: 151644 - DNA, 1842 bp, Homo sapiens
aatggcggcggacgagggctgtgctttcggctttccccgttaggagccgcgagtaaggcgagtgtccaacgttcgagctggctgacagagcccggccgcggcctccgcgggcccaggggcctccaggccccgtgaccaccggaccgagcaccctggaacggccccagcttggcctcgggacagtccgcgcgctcaccgactccctggtgaacgccgcttggtcgccgccgccgccgcaagacccacgataagcggaaaccggggcaaggacccggtccccccggcgccgaatgtagtaagaaaacaaaaggctgatgaccaagagaatgtgtcagccgatgcaccgagtccagcccaggaaaatggagagaagggagaattccacaagttggctgatgccaagatatttttgagcgactgcctggcatgtgacagctgtatgactgcagaggaaggagtccaactttcccagcaaaatgccaaggacttcttccgcgttctgaaccttaacaagaaatgtgatacctcaaagcacaaagtgctggtagtgtctgtgtgtcctcaatctttgccttatttttgctggctaaatttcaacctcagtgtaactgattgcatccagaagactctgtggtttcctcaaaagtcttgggggtgcactatgtatttgatacgacgatagctgcggattttagtatcctgggagagtcaaaaagaattcgtgcgtcgttattcgccagcacagtgagggagggaacgcaccctgccccatgctgacctctgcctgtcctgggctggggtccgatacgccggagcgggttgctggggtcgccccatcactggcccaccttcttggcaccgccaaagtccccccagcaggtcatgggttctttggtgaaggattatttcggccagacagcagaaccttgtctccagagaagatttttccacggtcattggtggccccttggttaatgacaagaagctgggaggctcttcagggaaagcccttccccctggctttgcatggcttcccgggggcgcttgacttgcgtgtttaacatcaggtgaaatttgcttcaaattaatgggagcaaggtgacctctcagtgagagatgctgccgtcgacactctgtttggagacttgaagaaggacaaagtgacgcgtcatgatggagccagctcaaacgggcacctggcacacatcttcagacatgcggcccaaggagctgttcaacggagggatgtggaggaggtcacttaccgaacccttagaaaccaaagatttccacagaaggtcacccttgaagaagaaccgaaaagatgggtgtaaacctttgtcttggaaccctatgcctttcgaaacatcccagaaacttgatccttgaaacctttaaagaagggcaaagttcccccattcccactttgtggaagggtcctccccttgtgcttggaggatgcttaaaatggcaagaggccaaagcccaagattcaagacggacatggggataaggcccctgctgcgggcagaatggaaggcatttacacttagacatccctgtgcggcgtccggagtccaggtgcacacgtgcaggaggctgtaccagggagtggctggaggggatcaaactcccccaaggcccgaaaggtgcttgcataccacgtaccagagccagggagcgtggcacacacagccttggacattcaagttggttgaagttcaggccagggccttccagctgctcttggggccagagccaagagcctctcagtagagggaggggactgccctgagtggagtattaaagacacttaagaaaaccgctcaaaaaaaaaaaaaa

SEQ ID NO: 151645 - DNA, 381 bp, Homo sapiens; identical to SEQ ID NO: 134427

SEQ ID NO: 151646 - DNA, 377 bp, Homo sapiens; identical to SEQ ID NO: 134428

SEQ ID NO: 151647 - DNA, 379 bp, Homo sapiens; identical to SEQ ID NO: 134429

SEQ ID NO: 151648 - DNA, 520 bp, Homo sapiens; identical to SEQ ID NO: 134430

SEQ ID NO: 151649 - DNA, 502 bp, Homo sapiens; identical to SEQ ID NO: 134431

SEQ ID NO: 151650 - DNA, 1737 bp, Homo sapiens
atgaggtctcaaaagacgtcattgtatttctcactagaagcaaaattctactgcagcttgagaaacgagagaattgcaagttgtgatatcatcaatgatgctggtatacaaacaaagacgctaatgaagcgaagccatgtggcttatgctttgaaaaagcctgtggaacaaggagacagctttgagttagaaagcaagggctttatggccataaccatagctgtgtgtatagaacaaaacctaaggcattcgtcttccctcttcatttgcatgtcaagtacaggacagtctggaactaccaataatgccagctccctgataccatcatatgttttcaccccacctcattttaatctactggacaagcaaggaaggactgcaggaaagtcccactgtggggaggataggaaagagcataacaatgcctgccaccaggaggaagaggccccagatgtcaacccattgcatggtttgcaggcatcgggatcaccgggaaagactcaaagaatcaagtcacaggcactggagggaacaaggctttactcacatagcgaagagacaagatcaggcttaatacgactattgcgcctgcgccagcgccggctgcgagactggggccgtggctgctggtcccgggatatgctaggcggctccctgggctccaggcatgttgcggggtgtaggtgggagtcacggacggttcggggcccgaggtgtccgcaagcgtggcgcagccatgggcggccaggggagagcatggctcagcgcatggtctgggtggacctggagatcacaggattggacatttagaaggtccagattattgagatggcctgtctgataactgactctgatctcatcattttggctgaaggtcctaacctgattataaacacaaccagatggagttgcttggacagcatgtccagattggtgtaaaggagcatcacgggaagtcttggccttaccaagggcagtgaaggagagtaccaattaccattgccagcaggcagagtaatgaatttcctgccctttggtacgaccagccagactccctcccagggctctgtcccacttgccaggaaattaagttccatgaaagataagaagtttccttgacaaaatacatgcccccagttcatgaaacatcttcattatagaataattggatgtgagccactgttaaaaggaactgtgccagaccgctgggtatccagaagaatatgaatttgccaccaaagaaggctgccttctcaatagggccacttgatgacacttagtgaaaacctccaaaaaggttccgttttttcccgaaaataaccatcttccaagaaaaaaaattaggatgaaaaggaaggagggaaaattatagaaaatgggggaaaatgagaagaccgtgagttgatgcccagttatcatgctgccactacatcggttatctggaggcaacttctggtggttttttttttctcacgctgatgggcttggcagaggcaccttcggttaacttgcatctcccagattgattactcaagcagacagcacacggaaatactatttttctcctaatatgctgtttcccattatgacacaacagctcctttggaagtaccaggtcatgtccatcccttggtacatatatgcatttgcttttaaaccatttcttttggttaaataaaataaactaagtaaataaagctagttctattgaaatgcaaaaaaaaaaaaaaaaaaaaa

SEQ ID NO: 151651 - DNA, 611 bp, Homo sapiens; identical to SEQ ID NO: 145358

SEQ ID NO: 151652 - DNA, 517 bp, Homo sapiens; identical to SEQ ID NO: 145495

SEQ ID NO: 151653 - DNA, 702 bp, Homo sapiens; identical to SEQ ID NO: 145496
  misc_feature (1)...(702): n = a,t,c or g

SEQ ID NO: 151654 - DNA, 654 bp, Homo sapiens; identical to SEQ ID NO: 144884
  misc_feature (1)...(654): n = a,t,c or g

SEQ ID NO: 151655 - DNA, 665 bp, Homo sapiens
  misc_feature (1)...(665): n = a,t,c or g
atcgagaccatattccatgtggnggaattccacagactcagagagaacccaccatggtgctcgtctcctgcccgacaagaccaacgtcaaggccggcttggggtaaggtcggcgcgcacgctggcgagtatggtgcggaggccctggagaggatgttcctgtccttccccaccaaccaagacctacttcccgcacttcgaccttgagccacggtttctgcccaggtttaagggccacgggcaagaaggtggccgacgcgctgaccaacgccgtggcgcacgtgggacgacatgcccaaacgcgctgtccgccctgagcgacctgcacgcgcacaagctttcgggtgggacccggttcaactttcaagctcctaaagccacttgccttgcttgggtgaaccttgggccgcccaccttccccggccgagtttcaaccccttggcggttgcaaggcttccctggggacaaagtttcttgggtttcttgttgaagcaccgttgcttgaaccttccaaattaccgttaaagcttggaagccttcggttggccatgctttctttgcccctttgggcctttcccccagcccctcctcccctttcctgcacccgtacccccgtggtctttgaaataaagtcttgagtgggcggcaaaaaaaaaaaaaaaaaaa

SEQ ID NO: 151656 - DNA, 497 bp, Homo sapiens
  misc_feature (1)...(497): n = a,t,c or g
ntttgactttcgataggcattcggcacgagggagcttcagtgctgtgtgttcttggcctccatgctgggggtgccaccaattcccactgtccagggcttccagtggactctccgaggtactgatgtagaaacttccccattcggtgcaccaagagcaacctcacacggtgtgggccaaatgaagagctgccagatcccacagcccttgaagataaggatggtcaaacaaaataatatcatacctggagaaactcagatcttgctaagatttactggttgggaatccaaagttaatgccaagaagcagccgccagttgggatcaaatgtgagcctatggatcaaggaaatgagcaaacaggtggccatgaaacagatggtcatagaattggttcagtggttgtgagtgcagcaacccaagagtgtcttatctgaaataccaccaggaatgtctggacacagtagacaaagttttttcaactggacgccttaggataca

SEQ ID NO: 151657 - DNA, 433 bp, Homo sapiens; identical to SEQ ID NO: 134199
  misc_feature (1)...(433): n = a,t,c or g

SEQ ID NO: 151658 - DNA, 516 bp, Homo sapiens; identical to SEQ ID NO: 134200
  misc_feature (1)...(516): n = a,t,c or g

SEQ ID NO: 151659 - DNA, 406 bp, Homo sapiens; identical to SEQ ID NO: 134201

SEQ ID NO: 151660 - DNA, 439 bp, Homo sapiens; identical to SEQ ID NO: 134202
  misc_feature (1)...(439): n = a,t,c or g

SEQ ID NO: 151661 - DNA, 495 bp, Homo sapiens; identical to SEQ ID NO: 134204

SEQ ID NO: 151662 - DNA, 2679 bp, Homo sapiens
agtgctgtggggagtgatcacatttttcacaacatccctgactccacctcttctgccacaaacgtcagcatggtggtatcagccggcccttggtccagcgagaaggcagagatgaacattctagaaatcaacgagaaattgcgcccccagttggcagagaacaaacagcagttcagaaacctcaaagagagatgttttctaactcaactggccggcttcctggccaaccgacagaagaaatacaagtatgaagagtgtaaagacctcataaaatttatgctgaggaatgagcgacagttcaaggaggagaagcttgcagagcagctgaaacaagctgaggagctcaggcaatataaagtcctggttcactctcaggaacgagagctgacccagttaagggagaagttacgggaagggagagatgcctcccgctcattgaatgagcatctccaggccctcctcactccggatgagccggacaagtcccaggggcaggacctccaagaacagctggctgaggggtgtagactggcacagcaacttgtccaaaagctcagcccagaaaatgatgaagatgaggatgaagatgttcaagttgaggaggatgagaaagtactggaatcatctgcccccagggaggtgcagaaggctgaagagagcaaagtccctgaggactcactggaggaatgtgccatcacttgttcaaatagccacggcccttgtgactccaaccagcctcacaagaacatcaaaatcacatttgaggaagacaaagtcaactcaactgtggttgtagacagaaaatcctctcatgatgaatgtcaggatgctctaaacattctcccagtccctggccccacctcttctgccacaaacgtcagcatggtggtatcagccggccctttgtccagcgagaaggcagagatgaacattctagaaatcaatgagaagttgcgcccccagctggcagagaagaaacagcagttcagaagcctcaaagagaaatgttttgtaactcaactggccggcttcctggccaagcagcagaacaaatacaaatatgaagagtgcaaagacctcataaaatctatgctgaggaatgagctacagttcaaggaggagaagcttgcagagcagctgaagcaagctgaggagctcaggcaatataaagtcctggttcactctcaggaacgagagctgacccagttaagggagaagttacgggaagggagagatgcctcccgctcattgaatgagcatctccaggccctcctcactccggatgagccggacaagtcccaggggcaggacctccaagaacagctggctgaggggtgtagactggcacagcaccttgtccaaaagctcagcccagaaaatgatgaagatgaggatgaagatgttcaagttgaggaggatgagaaagtgctggaatcatcttcccccagggagatgcagaaggctgaagaaagcaaagtccctgaggactcactggaggaatgtgccatcacttgttcaaatagccacggcccttgtgactccaaccagcctcacaagaacatcaaaatcacatttgaggaagacaaagtcaactcatctctggttgtagacagagaatcctctcatgatgaatgtcaggatgctctaaacattctcccagtccctggccccacctcttctgccacaaacgtcagcatggtggtatcagccggccctttgtccagcgagaaggcagagatgaacattctagaaatcaatgagaagttgcgcccccagctggcagagaagaaacagcagttcagaagcctcaaagagaaatgttttgtaactcaagtggcctgcttcctggccaagcagcagaacaaatacaaatatgaagagtgcaaagacctcataaaatctatgctgaggaatgagctacagttcaaggaggagaagcttgcagagcagctgaagcaagctgaggagctcaggcaatataaagtcctggttcactctcaggaacgagagctgacccagttaagggagaagttacgggaagggagagatgcctcccgctcattgaatgagcatctccaggccctcctcactccggatgagccggacaagtcccaggggcaggacctccaagaacagctggctgaggggtgtagactggcacaacaccttgtccaaaagctcagcccagaaaatgataacgatgacgatgaagatgttcaagttgaggtggctgagaaagtgcagaaatcgtcttcccccagggagatgcagaaggctgaagaaaaggaagtccctgaggactcactggaggagtgtgccatcacttgttcaaatagccatggcccttatgactccaaccagccacataggaaaaccaaaatcacatttgaggaagacaaagtcgactcaactctcattggctcatcctctcatgttgaatgggaggatgctgtacacattatcccagaaaatgaaagtgatgatgaggaagaggaagaaaaagggccagtgtctcccaggaatctgcaggagtctgaagaggaggaagtcccccaggagtcctgggatgaaggttattcgactctctcaattcctcctgaaaggacatcggtgggatcaagtgaaaaaggaggaccaagaggcaacaggtcccaggctcagcagggagctgctggctga

SEQ ID NO: 151663 - DNA, 2996 bp, Homo sapiens; identical to SEQ ID NO: 134205

SEQ ID NO: 151664 - DNA, 1041 bp, Homo sapiens
cccttgaagataaggatggtcaaacaaaataatatcatacctggagaaactcagatcttggtaagatttactggttgggaatccaaagttaatgccaagaagcagccgccagttgggatcaaatgtgagcctatggatcaagaatatgaagagtgcaaagacctcataaaatctatgctgaggaatgagcgacagttcaaggaggagaagcttgcagagcagctcaagcaagctgaggagctcagcatggtggtatcagccggcccttggtccagcgagaaggcagagatgaacattctagaaatcaacgagaaattgcgcccccagttggcagagaacaaacagcagttcggaaacctcaaagagagatgttttgtaactcaactggccggcttcctggccaaccagcagaagaaatacaactatgaagagtgtaaagacctcataaaatttatgctgaggaatgagcgacagttcaaggaggagaagcttgcagagcagctcaagcaagctgaggagctcaggcaatataaagtcctggttcactctcaggaacgagagctgacccagttaagggagaagttacgggaagggagagatgcctcccgctcattgaatgagcatctccaggccctcctcactctggatgagccggacaagtcccaggggcaggacctccaagaacagctggctgaggggtgtagactggcacagcaccttgtccaaaagctcagcccagaaaatgacgaagatgaggatgaagatgttcaagttgaggaggctgagaaagtgcagaaatcatctgcccccagggaggtgcagaagactgaagagagcaaagtccctgaggactcactggaggaatgtgccatcacttgttcaaatagccacggcccttgtgactccaaccagcctcacaagaacatcaaaatcacatttgaggaagacgaagtcaactcaactctggttgtagacagagaatcctctcatgatgaatgtcaggatgctctaaacattctcccagcctgcatgacagagtga

SEQ ID NO: 151665 - DNA, 3615 bp, Homo sapiens
atgagtcagtcagtccaagataacctgaaggagttgaataacatctatccagatcacagctcctcgccagcaatggaacaaagcaggatggagaatgactttgatgagctgacagaagtaggcttcagaaagttggtaataacaaacttctctgagctaaaggaggatgtgcgaactcatcgcaaggaagctaaaaaccttgaaaaaagattagacgaatggccaaccagaatgaacagcgtagagaagaccttaaatgacctgatggagctgaaaaccatggcacgagaactacgtgatgcatgcacaagcttcagtagtcaattcgatcaagtgcaagaaacgcccttgaagataaggatggtcaaacaaaataatattatatctgcagaaagtcagatcttggtaagatttactagttgggaatccaatgttaatgccaagaagcagctgccagttgggatcaaatgtgagcctatggatcaagaatgcatccctggctcccgtgcgtgcacacttctagttaggtttagcaatggagggcccccgatggatcctggaagtgagaggaaggacctgctgcagctgggaggggagctggcccggacatcacgagctgtccaggaggcgggcctgggactgagcacgggcctgtggctggcagagagccgggccaaggcagccctggagaagcaggccctgctgcaggcccagctggaggagcagctgcgggacaagaaggacctggcccagcagcagatgcaaagtgacctggacaaggctgacctcagtgccagagtgacagagctgggcctggcagtgaagcgtcttcagaagcagaatccggagaaggatcaggtcaacacggacctcactgagaagcttgaggccctggtccagatgctgcctctggaatcccagctgcccatccccactagtgggacactcactcccccagggtacagcctggtttggtcacccctctgtgtggggcctggcctgggttctaggtccggctctcctccaatcgactgtgtgacctggggcaagaccgacagcaccatgcaggcccacgaggacgcccagcgcgaggtgcagcggctgcggagcgccaaagagctcctgagaaggctcagcggcatgctgatggaagtggaagagcctgaagtcttgcaggactcactggatagatgttattcgactccgtcaatgtactttgaactacctgactcattccagcactacagaagtgtgttttactcatttgaggaacagcacatcagcttcgcccttgacgtggacaataggtttcttactttgatgggaacaagtctccacctggtcttccagatgggagtcatattcccacacctcgcaccgccgggcaagctaggctcctcctgcacgcacgaaggaggattccacaggaacgaaccacgacccccaaggtttcgcagttggcatcttgggtctcccttggtgacagtacctgcaccctgcgggcagcctgcgctggctgtgaaccacactgccgcctacttcctcttctatgttcccgctctgtccacagtcccctctgaagactcccgtgaagcaggaattaaaaaggaccaagaagaggaagaagaccaaggcccaccatgccccaggctcagcagggagctgctggaggcagtagagcctgaagtcttgcaggactcactggatagatgttattcaactccttccagttgtcttgaacagcctgactcctgcctgccctatggaagttccttttatgcattggaggaaaaacatgttggcttttctcttgacgtgggaggttatcttgaactgactgactcatgccagccctacagaagtgccttttacatattggagcaacagcgtgttggctgggctcttgacatggatgaaattgaaaagtaccaagaagtggaagaagaccaagacccatcatgccccaggctcagcagggagctgctggatgagaaagagcctgaagtcttgcaggactcactggatagatgttattcgactccttcaggttatcttgaactgcctgacttaggccagccctacagaagtgctgtttactcattggaggaacagtaccttggcttggctcttgacgtggacagtgagtaccttactatgaagatgaggaaactgaagctcagagaagtgaagacactggtgcagggtcacacagctggtgaggggctgcccccaccccagagcctggagttgcagaggcagctacaggaggagcaggcctcctaccagcgcaagctgcaggcctacctggagggccagcagcggcaggcccagctttacaagaagaggtactcggagctggagcagcagctgctggagagatccggagagctggagcagcagcggctaagggacgcagagcacagccaagacctgcagagtgccctcatccggctggaggaggagccgcagaggtgggggcacaacagggagggccagggctggcagcatggccccctgggcgagcgcctactgatcccctttgccctattcaggagtgccagcctggcccaggtgaaagccatgctccgagaacatctggaccaggcaggctcggccaaccaggctctgagtgaggacatacaaaaggtgaccaatgactggacacgcagccgcaaggagctggagcaccgggaggcggcatggaggcgcgaggaggagtctttcaatgcctacttcagcaagaagcacaatcacctgctcctgctatggaggcaggtggtggggttccggcggctggtcagcgaggtgaagatgttcaccgagagcatggtggtatcagctggcccttggtccagcgagaaggcagagacgaacattttagaaatcaacgagaaattgcgcccccagctggcagagaacaaacagcagttcagaaacctcaaagagaaatgttttgtaactcaactggccggcttcctggccaaccgacagaagaaatacaagtatgaagagtgtaaagacctcataaaatttatgctgaggaatgagcgacagttcaaggaggagaagcttgcagagcagctcaagcaagctgaggagctcaggcaatataaagtcctggttcactctcaggaacgggagctgacccagttaagggagaagttacgggaagggagagatgcctcccgctcattgaatcagcatctccaggccctcctcactccggataagccagacaagtcccaggggcaggacctccaagaacagctggctgaggggtgtagactggcacagcaacttttccaaaagctcagcccagaaaatgacgaagatgaggatgaagatgttcaagttgaggaggctgagaaagtactggaatcatctgcccccagggaggtgcagaaggctgaagaaagcaaagtccctgaggactcactggaggaatgtgccatcacttgttcaaatagccacggcccttgtgactccaaccagcctcacaagaacatcaacatcacctttgaggaagacaaagtcaactcagctctggttgtagacagagaatcctctcatgatgaatgtcaggatgctgtaaacattctcccagtcagaaactag

SEQ ID NO: 151666 - DNA, 1271 bp, Homo sapiens
gtagaactagagtttcattcaacctacatgtgcctataggtcctccctgtggcaatgacatctctcagctcagtaatggccacttggagcaggaatatgatctttatatggaagactcagtggatccttatcaccttcatagaaagaaattgaaaagtaccaagaagtggaagaagaccaagacccatcatgccccaggtaactttgagcaattatggatgcttaattctgtgttgacacctggagatgccagggaggtgcagaaggctgaagagagcaaagtccctgaggactcactggaggaatgtgccatcacttgttcaaatagccacggcccttgtgactccaaccagcctcacaagaacatcaaaatcacatttgaggaagacgaagtcaactcaactctggttgtagacagagaatcctctcatgatgaatgtcaggatgctctaaacattctcccagaaattgaaaagtaccaagaagtggaagaagaccaagacccatcatgccccagggaggtgcagaaggctgaagagagcaaagtccctgaggactcactggaggaatgtgccatcacttgttcaaatagccacggcccttgtgactccaaccagcctcacaagaacatcaaaatcacatttgaggggtaccgagctcgaattcgtatcatgggagccttgggaggaccccgaatcactgatggaattgcgcagtgcatggagatggctcagcaggatgagggtcctgcctgcggcaatgacgtctctcgggtcagtaaggggcacttggaacaggaatatcacccctatctggaagaccaggtggaggcttatcaccttcacagtaaggtactcactgtccacgtcaagagccaagccaaggtaccttccatgggccctgacccctccttttcagaggctccaaagctcagcagggagctgctggatgagaaagggcctgaagtcttgcaggactcactggatagatgttattcaactccttcaggttgtcttgaactgactgactcatgccagccctacagaagtgccttttatgtattggagcaacagcatgttggcttggctgttgacatggatgatccccgacagtaccttggcttggctcttgacgtggacagtgagtaccttactgtgaaggtgataagcctccacgtggtcttccagataggggtgatattcctgttccaagtgccccttactgacccgagagacgtcattgccgcaggcaggacctatgggcgcatatag

SEQ ID NO: 151667 - DNA, 493 bp, Homo sapiens
  misc_feature (1)...(493): n = a,t,c or g
ttcaagncaccttgaagagttcgaatacantctatccagtgagtcctgcaagacttcaggccctttctcatccagcagctctctgctgagcctgggacctgttgcctcgtggtcctcctttttcacttgatcccaccgatgtcctgcaaataaattcagatgggccctcttacattaagcagttcttccttgcacacagaaacattcctctgtccaatcctaacacagggacatcagtcttgtcagtgtgagaacaggagactttgagagaaatattccagtaggcctgaggtcaagtcttgagaaaactggcttgggttctttcatgagccttgggcaaaattcccctgtgttggaatgttatcttccctatgtgctctgtcctaggtttatgtacacaaatgagcaattttttccccaataaattgtaggcaaatagttctaccccctcataggagagatacttcaatattaggcttttctcactcgtgcc

SEQ ID NO: 151668 - DNA, 1236 bp, Homo sapiens; identical to SEQ ID NO: 126481

SEQ ID NO: 151669 - DNA, 2584 bp, Homo sapiens
ctcgagatcgctaggccgtgtggaggaattccccacagaaatgtgattgataacagtaaagccacactactcaagtgcctgaaatacccctcattgtcttcttcaggtggcaagggctctggaacagccacataaagcccttgaagataaggatggtcaaacaaaataatatcatacctggagaaactcagatcttggtaagatttactggttgggaatccaaagttaatgccaagaagcagccgccagttgggatcaaatgtgagcctatggatcaagacggttacctggcacgctggccacaatctacctcactcttatcagagtctgcgctactgacagtgctttcagctctgagttgaggcacctcgaaccttgtttttgtggtgaaggatcctaaagtgctgtggggagtgatcacatttttgacaacatccctgactccacctcttctgccacaaacgtcagcatggtggtatcagccggccctttgtccagcgagaaggcagagatgaacattctagaaatcaacgagaaattgcatccccagctggcagagaagaaacagcagttcagaaacctcaaagagaaatgttttgtaactcaactggcctgcttcctggccaaccagcagaacaaatacaaaaatgaagagtgcaaagacctcataaaatctatgctgaggaatgagcgacagttcaaggaggagaagcttgcagagcagctcaagcaagctgaggagctcaggcaatataaagtcctggttcactctcaggaacgagagctgacccagttaagggagaagttacgggaagggagagatgcctcctgctcattgaatcagcatctccaggccctcctcactccggatgagccagacaagtcccaggggcaggacctccaagaacagctggctgaggggtgtagactggcacagcaccttgtccaaaagctcagcccagaaaatgacaacgatgacgatgaagatgttcaagttgaggtggctgagaaagtgcagaaatcgtctgcccccagggagatgccgaaggctgaagaaaaggaagtccctgaggactcactggaggaatgtgccatcacttgttcaaatagccatggcccttatgactccaaccagccacataggaaaaccaaaatcacatttgaggaagacaaagtcgactcaactctcattggctcatcctctcatgttgaatgggaggatgctgtacacattatcccagaaaatgaaagtgatgatgaggaagaggaagaaaaagggccagtgtctcccaggaatctgcaggagtctgaagaggaggaagtcccccaggagtcctgggatgaaggttattcgactctctcaattcctcctgaaatgttggcctcgtacaagtcttacagcggcacatttcactcattagaggaacagcaagtctgcatggctgttgacataggcggtgagtactccattgtgaaggtgataaagctccagttcatggcccagtctcaggccatgcccgtgccaacctggactgactgtcacgacattgaactcaaggcaggacatcggtgggatcaagtgaaaaaggaggaccaagaggcaacaggtcccaggctcagcagggagctgctggatgagaaagggcctgaagtcttgcaggactcactggatagatgttattcaactccttcaggttatcttgaactgactgactcatgccagccctacagaagtgccttttacatattggagcaacagcgtgttggctgggctcttgacatggatggatataggaggacgtgcccccgaagctgctccgtccctccaccccctgggatgccacagaacacccgccagcgagtttcttccccagcgcccacgagagttgggctgcgggcggcagcggcaggcgaagaatccagcgcggggaactcaggccccggcggtgcacgaccccccacagcccccacccgcccccgcgctcgcgcaacaaaacttgccacggccgcgcctcgacccagctgtgcgcccgcgggtcccggattcaccgcccgcccagcctggcgcggcgccctcacctcagaaacgctgggtggacttcgcgtaacttcccattcacagggcagccggcagccgcgccgccgcgcctcggcccagctcctggcgccgcagatcgcccgtcccgcgttcccaaaagcaccgcgctcgctcagaagctcgggcagcctcgcgaccctcacctacgcctcccagtaccgccgctgtctcaaccgccacccagcccctcgcctgcgcctgcgcctgcagcccactggctcctcaggatcccgatgggcgtgtcaggataacccaaggcgcaggcgcggcggggccttaaagggacccggcggcctcttctgcacaacgggttcgagcaggttaggggccgcgcaggcggaggaaaggagtaacccaggggaaggaccgagtgcagcggggacggggaaatccctctctcccctccgcctgtctttcaaagcaccagccctcgaccctccaaatcgctggtttccccggccacttgaacagcccctgccaggttga

SEQ ID NO: 151670 - DNA, 2562 bp, Homo sapiens
agaaatcctctggggcattttctttgaactgatgggaacaataaggcataactgtttgcacaaacttgggataaatgattttgggataacgatctaccagaatagggatatttcacccttggttctgagatgcaaaccaaagaatatcatgaccagctttcaggcctcctgaagtatatccctcaaattgtcctgttctcatgctgaggagcctgagatccctgtgtggggattagacagtggactgttatgggtgtaggtgaattggcttattttgtctgtccctgcctgaatgtattgcaggaattaaaaaggaccaagaagaggaagaagaccaaggcccaccatgccccaggtaactgagcaattgtgaacagctacttctgtgttgacatctggagactcctggttcagggaaaacagagcgggctgacattatcgattacatcttttcaaccaagcctgaattattcctactaacattgctgttggttttcattgcagtagatatttaggtttccatttcttcctccccttatcatttactaacctactgtaggtggaccagacttcaaaaactgtattctcatggcgactgcatggaaacttgagcacattttatggaaaattattgagcacagtcttttcatgatccctgtatgctgtgtgtcctgagggcactaactcagagtgtcctgttactccctcatcagtgtgtcacctggacaattcactgagctcgttctctctctctgtgtgtgtgtgtgtgtgtgtgtgtgtgtgtgtgtctatctgtctttctctttcattcttttccatttggccctgttctgtcccaacatgaaggcaataatttgttacctcattaatggatctatccttttagttttttaaccacttccctatgctacccatgaaacctagttggggctctgttgtgtctgatttcccctggcttattctttactttttcctccttttccaggctcagcagggagctgctggaggtagtagagcctgaagtcttgcaggactcactggatagatgttattcaactccttccagttgtcttgaacagcctgactcctgccagccctatggaagttccttttatgcattggaggaaaaacatgttggcttttctcttgatgtgggagaaattgaaaagaaggggaaggggaagaaaagaaggggaagaagatcaacgaagaaaagaaggagaaggggaagaaaagaaggggaagaagatcaaaacccaccatgccccaggctcagcagggagctgctggatgagaaagggcctgaagtcttgcaggactcactggatagatgttattcaactccttcaggttatcttgaactgactgactcatgccagccctacagaagtgccttttacatattggagcaacagcgtgttggctgggctcttgacatggatgaaattgaaaagtaccaagaagtggaagaagaccaagacccatcatgccccaggtaactttgagcaattacggatgcttaattctgtgttgacacctggagatgccaggtccagggaaaacaagagtgtgttcaatttcatgttttcaacgaaggttgaattactcctactgacattgctgttggttttcattgcagtagatgtttaggtttccatttcttcctccccttatcatttactcacttactataggttgaccatacctcaaaggctgtatggcaactgcatggaatcttgagcaagtttatggaaaattattgagcccactcttttcatgatcactgttcgctgtgtgtcccgagggcactaactcagagtgtcctttgaccccttcatcagtgtgtcacccggccaattcgctgagctcactttctcctctctctctctctccctctccctgtctttctctttcattcttttctacctggccctggtctatcccaacataaaggcaataattcattacctcattaatggatctgtcctttttctttttgaacagttccttatgttagccatgaaatctagctggggctgtgtggtttctgattccccctggcttattctttactttttcctacttttccaggctcagcagggagctgctggatgagaaagagcctgaagtcttgcaggactcactggatagatgttattcgactccttcaggttatcttgaactgcctgacttaggccagccctacagcagtgctgtttactcattggaggaacagtaccttggcttggctcttgacgtggacagaattaaaaaggaccaagaagaggaagaagaccaaggcccaccatgccccaggctcagcagggagctcctggaggtagtagagcctgaagtcttgcaggactcactggatagatgttattcaactccttccagttgtcttgaacagcctgactcctgccagccctatggaagttccttttatgcattggaggaaaaacatgttggcttttctcttgacgtgggagaaattgaaaagaaggggaaggggaagaaaagaaggggaagaagatcaaaaaaaaaaaaaaaagggcggccgct

SEQ ID NO: 151671 - DNA, 5261 bp, Homo sapiens
ggatgagacagcggcggtactgggaggcgtaggtgagggtcgcgaggctgtccgagcttctgagcgagcgcggtgcttttgggaacgcgggacgggcgatctgcggcgccaggagctgggccgaggcgcggcggcgcggctgccggctgccctgtgaatgggaagttacgcgaagtccacccagcgtttctgaggcaatctgaaggcaaatcctgtttagacccaggcgaaggttcccggtgacccgggctctcaccagccaattgtcccttgccgtcctcctgagggtgcctggagcttaagcactgtgtgctcttggcctccacactggggatgccgctgactcccactgtccagggcttccagtggattctccgaggccctgatgtagaaacttccccattgggtgcaccaagagcaggctcacatggtgtgggctgacatcaagagctgccagatccaacaggaccttgtggtggacgccttctttcactgaccattcatggggtgactattaggtaccatgccctgctctgggctagaggccccataatgagtaaatctcaggtcctgggggagtgggagccagtgcaaggagggaagtccagtgagaatgacaaatggacgatgtcagacccaggggctgaggcccccacctgcagccgggcagcttctggagtggacaaggagcagcagggaaggtggcaagggctctggaacagccacataaagcccttgaagataaggatggtcaaacaaaataatatcatacctggagaaactcagatcttgctaagatttactggttgggaatccaaagttaatgccaagaagcagctgccagttgggatcaaatgtgagcctatggatcaagaaaatgagcaaacaggtggccatgaaacagatggtcatagaattgtttcagtgcttatccactttccactcatttccatcctgtcttacgccacttggggcttgtcccttctagaatgcatccctggctcccctgtgtgcacacttctagttaggtttagcaatgtgggcacccgatggagcctggaagtgagaggaagcccatgtggttttggcagcaataaggtgtgtggggtaatgactcctgaaattaaaatggtgtgtgtatgtgaaggaaaggcgggcaaagctgtggggagcggtggagtggaaggaacaaaggaggtcagtactgggaacgctgaaggtcccgtccgccacgaggctgtagatggaggtgtccacctggcctttgcgttgctgcaggggctcctctggtcgctgctgctggggccgcctgggctggcgggttggggaggcggagagctcgatgcagtccctgactccacctcttctgccacaaacgtcagcatggtggtatcagccggcccttggtccagcgagaaggcagagatgaacattctagaaatcaacgagaaattgcgcccccagttggcagagaacaaacagcagttcagaaacctcaaagagagatgttttctaactcaactggccggcttcctggccaaccgacagaagaaatacaagtatgaagagtgtaaagacctcataaaatttatgctgaggaatgagcgacagttcaaggaggagaagcttgcagagcagctgaagcaagctgaggagctcaggcaatataaagtcctggttcactctcaggaacgagagctgacccagttaagggagaagttacgggaagggagagatgcctcccgctcattgaatgagcatctccaggccctcctcactccggatgagccggacaagtcccaggggcaggacctccaagaacagctggctgaggggtgtagactggcacagcaccttgtccaaaagctcagcccagaaaatgacgaagatgaggatgaagatgttcaagttgaggaggatgagaaagtactggaatcatctgcccccagggaggtgcagaaggctgaagagagcaaagtccctgaggactcactggaggaatgtgccatcacttgttcaaatagccacggcccttgtgactccatccagcctcacaagaacatcaaaatcacatttgaggaagacaaagtcaactcatctctggttgtagacagagaatcctctcatgatggatgtcaggatgctctaaacattctcccagtccctggccccacctcttctgccacaaacgtcagcatggtggtatcagccggccctttgtccagcgagaaggcagagatgaacattctagaaatcaatgagaaattgtgcccccagctggcagagaagaaacagcagttcagaagcctcaaagagaaatgttttgtaactcaagtggcctgcttcctggccaagcagcagaacaaatacaaatatgaagagtgcaaagacctcataaaatctatgctgaggaatgagcgacagttcaaggaggagaagcttgcagagcagctgaagcaagctgaggagctcaggcaatataaagtcctggttcactctcaggaacgagagctgacccagttaagggagaagttacgggaagggagagatgcctcccgctcattgaatgagcatctccaggccctcctcactccggatgagccggacaagtcccaggggcaggacctccaagaacagctggctgaggggtgtagactggcacagcaccttgtccaaaagctcagcccagaaaatgataacgatgacgatgaagatgttcaagttgaggtggctgagaaagtgcagaaatcatctgcccccagggagatgcagaaggctgaagaaaaggaagtccctgaggactcactggaggaatgtgccatcacttattcaaatagccatggctcttatgactccaaccagccacataggaaaaccaaaatcacatttgaggaagacaaagtcgactcaactctcattggctcatcctctcatgttgaatgggaggatgctgtacacattattccagaaaatgaaagtgatgatgaggaagaggaagaaaaagggccagtgtctcccaggaatctgcaggagtctgaagaggaggaagtcccccaggagtcctgggatgaaggttattcgactctctcaattcctcctgaaatgttggcctcgtaccagtcttacagcagcacatttcactcattagaggaacagcaagtctgcatggctgttgacataggcagtgagtactccattgtgaaggtgataaagctccagttcatggcccaggccagtgtcacccttgtctacctctcagtgaaagatgtgacccaggtttcactgaatttattcccattttctgtgtcttctaagttcgcttgttttagctcatctgtccgtcatgttcctggacatcggtgggatcaagtgaaaaaggaggaccaagaggcaacaggtcccagcagggagctgctggatgagaaagggcctgaagtcttgcaggactcacaggatagatgttattcaactccttcaggttgtcttgaactgactgactcatgccagccctacagaagtgccttttacatattggagcaacagcgtgttggcttggctattgacatggatgaaattgaaaagtaccaagaagtggaagaagaccaagacccatcatgccccaggctcagcagggagctgctggatgagaaagagcctgaagtcttgcaggactcactggatagatgttattcgactccttcaggttatcttgaactgcctgacttaggccagccctacagcagtgctgtttactcattggaggaacagtaccttggcttggctcttgacgtggacagaattaaaaaggaccaagaagaggaagaagacgaagaccaagacccactcatgccccaggctcagcagggagctgctggaggtagtagagcctgaagtcttgcaggactcactggatagatgttattcaactccttccagttgtcttgaacagcctgactcctgccagccctatggaagttccttttatgcattggaggaaaaacatgttggcttttctcttgacgtgggagaaattgaaaagaaggggaaggggaagaaaagaaggggaagaagatcaatgaagaaaagaaggagaaggggaagaaaagaaggggaagaagatcaaaacccaccatgccccaggctcagcagggagctgctggatgagaaaagggcctgaagtcttgcaggactcactggatagatgttattcaactccttcaggttgtcttgaactgactgactcatgccagccctacagaagtgccttttatgtattggagcaacagcgtgttggcttcgcttttgacatggatgaaattgaaaagtaccaagaagtggaagaagaccaagacccatcatgccccaggctcagcagggagctgctggcgtgagaaagagcctgaagtcttgcaggactcactggatagatgttattcgattccttcaggttatcttgagctgcctgacttaggccagccctacagcagtgctgtttactcattggaggaacagtaccttggcttggctcttgacgtggacagaattaaaaaggacgaagaagaggaagaagaccaagacccaccatgccccaggctcagcagggagctgctggaggtagtagagcctgaagtcttgcaggactcactggatagatgttattcaactccttccagttgtcttgaacagcctgactcctgccagccctatggaagttcctttttatgcattggaggaaaaacatgttggcttttctcttgacgtgggagaaattgaaaagaaggggaaggggaagaaaagaaggggaagaagatcaaagaaggaaagaagagggggacgaaaagaaggggaagaagaggaaaacccaccatgccccaggctcagcagggagctgctggatgagaaagggcctgaagtcttgcaggactcactggatagatgatattccactccttcagggtggcttgaactgactgactcatgccagccctacagaagtgccttttatgtattggagcaacagcatgttggcttggctcttgacgtggacagtgagtaccttactgtgaaggtgataagcctacacctggtcttacagataggggtgatattcctgttccaagtgccccttactgacccgagagacgtcattgccgcaggcaggacctatgggcgcatataggttgtaatgaaactgtagtctcagttggaagcctatacatgaaatgggtcagtgagcaagggtctattcctagtctccagcc

SEQ ID NO: 151672 - DNA, 4805 bp, Homo sapiens
atggataagcctcgcccagggaaaaccaccttcgtgatcatggtatctcccctgccagccccatatacctcaccctttacacacatggtcacttgccccgcgcacccccgagccttcctagccctgacacacagctgggaccctcaggtccgaccagcggtcctgaacccgctcccacggcacgggagctccttcgtggtgaaacagccagtggcgaagcagcagcccctgcgctgcctcatctacatagaagtcgccctatccgtgatgtcaccgacagcgccttcctcgtcccgaagcccctggaaacgccccggtctgcgacccgggttcgagcagccagggggctcaagggaagctgaacgcctggtgggctcccgggatggctcttcccgttctttgcacagccttcacccagtgagggagcctgtgccctccctgctcagtcgcattcggggcgctgcggagcttccgctgccttcttcggatcctgcgttcggcaccggggctccaccagggcagggatcgtggcaatataaagtcctggttcacgctcaggaacgagagctgacccagttaagggagaagttgcgggaagggagagatgcctcccgctcattgaatgagcatctccaggccctcctcactccggatgagccggacaagtcccaggggcaggacctccaagaacagctggctgaggggtgtagactggcacagcaccttgtccaaaagctcagcccagaaaatgacaacgatgacgatgaagatgtttcaaagttgaggtggctgagaaagtgccaaaaatcgtctgcccccagggagatgcagaaggctgaagaaaaggaagtccctgaggactcactggaggaatgtgccatcacttgttcaaatagccatggcccttatgactccaaccagccacataagaaaaccaaaatcacatttgaggaagacaaagtcgactcaactctcattggctcatcctctcatgttgaatgggaggatgctgtacacattattccagaaaatgaaagtgatgatgaggaagaggaagaaaaagggccagtgtctcccaggaatctgcaggagtctgaagaggaggaagtcccccaggagtcctgggatgaaggttattcgactctctcaattcctcctgaaatgttggcctcgtacaagtcttacagcagcacatttcactcattagaggaacagcaagtctgcatggctgttgacataggcagacatcggtgggatcaagtgaaaaaggaggaccaagaggcaacaggtcacaggctcagcagagagctgctggatgagaaagggcctgaagtcttgcaggactcactggatagatggtattcaactccttcagggtgcccttgactgactgattattgccaaccctacagaagtgcctttttacattattggagccaacagcgtattggcttggctgttgacatggatgaaattgaaaagtaccaagaagtggaagaagaccaagacccatcatgccccaggctcagcagggagctgctggatgagaaagagcctgaagtcttgcaggactcactggatagatgttattcgactccttcaggttatcttgaactgcctgacttaggccagccctacagcagtgctgtttactcattggaggaacagtaccttggcttggctcttgacgtggacagaactaaaaaggaccaagaagaggaagaagaccaaggcccaccatgccccaggctcagcagggagctgctggaggtagtagagcctgaagtcttgcaggactcactggatagatgttattcaactccttccagttgtcttgaacagcctgactcctgccagccctatggaagttccttttatgcattggaggaaaaacatgttggcttttctcttgacgtgggagaaattgaaaagaaggggaaggggaagaaaagaaggggaagaagatcaaagaagaaaagaagaaggggaagaaaagaaggggaagaagatcaaaacccaccatgccccaggctcagcagggagctgctggctgagaaagagcctgaagtcttgcaggactcactggatagatggtattcgactccttcagtttatcttggactgactgacccatgccagccctacagaagtgccttttacgtattggagcaacagcgtgttggcttggctgttgacatggatgaaattgaaaagtaccaagaagtggaagaagaccaagacccatcatgccccaggctcagcagggagctgctggctgagaaagagcctgaagtcttgcaggactcactggatagatggtattcgactccttcagtttatcttggactgactgacccatgccagccctacagaagtgccttttacgtattggagcaacagcgtgttggcttggctgttgacatggatgaaattgaaaagtaccaagaagtggaagaagaccaagacccatcatgccccaggctcagcagggagctgctggatgagaaagagcctgaaagtcttgcaggactcactgggtagatgttattcgactccttcaggttatcttgaactgcctgacttaggccagccctacagcagtgctgtttactcattggaggaacagtaccttggcttggctcttgacgtggacagaattaaaaaggaccaagaagaggaaagcaagaccaaggcccaccgtgccccagggctcagcagggagctgctggaggtagtagagcctgaagtcttgcagggactcactggatagatgttattcaactccttccagttgtcttgaacagcctgactcctgccagccctacggaagttccttttatgcattggaggtaaaaacatgttgggcttttctcttgacgtgggaggaaattgaaaagaaggggaaggggaagaaaagaaggggaagaagatcaacgaagaaaagaaggagaaggggaagaaaagaaggggaagaagatcaaaacccaccatgccccaggctcagcggtgtgctgatggaagtggaagagcctgaaatcttgcaggactcactgggatagatattattcgactccatcaatgtactttgaactacctgactcattccagcactagagaagtgtgttttactcatttgaggaacagcacatcagctttgcccttgacatggacaataggttttttactttgacggtgacaagtctccacctggtcttccagatgggagtcatattcccacaataagcagcccgtactaagccgagaggtgtcattcctgcaggcaggacctataggcacctgaagattttgaatgaaactatagttccatttggaagcccagacataggatgggtcagtgggcatggctctattcctattctcagagcatgtccagtggcaacctgtgctcagtctgaagacaatggacccacgttaggtgtgacacgttcacataactgtgtcagcacatgccgggagtgyatcagtcggtacattttaatttgaaccacgtatctctgggtagctacaaaattcctcagggatttcattttgcaggcatgtctctgagcttctatacctgctcaaggtcagtgtcatctttgtgtttagctcatccaaaggtgttaccctgggtttcaatgaacctaacctcattctttgtgtctttcagtgttgggcttgttttaggctgatccatctgttaacacagggaggggatccttgggctgagggattgtatttcaggaaccaccaactgctctttggacaattgtttaacccgctagggctcctttgggttagaggaaggccacagtccttcagcctccaattggtgtcagtacttaggaagaccacagctagatggacaaacagcattgggaggccttagccctgctcctctcaattccatcctgtagagaacaggagtcaggagccgctggcaggagacagcatgtcacccaggactctgccggtgcagaatatgaacaatgccatgttcttgcagaaaacgcttagcctgagtttcataggaggtaatcaccagacaactgcagaatgtagaacactgagcaggacaactgacctgtctccttcacatagtccatatcaccacaaatcacacaacaaaaaggagaaagagatattttggggttcaaaaaaaagtaaaaagataatatagctgcatttctttagttattttgaaccccaaatatttcctcatctttttgttgttgtcatggatggtggtgacatggacttgtttatagaagacaggtcagctgtctggctcaatgatctacatttctgaagttgtctgaaaatgtcttcatgattaaattcagcctaaacgttttgccaggaacactgcagagacaatgctgtgagtttccaacctcagcccatctgcgggcagagaaggtctagtttgtccatcaccgttatgatatcaggactggttacttggttaaggaggggtctaggagatctgtcccttttagagacaccttacttacaatgaagtacttgggaaagcggttttcaagagtataaatatcctgtattctaatgatcatcctctaaacattttatcatttattaatcctccctgcctgtgtctattattatatacatatctctacgctgcaaattttgggtctcaatttttactgtgcctttgtttttactagtgtctgctgttgcaaaaagaagaaaacattctctgcctgagttttaatttttgtccaaagttaattttaatctatacaattaaaaccttttgcctatcaaaaaaaaaaaaaaaaaaa

SEQ ID NO: 151673 - DNA, 458 bp, Homo sapiens; identical to SEQ ID NO: 145730

SEQ ID NO: 151674 - DNA, 2663 bp, Homo sapiens; identical to SEQ ID NO: 145731

SEQ ID NO: 151675 - DNA, 484 bp, Homo sapiens; identical to SEQ ID NO: 133052

SEQ ID NO: 151676 - DNA, 1438 bp, Homo sapiens
  misc_feature (1)...(1438): n = a,t,c or g
cgcgggccggnnngnaattgnaaatcgtacggcgttgaattcggcacgaggagacgcacgcagctgactttgtcttctccgcacgactgttacagaggtctccagagccttctctctcctgtgcaaaatggcaactcttaaggaaaaactcattgcaccagttgcggaagaagaggcaacagttccaaacaataagatcacctgtagtgggtgttggacaagttggtatggcagtgtgctatcagcattcctgggaaagtctcctggcctgatgaactttgctcttgtggatgttttggaagataagcttaaaggagaaatgatggatctgcagcatgggagcttatttcttcagacaccctaaaattgtgggcaggataaagattatttctgtggaccgccaattcctaagatttgtagtgggtaactgcagggagtcccgtcagccacgaaagggagagtccggctcaaatccggttgcagagaaatggttaatgtccttcaaattcatttattcctcaagatcgtccaagtacagtccctgatttgcatcataattggtggtttcaacccccagttggacattcctacgtatgttaccctgggaaactaaagtgggattacccaaacacccgcgtgattggaagtggatgtaatctggattcctgctagatttcgctaccttatggctgaaaaaacttggcatttcatcccagcaagctgcccatggatggaattttggggggaacatggcgactcaagtgtgggcttggtgttggaatggtgtgaatgtggcaggtgtttctctccaggaattgaatcccagaaatggggaactgacaatgatagtgaaaaatgggaaggaagtgcataaggatggtgggttgaaaagtccctatgaagtcatccaagctaaaaggatatccccaactggggctatttggatttaagtgtggctgaatcttattgaattccatgttgaaaaatcctatcccaggattccatcccgtgtcaaccaatggttaaagggggatgtatggccattggagaatgaagtcttccctggagcctttccatgtatcctcaaatgccccggggattaaccagcgttatcaacccagaagcttaaaggatgatgaggttgctcagcttcaagaaaagtgcagataccctgtggggacatccagaaggaccttaaaagacctgtgactagtgagctctaggctgtagaaatttaaaaactacaatgtgattaactcgagcctttagttttcgatccatggtacatggatcacaagtttgctttgatcttcttcaaatattgtgaatttgggctcacagaattcaaaagcctatgcttggtttaatgcttggaatcttgagcttcttggaacaaataaaattaactattgtagtgtgaaaaaaaaaaaaaaaaaaa

SEQ ID NO: 151677 - DNA, 1209 bp, Homo sapiens; identical to SEQ ID NO: 145735

SEQ ID NO: 151678 - DNA, 636 bp, Homo sapiens; identical to SEQ ID NO: 122208

SEQ ID NO: 151679 - DNA, 168 bp, Homo sapiens; identical to SEQ ID NO: 132936

SEQ ID NO: 151680 - DNA, 249 bp, Homo sapiens
aatattattctgacttggttcccttatcatacattgagagctccaaaggacatttgctcctttctgcagtgataggacaagaccacgacttttcagaatccagtgaggaggaggcgcccgcagaagcctcgagcggggcactgagaagcaagcatggtgagaagggtttcagcagtagtgacttttcagacctgagtaatggagaagagcttcaggaaacctgcagctcatccctaagaagagggtcag

SEQ ID NO: 151681 - DNA, 2671 bp, Homo sapiens; identical to SEQ ID NO: 132937

SEQ ID NO: 151682 - DNA, 2066 bp, Homo sapiens
  misc_feature (1)...(2066): n = a,t,c or g
cgacttcctgcttggggcctgggcagccacactgcacgcaggctgggccgactgaggggctcagaggccaggctctgaggcccacgcagggcctagggtgggaagatggcaggtgggggcggcgacctgagcaccaggaggctgaatgaatgtatttcaccagtagcaaatgagatgaaccatcttcctgcacacagccacgatttgcaaaggatgttcacggaagaccagggtgtagatgacaggctgctctatgacattgtattcaagcactttcaaaggaaataaggtggagatttcaaatgcaataaaaaagacatttccattcctcgagggcctccgtgatcgtgatctcatcacaaataaaatgtttgaagattctcaagattcttgtagaaacctggtccctgtacagagagtggtgtacaattgttcttagtgaactggagaagacatttaacctgccagttctggaagcactgttcagcgatgtcaacatgcaggaataccccgattttaaattccacatttataaaggctttgaaaaatgtaatcccatgacaaattgccctctccaaggaaagtggaagaagaagagaagggaaggagaggtctgggcctcccaactaagtctttgaacaagggaactggtgaaaactcttttcgaaagcctgactttgggccaccttccgggtttccccatcctccatgcctgggtacaaccccacctgaaaaatgggactctcagagcacccctgtgaaacagaacagataaatgcaaagagaaaagatacaaccagtgacaaagatgattcgctaggaagccaacaaacaaatgaacaatgtgctcaaaaggctgagccaacagagtcctgcgaacaaattgctggtccaagtgaatattgggggatgctggaagggagatgccctgcccggttgccctgtgatgaaggaaagccccagaggcaagagcttacacaaccattggaatcccaaatttaattccctggttctgtgcgaactggtggatataaaaaaggaaaagccattttctaattcaaaagttgagtggccaagcccaagcaagaactcatcataaccaggcatctgacataatagtcatcagcagtgaggactctgaaggatccactgacgttgatgagcccttagaagtcttcatctcagcaccgagaagtgagcctgtgatcaataatgacaaccctttaagaatcaaatgatgaaaaggagggcccaagaagccacttgctcacgaccccagattgtaccagagctcattgattttcagaaaattatttaccattcagagaaagttttagaaaaagagtgataggaaaaagacccacgacttttcagaatcccagtgaggaggaggcgccccgcaggaagcctcgagcgggggcactgaggaagcaaggcatggtgagaaggctcctattgacttctaggaagtacatcttacttgggaggaataccccagcagggaaggagacgtttccagcagtaagtgacttttcagaccctgagtaaatgggagaaagagctttcnaggaaacctgccagctcatcccctaagaagggggctcggttaaagaagattaggattgccaagaacttgggcctgccagaatgttcagggaatgtggaattaaaaagctgcctgtttcccgaccgctttttattctgagcaacgttacactaccttgtatccagtccaatctgggaactcctttttgcattttagaaaatggaaagaggcaggaaattatggataaacctcatgtttaacagaaagagtttcactgacctaaatgtatgtaattatattttgttgttgtagaagaaataaatagcaaatttgtggtattcttttttttaaacctcgctctcattgcctattaaccctatagatcttagattctttatagtgataaatggggttgacatccaattgtcatttgtgaatgtgtaaaagcctcaaaaagacaacatgtttcctactagtgtaaattatagacagaaataaaaacttcagatcaaacactctc

SEQ ID NO: 151683 - DNA, 417 bp, Homo sapiens; identical to SEQ ID NO: 113167
  misc_feature (1)...(417): n = a,t,c or g

SEQ ID NO: 151684 - DNA, 1173 bp, Homo sapiens; identical to SEQ ID NO: 145744

SEQ ID NO: 151685 - DNA, 696 bp, Homo sapiens; identical to SEQ ID NO: 145745

SEQ ID NO: 151686 - DNA, 477 bp, Homo sapiens; identical to SEQ ID NO: 145746

SEQ ID NO: 151687 - DNA, 654 bp, Homo sapiens; identical to SEQ ID NO: 144884
  misc_feature (1)...(654): n = a,t,c or g

SEQ ID NO: 151688 - DNA, 703 bp, Homo sapiens; identical to SEQ ID NO: 145751
  misc_feature (1)...(703): n = a,t,c or g

SEQ ID NO: 151689 - DNA, 697 bp, Homo sapiens; identical to SEQ ID NO: 145756
  misc_feature (1)...(697): n = a,t,c or g

SEQ ID NO: 151690 - DNA, 1404 bp, Homo sapiens
  misc_feature (1)...(1404): n = a,t,c or g
atgctgagtggagtcgggggcttcgtgctgggcctgctcttccttggggccgggctgttcatctacttcaggaatcagaaagctgaggagtcttttgtatcggctctctccatagacttatctggaggaggaaatatggctttgctgagcatggtgtgtctgaagttccctggagggctcctgcatggcagctctgacagtgacactgatggtgctgagctccccactggctttggctgggggacacccgacacccccgtccgcctcagaaagacagaggatgagcccctgggctgcgtgttgtcggggttgcgggtggggccagatagtgtcttccccggaggccgcttctgtaaccggatcgttcttgtccccccagcacgtttcttggagcaggttaaacatgagtgtcatttcttcaacgggacggagcgggtgcggttcctggacagatacttctatcaccaagaggagtacgtgcgcttcgacagcgacgtgggggagtaccgggcggtgacggagctggggcggcctgatgccgagtactggaacagccagaaggacctcctggagcagaagcgggccgcggtggacacctactgcagacacaactacggggttggtgagagcttcacagtgcagcggcgagtctatcctgaggtgactgtgtatcctgcaaagacccagcccctgcagcaccacaacctcctggtctgctctgtgaatggtttctatccaggcagcattgaagtcaggtggttccggaacggccaggaagagaagactggggtggtgtccacaggcctgatccagaatggagactggaccttccagaccctggtgatgctggaaacagttcctcggagtggagaggtttacacctgccaagtggagcacccaagcctgacgagccctctcacagtggaatggagagcacggtctgaatctgcacagagcaagatgctgagtggagtcgggggcttcgtgctgggcctgctcttccttggggccgggctgttcatctacttcaggaatcagaaaggacactctggacttcagccaacaggattcctgagctgaagtgcagatgaccacattcaaggaagaaccttctgccccagctttgcaagatgaaaagctttcccacttggctcttattcttccacaagagagacctttctccggacctggttgctactggttcagcagctctgcagaaaatgtcctcccttgtggctgcctcagctcgtacctttggcctgaagtcccagcattaatggcagcccctcatcttccaagttttgtgctcccctttacctaatgcttcctgcctcccatgcatctgtactcctgctgtgccacaaacanattacattattaaatgtttctcaaacatggagttaa

SEQ ID NO: 151691 - DNA, 1156 bp, Homo sapiens
tcctcttctccagcatggtgtgtctgaagctccctggaggctccagcttggcagcgttgacagtgacactgatggtgctgagctcccgactggctttcgctggggacacccgaccacgtttcttggagctgcgtaagtctgagtgtcatttcttcaatgggacggagcgggtgcggtacctggacagatacttccataaccaggaggagttcctgcgcttcgacagcgacgtgggggagtaccgggcggtgacggagctggggcggcctgtcgccgagtcctggaacagccagaaggacctcctggagcagaagcggggccgcggtggacaattactgcagacacaactacggggttggtgagagcttcacagtgcagcggcgagtccatcctcaggtgactgtgtatcctgcaaagacccagcccctgcagcaccacaacctcctggtctgctctgtgagtggtttctatccaggcagcattgaagtcaggtggttccggaacggccaggaagagaaggctggggtggtgtccacaaggcctgatccacaatggagactggaccttcccacaccctggtgatgctggaaacagttcctcggaagtgaagaggtttacacctgcccaagtggaagcacccagggcgtgacaagcccctctcacagtggaattggagagcacggtctgaatctgcacagagcaagatgctgagtggagtcgggggctttgtgctgggcctgctcttccttggggccgggctgttcatctacttcaggaatcagaaaggacactctggacttcagccaacaggattcctgagctgaagtgcagatgacacattcaaagaagaactttctgccccagctttgcaggatgaaaagcttttcctcctggctgttattcttccacaagagagggctttctcaggacctggttgctactggttcagcaactgcagaaaatgtcctcccttgtggcttcctcagctcctgcccttggcctgaagccccacagctttgatggcagcgcctcatcttcaacttttgtgctcccctttgcctaaaccctatggcctcctgtgcatctgtactcaccctgtaccacaaacacattacattattaaatgtttctcaaagatggagttaaaaaaaaaaaa

SEQ ID NO: 151692 - DNA, 2036 bp, Homo sapiens
  misc_feature (1)...(2036): n = a,t,c or g
ccctgagngagacttgcctgcttctctggcccctggtcctgtcctgttctccagcatggtgtgtttgaagctccctggaggctcctgcatgacagcgctgacagtgacactgatggtgactgagctccccactggctttggctggggacacccgaccacgtttcctgtggcagcctaagagggagtgtcatttcttcaatgggacggagcgggtgcggttcctggacagatacttctataaccaggaggagtccgtgcgcttcgacagcgacgtgggggagtaccgggcggtgacggagctggggcggcctgacgctgagtactggaacagccagaaggacttcctggaagacaggcggggccgcggtggacacctactgcagacacaactacggggttggtgagagcttcacagtgcagcggcgagtccaacctaaggtgactgtatatccttcaaagacccagcccctgcagcaccacaacctcctgggttctgctctgtgagtggtttctatccaggcagcattgaagtcaggtggttcctgaacggccaggaagagaaggctgggatggtgtccacagggcctgatcccaaaatgaagatggccccttcccagaccctggtgatgctggaaaccagtttcttcggagtggagagggttaacaccttcccaagtggagcacccaaaatgtgcgaggccttctcacagtggaatgaagagcacggtctgaatctgcacagagcaagatgctgagtgaagtcgggggccttcgtgctgggccctgctccttcccttggggcccgggcttttcaatctacttcaggaatcagaaaggacactctggacttcagccaacaggattccctgagctgaaatgcagatgaaccacattcaaggaagaaccttctgtcccagctttgcagaatgaaaagctttcctgcttggcagttattcttccacaagagagggctttctcagggcccgggttgctactggttcagcaactctgcagaaaatgttcctcccttgtggcttcctcagctcctgcccttggcctgaagtcccagcattgatgacagcgcctcatcttcagcttttgtgctcccctttgcctaaaccgtatggcctcccgtgcatctgtacctcaccctgtacgacaaacacattacattattaaatgtttctcaaagatggagttaaatatcatctggtccatttggctccaaagacagaaaatgaaaagaaaaagggaagattattttccaatagaataatgattttcatgtatatgtcatgagtgtgcgagggaatgcgtatgttaaatagctggatttagacattccacactataggcatataacaaaacttcatgcttccacataaatatgcnnnnnnnnnnnnnnnnnnnnnnnnaaaaagtaatcctaatgtttaaaaaggcaatgcataaaaactgagaacagactataacaactgaaacaaacttggcaaccatgagatgagaaaccagctagcaagtcaatcagaactctttcttcatctcgtctacaatattttgtatttataactgtaaattagtgtatagtgtttcactccagagacttcaataatacagtgttatcaaaaggacttgtacagatttcagagaaagacacatttagaagacggagaatggagtctccattatgttctatctgagagtcagtatgaaatgtcaaatataaaagtacataattcagaggtctatttcaaattaataatcatttgagcataatttctccactgtcagagacgactgttattttattttcaatcaaattaaaagttgtttttatgcatatcttatttttagttttatgttacttgtacatacgtagcagtacaagtgcatataaatcctgtaagagtataaatcctatagaaatatattaagctgataattatgtctgttctgtttgatcacagagttgcaacaaataggcctcatttcctaagttgaggaaatgattttctcattttatatgagacttgtgg

SEQ ID NO: 151693 - DNA, 670 bp, Homo sapiens; identical to SEQ ID NO: 145773
  misc_feature (1)...(670): n = a,t,c or g

SEQ ID NO: 151694 - DNA, 681 bp, Homo sapiens; identical to SEQ ID NO: 144895

SEQ ID NO: 151695 - DNA, 1254 bp, Homo sapiens; identical to SEQ ID NO: 142655

SEQ ID NO: 151696 - DNA, 903 bp, Homo sapiens; identical to SEQ ID NO: 144896

SEQ ID NO: 151697 - DNA, 1134 bp, Homo sapiens; identical to SEQ ID NO: 144898

SEQ ID NO: 151698 - DNA, 1363 bp, Homo sapiens
tgggctctaccggcgggatttgatggcgtgatgtctcacagaaagttctccgctcccagacatgggtccctcggcttcctgcctcggaagcgcagcagcaggcatcgtgggaaggtgaagagcttccctaaggatgacccatccaagccggtccacctcacagccttcctgggatacaaggctggcatgactcacatcgtgcgggaagtcgacaggccgggatccaaggtgaacaagaaggaggtggtggaggctgtgaccattgtagagacaccacccatggtgtttgtgggcattgtgggctacgtggaaacccctcgaggcctccggaccttcaagactgtctttgctgagcacatgagtgatgaatgcaagaggcgtttctataagaattggcataaatctaagaagaaggcctttaccaagtactgcaagaaatggcaggatgaggatggcaagaagcagctggagaaggacttcagcagcatgaagaagtactgccaagtcatccgtgtcattgcccacacccagatgcgcctgcttcctctgcgccagaagaagggcccacttgatgggagatccaggtggaacgaggggcacctgtgcccgagaaagctgggactggggcccgcgagagggcttgaagcagcaggtacctgtgaaaccaagtgttttgggcagggatgagaatgatcgaacttcatcgggggtgacccaagggccaaaaggcttacaaagggggtcacccagttgtttggcacacccaagaaagctgcccccgcaaagaccccacccgagggcctgcgcaaaggtggcttgtattggggcattgccatcctgctcgtgtaagccttctctgtggcacgcgctgggcaagaaaggctaccatccccgcacatgagatcaacaagaagattttataagattggccaggggctaccttatcaagggcgggcaagctgatcaagaacaatgcctccactgactatgacctatctgacaagagcatcaaaccctctgggtggctttgtccactatggtgaaagtgacaaatgactttgtcatgctgaaaggcctgtgtggtgggaaccaagaaagcgggtgctcacccctccgcaaagtctttgctggtgcagacgaaagcggcggggctctggagaagaattacccttaagttccattgacaccacctccaagtttggccatggccgcttccagaccatggaggagaagaaagcattcatgggaccactgaagaaagaccgaattgcaaaggaagaaaggagcttaatgccaggaacagattttgcagtcggtggggtctcaataaaagttattttccactgaaaaaaaaaaaaaaaaa

SEQ ID NO: 151699 - DNA, 608 bp, Homo sapiens; identical to SEQ ID NO: 150928

SEQ ID NO: 151700 - DNA, 707 bp, Homo sapiens
  misc_feature (1)...(707): n = a,t,c or g
aggcctagaattcggcacgagccacagactcagagagaacccaccatggtgctcgtctcctgcccgacaagaccaacgtcaaggccggcttggggtaaggtcggcgcgcacgctggcgagtatggtgcggaggccctggagaggatgttcctgtccttccccaccaaccaagacctacttcccgcacttcgaccttgagccacggtttctgcccaaggttaaagggcccacggcaaagaaggtggcccgacgcgctgaccaaacgccgtggcgcaacgtggacggacatgcccaaacggcgctgtccggccctgaagcgaccctgcacggcgcacaaagcttcggggtggacccggttcaactttcaagctccttaagccacttgcctgcttggttgaccctgggccgcccaccttccccggccgagttcaacccctggcgggtggaacgccttccctggaacaaagtttccttgggtttcttgttgaagaaccgttgcttgaaccttccaaaatacccgttaaagcttggaagccttcgggttggccatgctttctttgcccctttggggcttccccccagcccctcctcccctttcctgcacccgtacccccgtgggtcttttgaataaaattttgaattgggggggcaaaaaaaaaaaaaaaaaaaagatctttnaatttaagggggcggaaagtttatttcaa

SEQ ID NO: 151701 - DNA, 964 bp, Homo sapiens; identical to SEQ ID NO: 145823

SEQ ID NO: 151702 - DNA, 488 bp, Homo sapiens; identical to SEQ ID NO: 145827
  misc_feature (1)...(488): n = a,t,c or g

SEQ ID NO: 151703 - DNA, 2052 bp, Homo sapiens
  misc_feature (1)...(2052): n = a,t,c or g
attgaaaccctatcgagaccatagtcagtgtggtggaattcgcagctcagcatggctaggggtacttgggagcacccgttgcacttggggttgtggagncctatgctggtctctggccattgccacccctcttcctccgactagtgcccatgggaatgttgctgaaggcgagaccaagccagacccagacgtgactgaacgctgctcagatggctggagctttgatgctaccaccctgggatgacaatggaaccatgctgttttttaaaggggagtttgtgtgggaagagtcacaaatggggaccgggagtttaatcttcagagagatgggaaggattttcccccagcccttgtgggatgcttgcatttccgttcaaggttcacaacagtgttctttcttgatccaaggggggggacaaagtcttggggtattaaccttccttgaaaaagaaagggagaaaaggattacccaaagtttgttccaagattgattttcctgggattccccattccccaattggattgcagctgtggaatgtcaccgtggaagaatgtcaagctgaagcgcgttcctcttcttccaaggtgaccgcgaagtggttctgggactttgcctaccgggaaccatggaagggagcgttcctgggccagctgtttggggaacttgctcctcttgccctgagatgggctgggccgcttacttactggctttccaggggtaaccaatttcctgcgctttcgaccctgtcaaggggaagaagtgcctcccaggtgacccgcgggatgtccgagaataatttcatgccctgccctgggaaaggccattgggacacaggaatggggattgggccatgggaacagtaaccaccatggcccttgaatatatgcggcttgtagcccaacatcttagtctttgtcttgcactgacgtctgacaaccattggtgccaacttttgcctttcagttgggacccactactggcgttttggacaccagcccgggatggctggcatagcttggccccattgcttatcaagtggccccagggtccttcagcagtggatgctgccttttcctggggaagaaaaactctatctggtccaggggcacccagggtattatgtcttcctgacaaagggaggctattacccttagttaaggcggttatccgaagcggctgggagaaagggaagttcggggacccttcatggggatttatcctgggactctgtggatgcggcctttatcttgccctggggtctttcttcggctccattattcatgggcaggacggcggctgtgggtgggctgggaccctgaaagtcaggaagcccaaagcccacgtggaacagagctttcctttggcccccatgaagaaggtagacggagccttgtgtatggaaaaaagtccctttggccctaaattcatgtttccgccaaatggtcccggccttgtaccctcatccatggtcccaattttacactctaacagtgttgtggagaaaactgaatgccagccaaggcccttccgcaaccccagaatgtgacccagtctcctggggcttgcactcactgaggggccttcttgacatgaagtctgccctgggccccacctcctagttcctcataataaagacagattgcttcttcgcttctcactgaggggccttctgacatgaagtcttgcctggccccacctccccagtttctcataataaagacagattgcttcttcacttgnnnnnnnnnnnnnnnnncgggggggccgttttaaagaacccgtagggggcccaacgttaacccggggaggcaacgaaaaaattgtttccttatagcgagtgggattagaccccacctggggattttgacaacggaaccttacttggggggggtgactaacttggacaaccgccctacgaaacctaagctcttaagggaacaaatgaaaatctaacgtgcatgaggagggaaactgacagcaaaacccggctggttgcaagttcggcttctggaggtgctttaaagaacaatgttaacacggggagtcgtgtt

SEQ ID NO: 151704 - DNA, 3433 bp, Homo sapiens
atgctccctcatgagagaggactggagaccacccctagaggagaatgtatccctgtacggattgacaccaaattgtttgaaatgcttgttccccagtgccataaagaaatagcacttgaacataaatttatttactccttcttagtgacactgaacacgaagccccctgggtattcacatagtcatccagaggctctccttgacccagaggtgggagatccaaatggaacaaatgctcagttaatcaaatgttttcttcttcctctctgtccttccttcccactctgtccagaggaatgtatgcattgcagtggagaaaactatgacggcaaaatttccaagaccatgtctggactggaatgccaggcctgggactctcagagcccacacgctcatggatacattccttccaaatttccaaacaagaacctgaagaagaattactgtcgtaaccccgatagggagctgcggccttggtgtttcaccaccgaccccaacaagcgctgggaactttgtgacatcccccgctgcacaacacctccaccatcttctggtcccacctaccagtgtctgaagggaacaggtgaaaactatcgcgggaatgtggctgttaccgtgtccgggcacacctgtcagcactggagtgcacagacccctcacacacataacaggacaccagaaaacttcccctgcaaaaatttggatgaaaactactgccgcaatcctgacggaaaaagggccccatggtgccatacaaccaacagccaagtgcggtgggagtactgtaagataccgtcctgtgactcctccccagtatccacggaacaattggctcccacagcaccacctgagctaacccctgtggtccaggactgctaccatggtgatggacagagctaccgaggcacatcctccaccaccaccacaggaaagaagtgtcagtcttggtcatctatgacaccacaccggcaccagaagaccccagaaaactacccaaatgctggcctgacaatgaactactgcaggaatccagatgccgataaaggcccctggtgttttaccacagaccccagcgtcaggtgggagtactgcaacctgaaaaaatgctcaggaacagaagcgagtgttgtagcacctccgcctgttgtcctgcttccagatgtagagactccttccgaagaagactgtatgtttgggaatgggaaaggataccgaggcaagagggcgaccactgttactgggacgccatgccaggactgggctgcccaggagccccatagacacagcattttcactccagagacaaatccacgggcgggtctggaaaaaaatgctacagagtgcggtggcgccagcacagagctctgctcaacgtccctctgtgctttcacgatgctgatggattatgaaggtcaaggagagcctctggatgactatgtgaatacccagggggcttcactgttcagtgtcactaagaagcagctgggagcaggaagtatagaagaatgtgcagcaaaatgtgaggaggacgaagaattcacctgcagggcattccaatatcacagtaaagagcaacaatgtgtgataatggctgaaaacaggaagtcctccataatcattaggatgagagatgtagttttatttgaaaagaaagtgtatctctcagagtgcaagactgggaatggaaagaactacagagggacgatgtccaaaacaaaaaatggcatcacctgtcaaaaatggagttccacttctccccacagacctagattctcacctgctacacacccctcagagggactggaggagaactactgcaggaatccagacaacgatccgcaggggccctggtgctatactactgattccagaacagagatatgactactgcgacattcctgagtgtgaagaggaatgtatgcattgcagtggagaaaactatgacggcaaaatttccaagaccatgtctggactggaatgccaggcctgggactctcagagcccacacgctcatggatacattccttccaaatttccaaacaagaacctgaagaagaattactgtcgtaaccccgatagggagctgcggccttggtgtttcaccaccgaccccaacaagcgctgggaactttgtgacatcccccgctgcacaacacctccaccatcttctggtcccacctaccagtgtctgaagggaacaggtgaaaactatcgcgggaatgtggctgttaccgtgtccgggcacacctgtcagcactggagtgcacagacccctcacacacataacaggacaccagaaaacttcccctgcaaaaatttggatgaaaactactgccgcaatcctgacggaaaaagggccccatggtgccatacaaccaacagccaagtgcggtgggagtactgtaagataccgtcctgtgactcctccccagtatccacggaacaattggctcccacagcaccacctgagctaacccctgtggtccaggactgctaccatggtgatggacagagctaccgaggcacatcctccaccaccaccacaggaaagaagtgtcagtcttggtcatctatgacaccacaccggcaccagaagaccccagaaaactacccaaatgctggcctgacaatgaactactgcaggaatccagatgccgataaaggcccctggtgttttaccacagaccccagcgtcaggtgggagtactgcaacctgaaaaaatgctcaggaacagaagcgagtgttgtagcacctccgcctgttgtcctgcttccagatgtagagactccttccgaagaagactgtatgtttgggaatgggaaaggataccgaggcaagagggcgaccactgttactgggacgccatgccaggactgggctgcccaggagccccatagacacagcattttcactccagagacaaatccacgggcgggtctggaaaaaaattactgccgtaaccctgatggtgatgtaggtggtccctggtgctacacgacaaatccaagaaaactttacgactactgtgatgtccctcagtgtgcggccccttcatttgattgtgggaagcctcaagtggagccgaagaaatgtcctggaagggttgtaggggggtgtgtggcccacccacattcctggccctggcaagtcagtcttagaacaaggtccccaaggccttcatcctacaaggtcatcctgggtgcacaccaagaagtgaatctcgaaccgcatgttcaggaaatagaagtgtctaggctgttcttggagcccacacgaaaagatattgccttgctaaagctaagcagtcctgccgtcatcactgacaaagtaatcccagcttgtctgccatccccaaattatgtggtcgctgaccggaccgaatgtttcatcactggctggggagaaacccaagaacatttttatttcaattaa

SEQ ID NO: 151705 - DNA, 3804 bp, Homo sapiens
  misc_feature (1)...(3804): n = a,t,c or g
ctatattcaaggtaatgtttgaaccctgctgagccagtggcatgggtctctgagagaatcattaacttaatttgactatctggtttgtgggtgcgtttactctcatgtaagtcaacaatgtcctgggattgggacacactttctgggcactgctggccagtcccaaaatggaacataaggaagtggttcttctacttcttttatttctgaaatcaggtcaaggagagcctctggatgactatgtgaatacccagggggcttcactgttcagtgtcactaagaagcagctgggagcaggaagtatagaagaatgtgcagcaaaatgtgaggagggccgaagaattcacctgcagggcattcccaatatcacagtaaagagcaacaatgtgtgataatggctgaaaaacaggaagtcctcccataatcattaggatgagagatgtagttttatttttgaaaaagaaagtgtattctcttcagagtgccaagacttgggaatggaaagaactacagagggacgatgtccaaaacaaaaaatggcatcaccttgtcaaaaatgggagttccacttctcccccgcagacctagattctcacctgctacacacccctcagagggacttggaggagaactactgcaggaatccagacaacgatccgcaggggccctgggtgctatactactgatccagaaaagagatatgactactgcgacattcttgagtgtgaagaggaatgtatgcattgcagtgggagaaaactattgacggcaaaatttccaaggaccatgtcttgggactgggaatgccagggcttggggacttttcaggagccccacacggttcatgggatactttccttcccaaattttcccaaacaagaacctgaaggaaggaattactgttcgtaaccccgatagggggcttgcggccttgggtgttttcaccacccgaccccaacaagcgctggggaacttttttgacatcccccgctggcacaacaccttccaccatcttctggtcccacctaccagtgtcttgaaggggaacaggtgaaaattttcgcgggaatgtggctgtttaaccgtgttcggggaaaactgttcagcactgggagtgcacaggaccccttcacacacataacagggacaccaggaaaattttccctggcaaaatttgggatggaaaactacttgccgcaatcctggacgggaaaaaggggcccctggggtgccattacaaccaacaggccaagttgcgggtggggagttattgttaaggttaccgttcctgttgactcctccccagtatccacggaacaattggctcccacagcaccacctgagctaacccctgtggtccagggacttgctacccatgggtgatgggacagagcttaccgaggcaacatccctcccacccacccacccacagggaaagaaagtgtcaagtcttggtccatcctatgacacccacaccggcacccagaagacccccagaaaactaccccaaatgctggcctggacaatggaactactgtcagggattccagatggccgattaaaggccccctggtgtttttaccacaggaccccagcgttcaggtgggagtactgcaacctgaaaaaatgcttcaggaacagaagcgagtgttgttagcacctccgcctgttgtcctgcttccagatgtatatgactccttccgaagaagactgtatgtttgggaatgggaaaggataccgaggcaagagggcgaccacttgttactgggacgccatgccaggactgggctgcccaggagccccatagacacagcattttcactccagagacaaactccacgggcgggtctggaaaaaaattactgccgtaaccctgatggtgagtgtatgtggtccctggtgctacacgacaaatccaagaaaactttacgactactgtgatgtccctcagtgtgcggccccttcatttgattgtgggaagcctcaagtggagccgaagaaatgtcctgggaagggttgtaggggggtgtgtggcccaccccacattcctgggccctggcaagttcagtctttagaacaaggttttggattgcacttctgtggaggcaccttgatatccccagagtgggtcgttgactgctgcccactgcttggagaagtccccaaggccttcatcctacaaggtcatcctggggtgcacaccaagaagtgaatctcggaaccgcatgttcaggaaatagaaagtgtcttaggctgttcttgggagcccacacggaaaagatatttgccttgctaaagctaaggcagtcctgccgttcattcacttgacaaagttaatcccagctttgtctggccattccccaaatttttgtggttcggttgaccgggaccgaatgtttcatcactgggctgggggagaaacccaaggtacttttgggagctgggccttcttcaagggaagcccagctcccctgttgatttgagaataaagtgtgcaaatccgccctatgaagtttccctgaaaatggaaagaagtcccaatcccacccgaaactcctgtgcctgggccattttggcccggaaggccacctgaacaagttgccccccagggtgaacagtggaagggcccctctggtttgccctcnaaaaagggaccaaaataccattttaccaaggaagtccacctccttggggggtcttggcctgtgcacgccccccaataacccccggtgtcctatgttccgtgtttccaaggtttgtttacttgggattgaaggggagttgatggagaaattaattaattgggacgggagacagagtgacgcactgactcacctaggaggctgggaacgtggggtaggggatttagcatgcctggaaataactggcagtaatcaaacgaagacactgtccccagctaccagctacgccaaacctcgggcattttttgtgttattttctgactgctggattctgtagtaatggtgacatagctatgacatttgttaaaaataaactctgtacttaactttgatttgagtaaattttggttttggtcttcaacattttcatgctctttgttcaccccaccaatttttaaatgggcagatggggggatttagctgcttttgataaggaacagctgcacaaaggactgagcaggctgcaaggtcacagaggggagagccaagaagttgtccacgcatttacctcatcagctaacgagggcttgacatggcattttttactgtctttatttcctgacactgagatgaatggttttcaaagctgcaacatgcatggggagtcatgcgaaccgattctgttattgggaatgaaatctgtcaccgactgccttgacttgtgcccaggggacaccggagcagagagctgtatatggatggagtggaaccggttccatgggatgtgttaacacaagaccaactgagagtctgaatgttattctgggggcacacgtgagtctaggattggtgccaagaagcatgtaaatgaacaacaagcaaatattgaaggtggaccacttatttcccattgctaattgcctgcccggttttgaaacagtctgcagtacacacggtgacaggagaatgacctgtgggagagatacatgtttagaaggaagagaaaggacaaaggcacacgttttaccatttaaaatattgttaccaaacaaaaatatccattcaaaatacaatttaacaatgcaacagtcatcttacagcagagaaatgcagagaaaagcaaaactgcaagtgactgtgaataaagggtgaatgtagtctc

SEQ ID NO: 151706 - DNA, 454 bp, Homo sapiens; identical to SEQ ID NO: 145846
  misc_feature (1)...(454): n = a,t,c or g

SEQ ID NO: 151707 - DNA, 1371 bp, Homo sapiens; identical to SEQ ID NO: 145847

SEQ ID NO: 151708 - DNA, 1687 bp, Homo sapiens
  misc_feature (1)...(1687): n = a,t,c or g
ccacccacgcgtccgcccacgcgtccggcacctgggttggtcccgaagccttcaaccacctgcacgcctgcctgccagggcctctctggggcagccatgaagtccctcgtcctgctcctttgtcttgctcagctctggggctgccactcagccccacatggcccagggctgatttatagacaaccgaactgcgatgatccagaaactgaggaagcagctctggtggctatagactacatcaatcaaaaccttccttggggatacaaacacaccttgaaccagattgattgaagtaaaggtgtggcctcagcagccctccgggagagctgttttgagatttgaaattaggacaccctggggaaccaccttgccatgttgttgggaccccacccttgttggccaagatgccagccttgagggcagcttgaaggagcatgctgtcgaaggagactgtgatttccagctgttgaaactagatggcaagtttttccgtggtatacgcaaaatgtgatttccagtcaagactcagccgaggacgttgcgcaaggtgtgccaacacttgccccctgctggccccgctggaacgacaccagggtggtgcacgccgcgaaaagctgccctgggccgcctttcaacgctcagaacaacgggttccaatttttcagcttggaggaaatttcccggcgctcagcttgtgcccctcccaccttctaacctatgtgggagtttacagtgtctgggcactgacttgttgtttgcttaaaagaaggccacagaggcagccaagtgtaacctgtctgggcagaaaagcaatatgggcttttgtaaaggcaacactcagtgagaagcttgggtnggggcagaggttgcagttgacctgcacggtgtttccaaacacagcccgtgaccttcacagcccaacccagaaggtgccaatgaagcagtccccacccccgttggtggacccaagatgcacctccgtcccctccacttggcgcacctggactccttccaagttggctcacccccaagactaccatggtgttactgggcagctcctccaggacaccagttgcaccggggcgcactacgacctgtgccacaccttcatgggtgtggtctcgattggggtcacccttcaggagaaagtgttcgcacccccggaaaaacacggcacagtggttgaagcctagtggttgggtgctgctgctggggccantgggttccttccattgttccggggaggaatcagacacttcaaggtctgaggcttagacatgggcagagatgaggaggtttggcaccagaaaacatagcccaccattttgttcccaancctggggcatggggtggggggcttgtctgctgggccacgcaagtgtcacatgcggttttacatttatatcaagtcttgactccctacttcccgtcattcctcacaggacagaagcagagtgggtggtggttatgtttgacagaaggcattaggttgacaacttgtcatgcattttgacggtaagccaccgatgattgttttctctggcctctgggttgaccttacaaaaacccatttggaactgtgacttttgaaaggtgctcttggctaagcttatatgtgcctgttaatgaaaattgcctgaaagaccttcctttaataaaaaaaggttctaagctgaaaaaaaaaaaa

SEQ ID NO: 151709 - DNA, 1257 bp, Homo sapiens; identical to SEQ ID NO: 125428

SEQ ID NO: 151710 - DNA, 924 bp, Homo sapiens; identical to SEQ ID NO: 133213

SEQ ID NO: 151711 - DNA, 913 bp, Homo sapiens
  misc_feature (1)...(913): n = a,t,c or g
ggaattctggcacgagcngggtttgccgccagaacacaggtgtcgtgaaaactacccctaaaagccaaaatgggaaaggaaaagactcatatcaacattgtcgtcattggacacgtagattcgggcaagtccaccactactggccatctgatctataaatgcggtggcatcgacaaaagaaccattgaaaaatttgagaaggaggctgctgagatgggaaagggctccttcaagtatgcctgggtcttggataaactgaaagctgagcgtgaacgtggtatcaccattgatatctccttgtggaaatttgagaccagcaagtactatgtgactatcattgatgccccaggacacagagactttatcaaaaacatgattatcctgaaccatccaggccaaataagcgccggctatgcccctgtattggattgccacacggctcacattgcatgcaagtttgctgagctgaaggaaaagattgatcgccgttctggtaaaaagctggaagatggccctaaattcttgaagtctggtgatgctgccattgttgatatggttcctggcaagcccatgtgtgttgagagcntctcagactatccacctttgggncgctttgctgttcgtgatatgngacagacagttgcngtgggnggcatcaaagcagtggncaaaaaaggctgctggagctggaaaggcaccaaagnctgccanaaagcncagaaggngaaatgatattatccccaaaacctngcnaccccctnttaatcagtggtgganaccgggcncagaactgttngtnanntggcncttnaggttngnggnaaancntggtaatggnncaatngnncgaaaaccctcnaaagngatgggnatgtttttggcnnccttgggntcctttttgcggggggggtta

SEQ ID NO: 151712 - DNA, 1413 bp, Homo sapiens; identical to SEQ ID NO: 142213

SEQ ID NO: 151713 - DNA, 1389 bp, Homo sapiens; identical to SEQ ID NO: 125531

SEQ ID NO: 151714 - DNA, 2034 bp, Homo sapiens
gcttttttttttttttcgcaacgggtttgccgccagaacacacggtgtctgtgaaaaactaacccctaaaagccaaaatgggaaaggaaaagactcatattcaacattgtcgtcattggacacgtagattcgggcaagtccaccactacttggccatctgatctataaatgcggtggcatcgacaaaagaaccattgaaaaatttgagaaggaggctgctgagatgggaaaggactcattcaagttgtgcctgggtcttggataaactgaaagctgagcgtgaacgtggtatcaccattgatatctccttgtggaaatttgagaccagcaagtactatgtgactatcattgatgccccagggccacagagacttttatcaaaaacatggattacaggggacatctcaaggcttgactgtgctgtcctggatttgtttgcctgctggtgttggtgaattttgaagcttggtatctcccaagaatgggcagaacccgagagcatgcccttctggcttacacactggggtgtggaacaactaattgtcggtgttaacaaaatgggattccactgagccaccctacagccagaagagatatgaggaaatgtggttaagggaagtcagcactttccattaagaaaatttggctacaacccccgacacagtagcattttgtgccaatttcttggtttggaattggtgacaacatgcctggagccaagtgcctaacatgccttggttcaagggatgggaaagtcacccgtaaggatggcaatgccagtggaaccacgctgcttgaggctctggactgcatcctaccaccaactcgtccaactgacaagcccttgcgccctgcctctccagggagtccaccaaattgggtggtattggtactgtctcttctgccccgatggaaacctggtttctccaaccccggtatggtggtcacctttgctcccagtccacggtaacaacggaaagtaaaatcctgtcgaaaatgcacccatgaagctttgaagtgaagctccttcctggggaccaatgtgggccttcaattgtcaggaattgtgtcttgtcaaggaatgtttcgtccgtggcaaacggttgctgggtgaccagcaaaaaatgaccccacccaatgggaaagcagctgggcttcactggtcaggggtgattatccttgacccatcccaggccaaaataaggcgccgggctatgccccttgtattggtattggcgcacacgggctcacatttgcatgcaaagtttgctgagctgaaggaaaaagattgatcgccgtttctggtaaaaagctggaagatggccctaaaattcttgaagtcttggtgatgctgcccattgttgatattgttcctggccaggcccatgtgtgttgagagcttctcagactatccacctttgggtcgctttgctgttcgtgatatgagacagacagttgcggtgggtgtcatcaaagcagtggacaagaaggtctgctggagctgggcaaggtcacccaagtttgcccagaaaggttaggaagggttaatgaaatttattccttaaaccctcccaccccactcttaaaaattttccccaaaagggatttgggtggaaaagaacggttctcagaactgttttgtttcaattggcccatttaaggttaagtagtaaaagcattggttaatgataaccaatgcatcgtaaaaacctttcaaaggaaagggagaatgttttgtgggccccttttgggtttatttttttggcgcggggccgttttaaagttattaagttttttaaaatcccgacttttttaaatgggaaaccacctggacccaaaaatttttgtaaccagaattttgggaacccattaaaaaagttaaatgagaaaaaggatttggggggggcgggcccttttatgagaacccttggggggccccaagttattccgcgggctatggaaaggaaaaaccctttttcccttaaaggggggcccaataaataagcccaaccttggggttcttttgcgaaaaga

SEQ ID NO: 151715 - DNA, 729 bp, Homo sapiens
aattttgccctcgaggccaagaattcggcgagggcaataagctcctagtcccagacgcccatggggtcatttcacagaggaggaccaaggcttactatccacaagcctgtggggcaaaggttaaatgtggaaaaaatgctggaaggaaaaaacccctgggaaaggcccccctggttgtcctaccccatgggaccccaagaggtcctttgaacaagctttgggcaaccctgtccctctgccctctgcccatcatgggcaaccccccaaagtcaagggcacatggcaaagaaggtgctgaccttcccttggggagatgcccataaagcaccctggatgatcctcaaagggcacctttgcccaagcctgaagtgaactgcacttgtgacaaagctgcatgtggatcctgagaacttcaaagctcctggggaaatgtgctggtgacccgttttgggcaatcccattttcggcaaaagaattcacccctggaggttgcagggcttcctgggcagaaagatgggtgacttggagttggccagtgccctgttcctccaggataccactgagctcactggcccatgattgcagagcttttcaaggataaggcttttattcttgcaagcaattacaaataataaatctatttctgctaagagatcacacatgattttcttcagctcttttttttacatctttttaaatatatgagccacaaagggtttatattgagaa

SEQ ID NO: 151716 - DNA, 607 bp, Homo sapiens; identical to SEQ ID NO: 145541

SEQ ID NO: 151717 - DNA, 503 bp, Homo sapiens; identical to SEQ ID NO: 145542

SEQ ID NO: 151718 - DNA, 2384 bp, Homo sapiens; identical to SEQ ID NO: 145543
  misc_feature (1)...(2384): n = a,t,c or g

SEQ ID NO: 151719 - DNA, 591 bp, Homo sapiens
actgggtgtaaggattcccactgtggctcttcacgtgatggaactgtttgacacaactgtagagcagctgtatagcatcttcactgtaaaggagttaacaaataagaagatcatcatgaaatggagatgtgggaactggccagaaggtatgttactaattactgcccttcatattaaaggtcccaaaacactaaggctaggtttttcgtatggataaattttccttttcataatgcggtaataaggttcctattttttttcttagaacactatgccatggttgcactgaattttgtgcctactctaggggcaaacagaattacaattgaagggagttcctatctatctatctgttaaagaagagaacatggaattctgttgggcagaagcagccttttgaagaaataaaaggtttcactggcagctgacccccctaaatggttgaattaaaatttattataaggcattactttttgtaagcggaaaaagtgtcacatttacctcttccctatcttttgtttaaaaggactgtctttattttatattggatgaaatctatgaacatatatacaatgtaaaaaaaaaaaaaaa

SEQ ID NO: 151720 - DNA, 2325 bp, Homo sapiens
atggctgcttctatagcactggaagctttggaggccttatatggcatcgttaaagaatctggagtgaagcacaagggattgattgaaatacccaatctttctgaggaaaatgaagtagatgacactgagtcaagcttctgctacagacattgggcatttcaaatagtgttgatcagactgtgtggttcctgtgtggtagttcgggtgccttgtggagggcctgtttgccgagaaggattgccgtactgtgggggcagcgtgttgtgtggagctggagtggtacaggaaagagagtcaacgttgagtaaaaagaaaggagatggggttatactgaaggatcttatgaaaactgcaggcactgccaaggtcagggaggcccttggagattacctgaaggcacttaagacggaatttacaacgggaatgattttaccaacgaaagctatggcaacccaggaattgactgtcaaaagaaaactgagtgggaataccctgcaggttcaggcctcatctccagtggcactgggtgtaaggattcccactgtggctcttcacatgatggaactgtttgacacaactgtagagcagctgtatagcatcttcactgtaaaggagttggtgcaaaagttttctaaatctactgctgtattagaaactgaaaagggagggaaattccagatgtttgatgggaacatcactggtgaatatctaggattgttaacaaataagaagatcatcatgaaatggagatgtgggaactggccagaaggtctgaactgcacagatccacttgtatctgggttttctcccaactctggcactcctaaggcagcaaggccaacccctcaccttcctcctcctcttctacttcctgatcaatgtgaagaccatgaggatgaagacctttatgatgacccatttccacttgaagaacagacagagcgggatgccaccagcttgtccaaagggaagttccaggagctcctggtgggcatcgttgtggagaatgacgctggccgcggcgagatcaacgagttgaagcaggtggaaggggaggcttcgtgcagcagccgcaaaggaaagctgattttcttctatgagtggaacatcaaactgggctggaaagaacgtactgtccctttctgtccttccatcgcttttgtgactgcttctccccttcagggtactcctttgtcctgctttgcccaggcaaagagtaccctgggacaagaagaggaatatgggtgcacttgccccacactcctctcaggacggcggactgctgactcctcatgccctctccttggccatggcctgcctgacctttcttccgtggctgctcagggggccctggagtggtggaaccctgtgagggcagctgagctattcagcatcgttaaagaatctggagtgaagcacaagggattgattgaaatacccaatctttctgaggaaaatgaagtagatgacactgagtcaagcttctgctacagacattgggcatttcaaatagtgttgatcagactgtgtggttcctgtgtggtagttcgggtgccttgtggagggcctgtttgccgagaaggattgccgtactgtgggggcagcgtgttgtgtggagctggagtggtacaggaaagagagtcaacgttgagtaaaaagaaaggagatggggttatactgaaggatcttatgaaaactgcaggcactgccaaggtcagggaggcccttggagattacctgaaggcacttaagacggaatttacaacgggaatgattttaccaacgaaagctatggcaacccaggaattgactgtcaaaagaaaactgagtgggaataccctgcaggttcaggcctcatctccagtggcactgggtgtaaggattcccactgtggctcttcacatgatggaactgtttgacacaactgtagagcagctgtatagcatcttcactgtaaaggagttggtgcaaaagttttctaaatctactgctgtattagaaactgaaaagggagggaaattccagatgtttgatgggaacatcactggtgaatatctaggattgttaacaaataagaagatcatcatgaaatggagatgtgggaactggccagaagaacactatgccatggttgcactgaattttgtgcctactctagggcaaacagaattacaattgaaggagttcctatctatctgtaaagaagagaacatgaaattctgttggcagaagcagcattttgaagaaataaaaggttcactgcagctgacccccctaaatggttgaattaaaatttattataaggcattactttttgtaagcgga

SEQ ID NO: 151721 - DNA, 893 bp, Homo sapiens
cttaaaacattattatatattcctgctgtccttgatgttactgctgttctgagacattttggcaataaagacaattatcagtggtgctgatgtataaactggaagaaggaccgtatgttgttcattgattcttctaggagtttcaatgaaaggatttttctgtgttgtattgtgggaagtcttaaaagattttcagtggaattttccccctctctttttcagttaacaaataggaagatccatcatgaaaatggagatgtgggaactggcccagaagaacacttatgccatggttgcactgaaattttgtgcctactctagggcaaacagaattacaattgaaggagttcctatctatctgtaaagaagagaacatgaaattctgttggcagaagcagcattttgaagaaaataaaaaggttcctgcaagctgacccccccccaatggttgaattaaaatttattataaggcatatactttttggtaagccggaaaaagtgtcacatattacctcttccctatcttttgtattaaaaagacagtacattattttatattgaatagaaatatatgaacatatatacaatgtaaagcattgtttgactcctttattataactagacactgcattgatttaaaagtagcaaacaacctgaaattaagtattaacctgaccttccatcgatattcctctggaaataggtaagtcctgagtgcagatagttgatgtttgcccaagctgaagcttgtcctataggcaagcttgcttgcaggccgtacttttagttccaagatgccaaagaattaatgggcatgttgacactattcctttattttactttagggtttttaaggtgtgtagatcttaagtcgtaaaacagtggtatattgt

SEQ ID NO: 151722 - DNA, 1718 bp, Homo sapiens
  misc_feature (1)...(1718): n = a,t,c or g
ggatgtcctctgccctgcgcctctggccggggctgtggtccctccaggccgtcgaggggatgctgaggccggtccccagaggagcatgacttggctggtccggaggagctctgagggcatgggcaatcttggctcgctgcaacctcagcttccagagttcaagcgagtctcctgcttcagcctcatgagtagctgggactacagatgcgtgccactacgtccgtctgatgtttgtatttttagtagagacagggtttcaccatgttggtcaggctgctctcgaactccagatctcgtgatccgcccgcctgggcctattaaagtgctgggattacaggcgtgagctagatctgactttctagtgtcctagccttggcccgatggacatgtcatttctctcagctcgtttctgtcccctaaagtgagaatattgcctgggaagattacattagacgatgtatatgcgaagacactttgaatagcctggtattgtcatgattctgattagttcactacttgctactttccctgtggcctaggctttgcctattttccagtgggcgagctagctagatcctcctcccttaaataagccagtgtttttaagacagaatactacttgcatagtggacaataatatcttaaagaactgagcaggatgaaaagaatttgatagaaagcaggtttgaggagcacattgggaggttggcaggtttcgaggctgcttgagaggacttgggccgatctgggctgggctttggacgtgaccctgggcancccaggcaggtggatcccagctggggcttccattcacgactttctggtccctggcaggacagagcgggatgccaccagcttgtccaaagggaaagttccaggagctcctggtgggcatccgttgtggaagaatgacgctggccgcggcgagatcaacgagtttgaagcaggtggaaggggaggcttcgtgcagcagccgcaaaggaaagctgattttcttctatgagtggaacatcaaactgggctggaaaggcatcgttaaagaatctggagtgaagcacaagggattgattgaaatacccaatctttctgaggaaaatgaagtagatgacactgagaatttacaacgggaatgattttaccaacgaaagctatggcaacccaggaattgactgtcaaaagaaaactgagtgggaataccctgcaggttcaggcctcatctccagtggcactgggtgtaaggattcccactgtggctcttcacatgatggaactgtttgacccaacctgtagagcagcttgtatagcatcttcactgtaaaggaggaagagagagtttgtgttttattttctttaacaaataagaagatcatcatgaaatggagatgtgggaacctggccagaagaacactatgccatggttgcactgaattttgtgcctactctagggcaaacagaattacaattgaaggagttcctatctatctatctgtaaagaaaagtaccatgaaatttctgttggcagaagcagcattttgaagaaataaaaggttcactgcagctgacccccctaaatggttgaattaaaatttattataaggcattactttttgtaagcggaaaaagtgtcacatttacctcttccctatcttttgtttaaaaggactgtctttattttatattggatgaaatctatgaacatatatacaatgtaaagcaaa

SEQ ID NO: 151723 - DNA, 491 bp, Homo sapiens; identical to SEQ ID NO: 145491
  misc_feature (1)...(491): n = a,t,c or g

SEQ ID NO: 151724 - DNA, 576 bp, Homo sapiens; identical to SEQ ID NO: 134091

SEQ ID NO: 151725 - DNA, 1601 bp, Homo sapiens; identical to SEQ ID NO: 145874

SEQ ID NO: 151726 - DNA, 482 bp, Homo sapiens; identical to SEQ ID NO: 135253
  misc_feature (1)...(482): n = a,t,c or g

SEQ ID NO: 151727 - DNA, 1728 bp, Homo sapiens; identical to SEQ ID NO: 121319

SEQ ID NO: 151728 - DNA, 942 bp, Homo sapiens
ggcacgaggagcaagcctggagggtgcctggattggtgaggcccgtgtggctacttctgtggaagcagtgctgtagttactggaagataaaagggaaagcaagcccttggtgggggaaagtatggctgcgatgatggcatttcttaggacacctttggattaataatgaaccacactctcttctgaagcaagctgttcgaatcatctgatatttatactgaatgagttactgtaagtacgtattgacagaattacactgtactttcctctagggtgatctgtgaaaatggttcgctattcacttgaccccggaggaaccccacgaaaatcatgcaaaatcaaagaggttccaatcttcgtgttccctttaaggaccactcgtgaaaactgcctcaggcccatcaaggggtatgccatatacgaaaaagccccacgaagtatcctgaaagatgtccaccttaccagaaaccagtgtgtccccattcccgaccgttacaaatggggggatttgcaaggtgtgccgcaggcccaagcaatggggcttggacacaaggtccggtggccccaaaaaggagtgctgaattttttgctgcacatgcttaaaaacgcagaagagtaatgctgaacttaaggggtttagatgtagattttcttgttcattgagcatatccaagtgaacaaagcaccctaagatgccgccgccggacctacagagctcatggtcggattaacccatacatgagctctccctgccacgattgagatgactccttacggaaaaggaacagattgttcctaaaccagaagaggaggttgcccagaagaaaaagatatccccagaagaaactgaaagaaacaccaactttatggcacggggagtaaatttcagcattaaaataaatgtaattaaaaggaaaaaaaaaaaaaaaaaaaagtcgacgc

SEQ ID NO: 151729 - DNA, 407 bp, Homo sapiens; identical to SEQ ID NO: 134500

SEQ ID NO: 151730 - DNA, 1779 bp, Homo sapiens; identical to SEQ ID NO: 130923

SEQ ID NO: 151731 - DNA, 2728 bp, Homo sapiens
gagagaccacgcttcccctcatgctcctcaacggctccgccttcccgccggagcctgacccttcccagagtgcccggcgattgcggcgtgcgaggcccttggagggcaaggccccagggcctggcttaggagcgcgagaggcaggctgggaattgtagttcgaaggccctcgagagcggctagagtctggcggccgagaggactagttgtcccagcgtgccctgcgcctcagcccgcgcgctcgcagcttctcgctctcgcctgcctgcccgctcccttgcttgctcgcgctttcgctcgccctctcctcgaggatcgaggggactctgaccacagcctgtggctggggaagggagacagaggcggcggcggctcaagggaaacgaggctgcagtggtggtagtaggaagatgtcgggcgaggacgagcaacaggagcaaactatcgttgatgttctctggtcgtgaccaagtataagatggggggcgacatcgccaacagggtacttcggtccttggtggaagcatctagctcaggtgtgtcggtactgagcctgtgtgagaaaggtgatgccatgattatggaagaaacagggaaaatcttcaagaaagaaaacggaaatgaagaaaggtattgccttttcccaccagcatttcgggtaaataactggtgtatgtccacttctccccttttgaaagaagcgacccaggattatattcctccaaggaaggtgacttggttaaaaattgaccttggggttccatgttggatgggcttcatcgctaatgtagcctcacactttttgtggttgatgtagctcaggggacccaagtaacagggaggaaaggcagatgttattaaggcagctcacctttgtgctgaagctgcccctacgcctggtcaaacctggaaatcagaacacacaagtgaccagaagcctggaacaaagttgcccactcatttaactgcacgccaattagaaggtatgctgtcacacagtttgaagcagcatgtcatcgatggagaaaaaccataattccagaatcccacagacaagcagaaagagggcccatgaaaaagctgattttgaggttacatgaagtatatgctgtggatgttctcgtcaagcctcaggagagggcaaggcccaaggatgcaggacagagaaccactatttacaaacgagacccctctaaacagtatggactgaaaatgaaaacttcacgtgccttcttcagtgaggtggaaaggcgttttgatgccatgccgtttactttaagagcatttgaagatgagaagaaggctcggatgggtgtgggtggagtgcgcccaaacatgaacttgctggcaaccatttaatgttctctattaagaagggagggtgattttgtttgcccagtttaaatttacagttctggctcatggccccaatggccccatgcggataaaccagttggtcccttcgagcctgaacttctacaagttctgagatggaggttccaggatgcagagctaaaggccctcctccaggagttctgcaaagtcggaaaaaccccagaaaaagaaaaaaaaagaaggcctccaagactgcaggagaatgccactggtggcattctctgcagtcttggaaacattagaagaaaatgaagcttggggacttgaggtgggtcccatctccccagcttgctgctcctgcctccatcccccttcccaccaaacccccagactctgtgaagtgcagttcttcttctccacctaggaccgccagcagagggggggggattccttggcccccaccccagttccccaacccactcccttccaacaacaaccagctccaactgactctggtcttgggaggtgaggcttcccaaccccggaagactactttaaatgaaaaaaagaaattgaataataaaatcaggagtcaaaattcatcgtcttcaaggcccctctttctagccttttctactactctctgcttggtcaaggtttgtgccccactacagaacaggggctaaattagccaccaccactgaaaactcagccgaatttttttataccactctgatgtcagcattttttccatctgtttggggctttttcctcttttttccattctccccaaatattttatctggcttcaaaattaagaggattatttttcagattgtttttattcagtgtggccgattcctcatctgattcaggctgtccagtcaggccccctccccattttgggacctggagccttcatttatgaagagattctccatcctatgaaatggatcctcatttgtaaatcttttttcttcccattttcaccaaagctgtaaagaaataatccatctcaaaccttacccttttttctctggagtcagtggggtctttcctcgctccatcttacacagaccctgagctggaagcctcaacctggttttgttcccctgtttgaaatattgtgatctccctcccatgaaagaaaaaccaagaaccagaggcgtagactgactgaagacacaactcctggctttctgaagctatggacttggattggattgctgggggtttgtagagaaaggtgacaaatttcagtacctctggcatgctgtcccaggaaactagggctcccactaacttatgaggtttttaaacacattgaaaatgacatgacattaaaataaatttggatatgctcataatgaaaaaaaaaaaaaaaaagtcgacc

SEQ ID NO: 151732 - DNA, 532 bp, Homo sapiens; identical to SEQ ID NO: 145889
  misc_feature (1)...(532): n = a,t,c or g

SEQ ID NO: 151733 - DNA, 2029 bp, Homo sapiens; identical to SEQ ID NO: 145890
  misc_feature (1)...(2029): n = a,t,c or g

SEQ ID NO: 151734 - DNA, 1729 bp, Homo sapiens; identical to SEQ ID NO: 145564

SEQ ID NO: 151735 - DNA, 582 bp, Homo sapiens; identical to SEQ ID NO: 146258
  misc_feature (1)...(582): n = a,t,c or g

SEQ ID NO: 151736 - DNA, 764 bp, Homo sapiens; identical to SEQ ID NO: 146259
  misc_feature (1)...(764): n = a,t,c or g

SEQ ID NO: 151737 - DNA, 1200 bp, Homo sapiens
ggggctctcgccaggcgtcctcgtggaagtgacatcgtctttaaaccccctcgtggcaatcccatgacgcaccgccgtgatgcccagggaagacagggcgacctggaagtccaactacttccttaagatcatccaactattggatgattatccgaaatgtttcattgttgggagcagacaatgtgggctccaagcagatgcagcagatccgaattgttccctggggggaagcttgtgttttgatggggcaaaaaaccatgaatgggccaggcccatccgaagggcaccctgtaaaacaaccccagcctctggagaaaactgctgccttcatatccggggagaatttgggcttttgtttcacccagggaggaccctcacttgagatcaagggacatgtttgcttggccaataaagggttgccaagctggttgcccgttgttggtgccaattgcccccatggtgaaagtcactggtggccagccccagaacactggtcctcggggcccgagaagacttctttttttccagggctttaggctattaccactaaaaatctcccagggggcacccattgaaaatcctgaagtgaatgtgccagctgaatcaagaactggagaccaaagtggggagcccagcgaagccaacgctgcttgaacatgctcaaacatctcccccttcatcctttggggctgggtcatcccagccaggtgtttcgacaaatggcagccatctaccacccctgaaagggctggatattcacagaagaaacctctgcattttttggctttcctgggagggtgtccgcaaatgttgcccagtgtctgtctgccagattggcttacccaactgttgcaatcagtaccccgattctatcatcaacgggtacaaacgagtcctggccattgtctgtggacgccggattacaccttcccacttgctgaaaaggtcaaggcttttcttggctgatccatctgcctttgtggttgctgcaacctgtgggttgttgcccccccagctgctcctggtggttgttgcagccccagctaaggttgaagccaaggaagagtcggaggagtcggacgaggatatgggatttggtctctttgactaatcaccaaaaaagcaaccaactttagccaagttttaatttgcaaaaacaagggaaataaaggcttacttttttaaaaaaaaaaaaaaaaa

SEQ ID NO: 151738 - DNA, 569 bp, Homo sapiens; identical to SEQ ID NO: 145568

SEQ ID NO: 151739 - DNA, 1960 bp, Homo sapiens; identical to SEQ ID NO: 145569

SEQ ID NO: 151740 - DNA, 727 bp, Homo sapiens; identical to SEQ ID NO: 145902

SEQ ID NO: 151741 - DNA, 1641 bp, Homo sapiens; identical to SEQ ID NO: 145903

SEQ ID NO: 151742 - DNA, 2008 bp, Homo sapiens; identical to SEQ ID NO: 145904

SEQ ID NO: 151743 - DNA, 784 bp, Homo sapiens; identical to SEQ ID NO: 132580

SEQ ID NO: 151744 - DNA, 2255 bp, Homo sapiens
  misc_feature (1)...(2255): n = a,t,c or g
cgcccgccatgaatgggctgtcgctgagtgagctctgctgcctcttctgctgcccgccctgccccggccgcatcgctgccaagctcgccttcctgccgccggaggccacctactccctggtgcctgagcccgagccggggcctggtggggccggggccgcccccttggggaccctgagagcctcctcgggcgcacccgggcgctggaagctgcacctgacggagcgtgccgacttccagtacagccagcgcgagctgnagcaccatcgaggtcttccccaccaagagcgcccgcggcaaccgtgtctcctgcatgtatgttcgctgcgtgcctggtgccaggtacacgggtcctcttctcgcacggcaatgccgtggacctgggccagatgagcagcttctacattggcctgggctcccgcctccactgcaacatcttcacctacgactcctccggctacggtgccagctcgggcaggccttccgagaggaacctctatgccgacatcgacgccacctggcaggccctgcgcaccaggtgagggcgaccctgggggcagctcagcctggcgggagggagtgggtggtggtctgggggtctgtgcacgtgtggctgggagcccatcggctgaggcagcacttggggccaagtgaggcgaggctgctgcatccaggtccggaggactggcccatgaggccctgtggctgcggagcttggccatcctgccatggccagctctgagctctgtctgctcggccatctgtcctgctgcccctttgtcctgcaggaacctaggcccagagccatgagggggaggccagagcgtgcccagggcctccactggggatgtgtcccgttcgtttgagtggtgacatccaggtggcagctgggggctcctgcctgcccatgctcctgccttgcaagagggcgtctgcctgggatcagagcctagagcgtgtgggaggagagttgtggggtcccggcatgggcagggtggcaggtgggtcccgcgtgcttgggactgggcacgaggaggccttgtaactggtgctggatcagctgggtcaggggccgcacaccaatgacctgggggtgagggtgcccctgggtgggagctggtggtgctgaggtggccgaggacttgtccactcccaagggaaggtgctggtgggagggggtgccacctccgcagccaccaccctcgatgctgacctgggttgcactggcatctcactgggcgtggggactccgagagtccaaaattgggtggagacatttggggacacagctgcctgaattcctcatggccaagggggtgggcaagggctgcagggaggaagagtgtccgctgtcctggccagtgcaccaggaacggctttctaacccgggcaggaaggtatgaagcattcaggatgtgggggccacacagttcccagtgtgcactgacttggctgagtggggagactggagggtcgcatccggagctgggcccggggacgcccgctggtgggaagggtgcgcgcgcgttggaggccgcggctgaccctgctccggcgccgccaggtacggcatcagcccggacagcatccatcctgtacgggcaggagcatcggccacggtgccccaccgtgggactgggcctcgcgctacgagtgtgccgcggtgatcctgcactcgccgctcaacctcgggcatgcgcgtcgcattcccagacacccaagaaagacctactgcttcgacgcctttcccctacattcgagaaaggtgtccaagattaacgtctccccgtgctcatcatcccacgggcacgaaggacgaggtgatcgactttctcgcacgggctgggcgctctacgaggcgctgccaccaaggcgggtggagccgctgtgggtggagggggccccgggcacaaccgacatcgagcctctacagccagtacctggagcggctggcgtcgctttcattctcccaggagctgcccagccagcgcgcctagcggcggcccccaaccggccggacctcagcaataaggcggcccccggacttcaccccgcgccggcccccacccaggggcttgcatgtggaccccccgggcggccccggtggaggcccggcctgggcggcgcccgccatgaatgggctgtggacgatgtacaggcaacgagacgtacgcactcctttccttttggaagcaagaagaaaatacgtgaaaacggacaattaaagatttaaaattttaaaaaaaaaaaaaaaaa

SEQ ID NO: 151745 - DNA, 1350 bp, Homo sapiens
atgaccagcacagtcttactgcaacgaggatcccgaatgaagagtttcgcggggaaggaagtggttttttatcgccctgaagaggatgccggcgatgaaaaaggctatgaatcttttccttggtttatcaaacgtgcgcacagtccatccagagggctttacagtgtacatatcaacccatatctcattcccttctttatcgggttacagaaccggtttacgcagtttcggcttagtgaaacaaaagaaatcaccaatccgtatgccatgcgtttatacgaatccctgtgtcagtatcggagaacctccctttcaaagttctttatggttaaaggtgtggaaaggacccccatttttggtggactggatcccagctcagttattccagaaggagatctaggaaatgagtcttctctcgggaatctggtctggtttgtggacattttacaagggaacagcccagcccgatcacctggtaaagttcacagacagtatagcacacttagagcttctagtctctttttttctccatattcttcaatacagcagacaattggattaccagagttaagagaaagcttagccattgacagaagtcaaagtgaacatcaacaaaaaccaatctggacttgcgcggaggcttttcttgttgttattttcgggcagaagagtcaggttgccatcgcggcagagaattggcgggaggaagagcctcaagcaggtccttcaggaggtgttccagaaggcattgctgtcagagatgacagctccatgcgtgttgttgtcccagaagaccttctagtgggagaagacgtggaggtgaaagatgaccgtgtacagaccaaccccaaggcaccaatttccagaagcttcaaagcatccgagagcaaaaattttcagaagcaacacgagatgacggaagcagaaggaagagaatataaaggatatgcaaggatttcttgttttcagaagtttggaaacctagtgccctccagaggtcatatagcccttgcccgtgctccagaagagcctcaagcaggtcctttcggaggtgttccagaaggcattgctgtcagagatgacagctccctgcgtgttgttgtcccagaagaccttctagtgggagaagacgtggaggctgagcagcagaaaaaggtggccatcatctctgctgagggctactccaaggcagctgagctgattgccaactcactggccaccgcaaggatccgcctgatggagctctgcaagctggaagctgcggaggacatcgcgtaccagctctcacgctctcggaacatcacctatccgccggctgggcagtccgtgctcctccagctgccccagtga

SEQ ID NO: 151746 - DNA, 1525 bp, Homo sapiens
  misc_feature (1)...(1525): n = a,t,c or g
agagatctgaagtgattttacctttatttccttcactttaagccaatcatgaaatttcagagtggaagcaggtgtgagaggtgttcagcagaaggaaacatgtgctttcaaagtgctagagtccattggcaagttgggccgtggccttatctgttgcaggaggcgcggagaactctgccttatataatgtggatgctgggcacagagctgtcatctttgaccngattccaggacaaaaatgacaggacattgtggtaggggaagggactcattttcgtcatcccggtgggtacagaaaccccaattatctaatgactgccgttctcgaccacgtaactgttgccagtcaatcactggtagcaaaagatttacagaatgtccaacatcacactgcggcatccctcttccgggcctgttcgccagcccagctttcctcgcatcttcaccagcatcggagaggacttatgatgagcgtgtgcttgccgtcccatcacaactggagaacctcaaggtcagtgtgggctcgctttgatgctgggagaactaatcacccagaggagagctggtctccaggcaggttgagcgacgacctttacagagcgagccggccacctttgggctcatcctggatgacgtgtccttgacacatctgaccttcgggaaggtatttcacataagcggtgggaagccaaacaggtggctcagcaaggtaagcagagaagggccagatttgttggttggaaaaggctgagcaacagaaaaaaggcggccatcatctctgctgagggcgactccaaggcagctgagctgattgccaactcacttggccactgcaggggatggcctgatcgagctgcgcaagcttggtaagctgcagaggacattcgcgtaccagctctcaacgctctcaggaacatcaccttacctgccagcggggcagtcctgtgctcctccaagctgccccagttgagggcccacccttgccttgcacctcccgcgggcttgacttggggccacagccccgattgattcttaacacagccttccttctgcttcccaccccagaaatcaattgtgaaattttcatgattggcttaaagtgaaggaaataaaggtaaaatcacttcagatctctaattagtctatcaaatgaaactctttcattcttctcacatccatctacttttttatccacctccctaccaaaaattgccaagtgcctatgcaaaccagctttaggtcccaattcggggcctgctggagttccggcctgggcaccatgcatttggcagcacgcaggcgggtgcagtatgtgatggactggggagcacaggtgtctgcctagatccacgtgtggcctccgtcctgtcactgatggaaggtttgcggatgagggcatgtgcggctgaactgagaaggcaggcctccgtcttcccagcggttcctgtgcagatgctgctgaagagaggtgccggggaggggcagagaggaagtggtctgtctgttaccataagtctgattctct

SEQ ID NO: 151747 - DNA, 1606 bp, Homo sapiens; identical to SEQ ID NO: 145909
  misc_feature (1)...(1606): n = a,t,c or g

SEQ ID NO: 151748 - DNA, 429 bp, Homo sapiens; identical to SEQ ID NO: 145910

SEQ ID NO: 151749 - DNA, 1599 bp, Homo sapiens; identical to SEQ ID NO: 145911
  misc_feature (1)...(1599): n = a,t,c or g

SEQ ID NO: 151750 - DNA, 556 bp, Homo sapiens; identical to SEQ ID NO: 145912

SEQ ID NO: 151751 - DNA, 2714 bp, Homo sapiens; identical to SEQ ID NO: 145913

SEQ ID NO: 151752 - DNA, 23287 bp, Homo sapiens; identical to SEQ ID NO: 145914

SEQ ID NO: 151753 - DNA, 433 bp, Homo sapiens; identical to SEQ ID NO: 509

SEQ ID NO: 151754 - DNA, 894 bp, Homo sapiens; identical to SEQ ID NO: 145917
  misc_feature (1)...(894): n = a,t,c or g

SEQ ID NO: 151755 - DNA, 808 bp, Homo sapiens; identical to SEQ ID NO: 145918

SEQ ID NO: 151756 - DNA, 565 bp, Homo sapiens; identical to SEQ ID NO: 145921

SEQ ID NO: 151757 - DNA, 1479 bp, Homo sapiens; identical to SEQ ID NO: 145922

SEQ ID NO: 151758 - DNA, 996 bp, Homo sapiens; identical to SEQ ID NO: 145923

SEQ ID NO: 151759 - DNA, 1105 bp, Homo sapiens; identical to SEQ ID NO: 145924

SEQ ID NO: 151760 - DNA, 552 bp, Homo sapiens; identical to SEQ ID NO: 145925

SEQ ID NO: 151761 - DNA, 2801 bp, Homo sapiens; identical to SEQ ID NO: 145926
  misc_feature (1)...(2801): n = a,t,c or g

SEQ ID NO: 151762 - DNA, 648 bp, Homo sapiens; identical to SEQ ID NO: 145927

SEQ ID NO: 151763 - DNA, 1011 bp, Homo sapiens
  misc_feature (1)...(1011): n = a,t,c or g
agggactgagggccggctcagttgtggtgatgtaactacctatgcatctggaaaaatatcccaacaaaaatacttcagttaggtggtaatatgcaggcaagttttaaaacgtacttcttattgttataatttttctttgtacaataagtggaaattataaaaatcttaggaacatgtatataaactcccaagtaaggcaaaaatcacgaggcccctcatgttgtcctctgcacgtggaggagcagaggagtcagagagggcagagccgcctctgaggtgggctttccttctcttgggcctaggcactgtggttggcgtggacgagagcactgctttctcatggcctgtgtgtgacatgtgtggcaacgggagattggaacagaggccggaagacagaggcgccttttcctgtggggactgctcccgggtggtcacatctcctgttctaaagaggcacctacaggtctcccctggactgccgctcaagaccgcagtgcagagtgaaggtcaagctgttgcagcgcagcatttcctccctgctgaggtttgccgccggtgaagatgggctctattcacagtggctgatcaggtctttactgcggatctggaaagaagctgatagaagatgggtgccagaggggcctgggtagagatgttagctgagagatacccagtatggattctgtcagttttctggagctacgaagtgaagaagtgtcttcggaaaggaagtggggttgttaaattgttttgtccagtccgtaaccgcccacccgaccagctgcattggattggaggaaatcgagcttctgagtgcaggaggggcctctgcagaacactagcggttgccgcaggatctgtgaactttgcaatgtggctgcaagggtggtggtggtggtggtgatttgnggtagttatttgttaactatggacacagtgaacgtagtttacgatcttgaaatgaaacttatatttttctggggaaatgttcagatacagttttgtgaactg

SEQ ID NO: 151764 - DNA, 3692 bp, Homo sapiens
tttcgtgctgaggaggcggtgcgctcaggcggcgctcccggagatgccccgcggcagccgcgctcggggctctaagagaaaaaggagttggaatacagaatgcccatcgctttccgggagaaagacctctgcagggcagaagagcaggtctcaggacagcaggggcagctgcctctctctctgaagcatggctcaggtgtggagaagggtttcagaacacttctgggaatccggtcattaacagctgaagagaagacggattacagaaaagcaccttgaattatgccctagacccaagcaagaaaccaccacatctaaaagcaccagtgggcttacagacataacatggagctccagtggaagtgatttgtcggatgaagataagacactttctcagttacagagagatgaattacagtttatcgactgggagattgacagtgacagggcagaggctagtgactgtgatgaatttgaagatgacgagggtgctgtggaaatctcagactgtgcttcttgtgcaagtaatcagtctttgacaagtgatgagaagctgtcggagcttcccaagccaagttctatagaaattttagagtattcatcagatagtgaaaaagaagatgatttggaaaatgtcctactcattgattcagaatcccctcacaaataccacgtgcagtttgcatcggatgcaagacagattatggagagactgatagattcaaggacaaaatcaccagagaccattttgcatacacctcagaatcccacagttaagtttcccaggactgcagaaaattcagcaaagaagaagcttttaagaggtggactagcagaaagactaaatggactgcagaatcgagagagatctgctatttctttgtggagacatcaatgtatttcttaccaaaagacactttcaggtagaaaatctggtgtattaactgtgaaaattttaaagctgcatgaggaatgtgccatgcaagttgccatgtgtgagcagttattggggtcaccagccaccagctcctcccaaagtgtggctcccaggcctggagctggcctgaaagttctcttcaccaaggagactgcaggctacctcaggggcccgccccaggacactgtccggatcttccctccctggcaaaaactgattattccaagtgggaagttgccctgttattctgaatacttacttttgtgagaaagttgttgccaaagaagattcagaaaaaaacttgtgaagtgtactgtccggacataccccttccaagaagaagcatctctttggcccagatgtttgtaattaagggtctaacaaataattcacctgaaatccaggttgtgtgtagtggtgtagccactacagggacagcctggacccatgggcacaaagaagcaaaacagcgcatcccaaccagcactcccctgagggattctctcctgggatgtggtggaaagccaggggagctgcctcgtggccagggagctggagtccgagtggtggtgcaaagagtgtattctcttcccagcagagacagcaccaggggtcagcagggggccagctcaggacacacagacccagctggaactcgagcctgccttcttggtacaagatgcctgttggaatgtttcggtgaagtgcactttggagttcaacatgttcgaaggcaagacagtttggaagggaagtcttgcagcctgggtggggaatgaaggttctacagaaagtcaccagaggaaggacagcggggattttcaggttgacttgacaccctgttggcccccagcgatacctctggaaaacacctgggccgcgaccagccctgttgaagagataaaaactccatctggctactccagcctttgggtacaatcttaccgctcatccaaatctgggacaaattgatataattgacgaagaccccatttataagctttaccagcctccagttacccgctgcttaagagacattctccagatgaatgatcttggtaccccgttgcagtttctatgccacggtgatttaccaaaaacccacaagctgaagagtctgctgcttcctgggagcaaagggagatctggctgctagtgaccgatgtcactcctgcaaacgaaggaggaagagagaccccaggctccccaaaaccctgctggtctatgtggcccccttgtgtgtgctgggctctgaagtcctgggaggcactcgctggggctgcccctccacagcctcttcttcaagggacgctctccgtgaccagggtcgggattgtttgtgcttgaacgaactggtcctccttgcttcagaagccccttttgagtgtggtctctggtgcaagttcctgtgagctgcctggcccgggtgatgctcgacagcctggactctgcaacacctgtcaactccatctgcagtgttcaaggcactgtggttggcgtggacgagagcactgctttctcatggcctgtgtgtgacatgtgtggcaacgggagattggaacagaggccggaagacagaggcgccttttcctgtggggactgtccccgggttggtccattccctgttcctcaagaggcactgcaggttcttcctgggactgccgctccaagccccagtggcaagagtgagggtcaagcctgttgcagcgcagcatttcttcccttgtgaaggtttgcccgccgggtgaagatgggagctacgaagtgaaagaagtgtccctcggaaaaggaagtggggggttgttaaattgttttgtccagtccgtaaccgcccaccccgaccagctgcattggatgggaggaaatctgagcttctgagtgccaggaggggcctctgccagaacactagcggttgcccccaggatctggggaactttgccaatgtggcctgccaaggggtggtgggtggtggtggtgattggggggtaggttattgggttaacctatgggaccccagtgaaccgtaggtttacggatcttggaaaggaaactttagatttttctggggaaatgttccagataccagttttgtgaactgttaaatcaaaataccctttttcctacagtttatcttttattttcctgcaaatttaaggaacatatttactccgttttccacattgaatccttaagttttaaactccttcatttggtatttaaggccaatatatgaggaaaaaaatttttttttgttcatttgtaattttaacaagttgaacattttaccatgattgaacatgtttttattacagtatttaacattcccccaaagaataccctgcaaagtgtaaacctttgtcccatactgtgatattaaaaattctgctacaataaatgtcaaacctaaggcactttgcaggttcactacttttggggaaaatgttctagggaactgtatccacaggttgaaactggttacccccataaagtgtagctcctctgaactggtgtgatccgtgtctctgctgaatgggtggtggggatagccggctccacccacacacacctgttttaattaggctgggtaatgtgcacggagagcaaagatcacagactaaggagcagtcagtcggatatttgctttgctggcaaagatttaaaccaagaattaattatctttggacactataaagattttgttcccttccttatagcaatataatcatgacaggccatggttaactacatcagatac

SEQ ID NO: 151765 - DNA, 729 bp, Homo sapiens
aattttgccctcgaggccaagaattcggcgagggcaataagctccgtagtccagacgcccatgggtcatttcacagaggaggaccaaggcttactatcacaagcctgtggggcaaaggtgaatgtggaaagatgctggaggagaaacccctgggaaaggctccctggttgtctaccccatggaccccagaggttctttgacagctttggcaaccttgtccttctgccttcttgcccatccatgggcaacccccaaaagtccaaggcgacatggccaagaaaggtgctgactttccttgggagatgccaacaaagcacctgggatgatctcaaagggcaccttttgcccaagcctgaagtgaacttgcacttgttgacaagcttgcatgtgggatcctgaggaactttcaagcttcctggggaaattttgctggtgacccgtttttgggcaatcccattttcggcaaaagaatttcacccctgaaggttgcaggctttcctgggcagaaagatgggtgacttggagttggccagtgcccttgttccttccagattaccactgaagcctcttggcccatgaattcagaagctttcaaggataaggcttttattcttgcaagcaattacaaataataaatctatttctgctaagagatcacacatgattttcttcagctcttttttttacatctttttaaatatatgagccacaaagggtttatattgagaa

SEQ ID NO: 151766 - DNA, 485 bp, Homo sapiens; identical to SEQ ID NO: 145933
  misc_feature (1)...(485): n = a,t,c or g

SEQ ID NO: 151767 - DNA, 653 bp, Homo sapiens; identical to SEQ ID NO: 145934

SEQ ID NO: 151768 - DNA, 458 bp, Homo sapiens; identical to SEQ ID NO: 133302

SEQ ID NO: 151769 - DNA, 15062 bp, Homo sapiens
ctgcagtgagccatgatcgtgtcaccgcaccccagcctgggtaacagaacaagaccctgtctccaaaaaataaaataaattaaaaaataaacaaattcaaaggaaggtgaagttcttccccagcaaaaatgtttttggtcatccctctgccaccatctctcctactgattcctccctcagaagcctggataccagtgatcctttcccttccttcatctactgttttctttctttagaagtagggaggtttaccgatgtctcacagtcctgatgtcttagggaattgatttagcaaggaaaagtagaaaatatatcagtcagttcccaccagcccatcacagcccaggagcttgaaattaacaatcactaataaatagagaagctcaatatgtataaagtattggcagtgcaaagtttccactttaacttgcagaaaagtgcctgtttagcagaaagaaagaaaatcctggaaagttaacactggatgaaatcttagagatcacctacttctctccctgatttttccaaatgaggaaactaaagcttcgagagatgaagtaactagcatagttattcaactatttagtagcagggctaggactagactccagtctcctgcctcgaagacagctgttctatccatgccacttgctggcaacatgtgcatctagcaaaacacatcataaagtatcctcatcttaagccatcaggaatggaaatcaaaccatttaaacccttcctcttctctctagcaatattttttcttcgcatttctctgtgccctggtctctctctctctctctctctctctctctctctctctctcgtttttaaaatcactcctgtttctttcgtggctctttctcattgtggcatgcctgcatgagtatcttgatttttctgctctaagctatggtttcttgtccaaagaaacatatataaacaaatcaaaacccttccttggtgacctttgtagaaaaggacacttggaatttctatatgagagaagctgaacctctctcttagcctatccagtcaattaaaatgagtctgtggcccccctgagggttgttaaccaatcctaagaaaggaaagatcaatctcatttcttcgtcaccactgggcagggaggctgccaaccagtcagaatctgccactcacagtcattaaaaaaactggccaatcagtccaaccttgttatatggtctggtaggaaaagaaagggactgattggaaaggatagttctgtctccacaccctttccttcctggaccccggttttccctttgtgaagtgaaagaaggacccttccccaagcctatagttaagaagatcctccgaccctcagctaagcttctcttggatcttttgctgtcttcaaattcacccctccccttacaaacctcctttttggagcctcactgctcccttgcggatttgatttcttgcttcaagcctcgtagtaatagtcccaggattctcagcctcccctcagatctccactcaccagcaagtaaaataacttgttttgtatgacttatgcaggtgaaaacgtttttaaagtgtagttgagtctctttcaggagatactatctcaaggaccttgcaataaacagtccatataggtagcagtgcagaattgagttgcaatgcccttaactatagaagcagtgatgatgatggtgatgatggtggtgatggtggtggtggtggtggtggtggtgacgatgatgattttaatgctagcaattactgaactcttactgggtaccaagtaccttgctaaaagcttcatatgtattatcccaatattggctgtgtgataagtactattattcttctcaatttacataggaggaaatagatttagagggggttaaacagctagctcaagatcacacagcaatttgggaacccagatttgtctgaacgcagaacccattattctatgagggcaagggagtgttaaacatcgcaggctgtaacaacttttggaaagagccagctttagcttcctcccaggccccttctctgatcctcctctgggattgttagccatatctgagtgtctaaattgtcgcaacagctgcaacagccgtttgggggtggtggctcctaagaactgtggactttctctgccactgaggatgtgaagctgacagcttaaaagaattccgttttggtgggaatggagatgtctggagacctcaggggataaacttgtgtctttgctagcctgtctttctcctaacagcatctccacagtgcctggcaccacttggtacttgataaatacctgttgattgattcccaaagatcccagttccatttcccacgtacctgcccgctcggggcgcaatcaacaactaaaactggagatttggggatttcagaggaacctgtgagaatcctgatggagctggaaatgcgaatttaggaaagacaggcagtctaccaccctcctcttctcgcccgcttctcctatttctccccactccttcccctccctttcaggagctcagggccataaaaatgcagatggaggatcggtgtgaaataacgggcccatataaatccctctgccgcccgcctgcaagatggattggccgcattgaaattcctccgcgaggataattaaactcggggcctcatccgggcaaaattacattcctgtaatggcgtcgctcggggtcccgggaaattgctccgtgggctttcagcggcggtttttatcgccggccggggtgtgcctgtctgcggctcgcctctcctccgggaccgtaaagctgctgccgtgatttatcctccccttctcccaaatccgattaaatggaggagctcggggccggggcgccgcggggcccgggagccgggagggggcggcgggaaggacggggccaaggaggggaggacaaacggcccctcagagagtggcggatttgcctttatttacagccgcggctttctttttattttttattttttatggggtttggtgagcttttcccgtctttctcgtgctgcgttcaagcacgatgcagggacggcaggggtttggaactggataggccttgtcgccctgttccaaagggcagggcaggtcctgtctgggagacaaggaggcctaggaaagatgagggccaggaagcctcccccacctccttccatcaggggaagggcgagcgaaaggggagagaaaacccacgttcaggagagcatgggggcgggaggggagggcgctgcttatcccaactcgcgtagttgaaacctgagcagaggctcgggcaagcctggagtgacctcgcaaccttacagcgggtcgcaggtgcccgttattcctagactgtcccaggagccaggaaagagggattcggatcatatttaaccctatcttctggctcgctgatgctgcttctctcatggtttatcaccggaatggaaaggaggaaacggggagtgggggaaagggcgaagccaccagaagcagctgcggcattttgctgactattcgcccatggagccggtttgccatccagtgatgccagagtcccggcgcgacagaaagcaggactcccaagatcttcctcctgctgcattttaggcactgaaccccaatcccgaccgtatgttaacactgaattctgagtaggagttttgttttggcagtgtgacgactgcgcatgctcggaaaggggacgcaagtccgagatcccaaacgcggtacagaccaaaccgcagtccacgttacggatcggcttactccgcggagttggcctcatttctgcagtcggcgctccctgtagtttctcctctcgaacgccaggtggagcaaccggccggataccgccacagccctggcaggcggcgctgtgatgcctgagctgatcctgtatgttgcaatcactctatccgtggctgagcgactcgttggcccgggtcacgcatgcgctgagccttcctttcgctcttcccgctgctccgcccctctctgtcttctctgcagtgggagcaggtaaggccttgggacctagagccctctgtgcgctgcgcacgcgcgcgggacacctcaccttgcgcggatgctttgaggcgcttaccttgcgtgctcccaccctggtcctctcgccctttcttgcttccgctatcccttagccttagagttggctcttccgcgtgccggtgacctccaaccgcgcgggcctggcgccatcttggatgtctcgcagggggaggataccttggagctggccaaagttagatcctggagtgctgcttttcacctgttccacccagtccctgcaaacactcttttctcgccctctggccctttcagattgtgacaacccccaggctctcccctcctatctctgctttctcttctcatcctgacttgtgccttctttattctgaaatctccagactttaggccccagaacctcaggtgctccgagcaatggagatagtggatcgtctaaagtcaccaatccctctagtcagcacccctcaatttaaaaagtaaaccttgaacatggtagaagtgggaaaaaaagccaaaacatcgcctcccgttaggttgtggcttgggatagctaaggcagaagagagaggctggttgctttggaatcactagttatttaccagtacctttctcgcatcccggcacgctggtgaagttgtaaaagtcacaaatggtgggctagagatgagggtttctgttgaggcagcaggcccagaaaggtggggtaaggccaagctagtggggccagcatgagaccctgcctgccagctttcctgtgaaggattaattaacctccccagattctgctgttacaaggaaaagaaggtttaaggaaaggaatagttaagttactacccctgtgactcatctacactgaggaaaaagcccgtgatgattttggagtcctgattctggatagtgcctttgcccaagttgtaggctaacaattgcagagttgccatggttagatagccaatggtgggatcacttaattgccaccccttgttgtgggtttattatatgccagcaccacattaaactctttatgtatgttaatttgtaaatgaacatacttaatccccctaagagctgcattttacaaagaagataataaggtataattcccttagaaaagaaccaccccttctttttctaaaagccttaaagaactattggattttgacccaagaaaacctgaatagtacggcagcaaaattgggttagagttacatataggcaaaaatcagagttctagataggacaagagttgaagacatccattaacttaaaagtaattaaggctgggtgtggtggctcacacctgtaatcccaacactgggaggccaaggtgggaagatcttttgatgccaggagttccacaatagcctgggcaaaaaataaattaagagcaattaagatgttggattcagaagtgttttaacctgggacaatctgagttcagttcatttaatgaagtggtatttaatagccctaagcattcactgagtatttcagcctgtgacatattagaaagcatgtaacttaaaagatccaagttcaagtctatcctctaccactaccacagtttcaagactgggtttagggtcacgctcttgcgttaagtatacctaataatcatctgggaaacttgtttgaaatacagggcacttgagccttattcccagagatcttttttgtttgtttatagacagggtttcacgttgttgcccatactggacaactggcgtgatcatagctcactgaagcctccagctcctgggttcaagcagtcctcctgcctcagcttctggagtagctgggactacaggtgcacttccacctcacctggctaattttatgttttgtagagatgaggtcttgatgtttgcccaggctggtctcaaactcctggcttcaagttatctttccgccccagcttctcagtgttgggattacaggaatgagccactgaacctagctcccccagagatcttgaccaggaaggtccaagttgcgcccaagaatatgcattttttaatacgtacaccacccagataattctagttcagatgggcttctcacttcacttggagaaaccctgcctttaggtttttaactcaccttctgtttgaggtaagttcacttctaccaacttagatacctatagggtgtcagatcttctttagatcttggggagacacaatttaatacttttttttttttttttgagacagtttccctcttgttgcccaggctggagtacaatggcgcaatcttggctcaccgcagcctctgcctcctggattcaagcaattctcctgcctcagcctcctgagtagctgggattacaggcatgcaccaccatgcccgactaattttgtattttcagtagagacggggtttctccatgttggtcagcctggtctcgaactcctgacctcgtgatctacccgcctcagcctcctaaagtgctaggattacaggcgtgagccactgcgcccagccactaataccttttggatagactaataacagagttcctccttgatcttcctcatcttattaatacaggaaattgaagtattttcaggaatcagatacttccagggatcagcaaagagattgttggagaccttccagtgtcttggccttcaacaaatatctcccaaaactacaaagactctaaagggcaactttttgtttgtttgtttgtttgtttgtttgttttgagatggggtctcgctctgtcacccaggctggagtgcagtggcgtggtctcgtctcactgcaacctccgcctcctgggttcaagcaattctcctgcctcagcctcctgagtagctgggattacaggcgcgtgctaccacacctggctaatttttgtatttttagtagaggtggggtttcaccatgttggtcaggctggtctcgaactcctgacctcgtgatccgcccgcctcggcctcccaaagtgctgggattacaggtgtgaaccacgtgcccagcctaaacggcaacttttaaaggtccagatgatgaagtcttgagaagcgttccttttgaataaaaactaaggaaaacttaggcaaaagacactctgggaaaattcctgtggcaactgcaaatcatgaggctatggaaatgggtaacaggtcttacctgaacccaagtgttcacttgttcagaccaggggaagtcacttcattataaggaaatcttgggagctgtgtggggtttctggaagaagtcatgacttcagggttttaattctatttctgccaatgacttaaggtcagtcactgttttctgggccagttaagctttctagggccccttttctgctaataaggatatagtttagtgaataaggagcgtttacaatactgcttctgtaattccagctctcctgccacagctcctcaccccctgaaaatgttcgcctgctccaagtttgtctccactccctccttggtgagtacctgcttttctgggagagttttaaaggagagacatcttgtctctctctttccatcagaccttgttcttcacagcaaggctgggggagaggaggtccaggcgggcagatcacttgaggccaggagttcaaaaccagcctggccaacatggcgaaaccccatctctactaaaaaaacgaaaaccagttgggcatggtggcgggcgcctgtaatcccagctactcaggaggctgaggcaacagaatagcttgaacccaggaggtagaggttgcagtgagccaagatcgcaccactgcactccagcctgggcgtcagagcaagactctgtctcaaaaaataaataaataagtaaataagtaagaaagattcttggggagggaaggccctctgctatgattgcgtaacaggatagagtgaatgcttgctagatactctcctgccccatatcccttggcggccagttaattttttttttttttttttttttgagacagagtttcgctcttgttgcccaggctgcaatggcgcgatccaccacaacctccgcctcccgggttcaagcagttcacctgcctcagactcccaagtagctggggttacaggcacctgccaccatacccagctaatttttgtatttttagtagagatggggttacaccatgttggccgggctggtctcaaactcctgacctcgtgatccgagtagagacagggtttctccatgttggtcaggctggtcttgaactcctgacctcaggtgatccgccgtcctcggcctcctaaattgctgatattataggcatgagccaccgtgcctggctgtgcccagttaattcttacccagccatcttaggagaagaatagagatgagaatctagaccaagatcaagttattcctactcctgaaactatatgtcgtgtaagctggccatccagagtggtaaatataagtagattacataacttggactgagtatgcactgtctgtaggatcttgtcctgagttagccatagctaaggagttcattctgggacttaaatttggataggaagctaaaatttacataaatacacattggaaaagtatttgactcagaaacaacagtatggaagaaatttttgaaatagtagctagaggaggcggttggttcattcacaaataaaaaggagtaccatttattgagcatttaccatgtgccttagcactcactgagtttactaattggtatacataatctcatttactcttcaaatcaaccccaagagatgatattttgatttcataaatgagaatacaggcttagaaaggtttaagtgacttatcctgagaatacactgctgataatagaattaagatttgaatctcactttatctgatgcctaaagccctggctatgaatcaccatgtgtctgttttggtgtcactggcttggggttagtcagaaaaggctaccagaaggaggtgagttttgagcatgaatctttgttcctattttccaaaaggatgtgttcagggaaagttactggcttctttcttgtgggctgaccattacccatacagaaggcccccaactttagattaagattttttttttttaactttatgatgatgcaaaaatgatatgcattcattagaaaccatacttcgggctgggcgtggtggctcatgcctgtaatcccagcaccttgggaagccgaggtgggtggatcacctgaggtcaggaattcaaaaccagcctggccaatatggtgaaaacctgtctctactaaaaatacaaaaattagctgggcgtggttgccggcgcctgtagtcccagctacttgggaggctgaggcaggagaattgcttgaacctgggaggtggaggttgtagtgagccgagccgagatcacgacactgcattccagcctggcgatacagcaagactccgtctcaaaaaaaaaaaagaaagaaagaaagaaaccatacttcgaattaggaatctttatcttttcccaagctagcaatgtgtggtacaatactctgttgcaatactcagcaggaacccacagctcccagtcacctgcccaatcacaggggtaaacaaccagtactctacggtgtactgtgttgctaggtgatttcacctaactgtaagctaatgtaagctagtgtaagctttttgagcacattgaaggccagactatggtgtttggtaggttagcagtattaaatggtttttcaaagtatgatggatttattggcacataaccctatggtaagttgaggagcatctgtatatatttcccttgttgagtgaggcaaatgcttctgaggcttagatttcttcttgttctcaagagctataaaaggatatagcaaggttggatgctcccttatggcccaaaggaagtagactttctttccttaaagcaaagtctgagaagcaagagaaatggtgtggttctttaatttagactttgctaaaaggaagaatgatccaaaactctaacgtacatgtgaagatggaaaggccatgagaggaaagaaaatcttgtctgatgatgtaacaacgtggcatagttctgaaactcctctccagtcttccttgaccttcctgcccctgtatgtcattcctgctaggtcaagagcacctcacagctgctgagccgtccgctatctgcagtggtgctgaaacgaccggagatactgacagatgaggtaccttacagtggagttgggactgtggttttgggggtgatgggtggggagggttacctgccagaaccaggaggtagaatgctgaggacagtcatcacaggctaaaattcatgaatggccaaggccatgggctttaggtggagatggaggacacttaatacgctgtatgctatagtgctccagcttttgccactggcagcacatgcccctgtgcactgctgctaactggtattacttggcctagtctactgacttcagttggaagcatttagtcctaggaagatgatctccttggggcagcaagaatagactagggcctcagtcttacacttcttgaccacacctgaatcttaaaggcatttgaagtctacatcctacgttaaaaggttctacttgccagcattttagggcgttaaacaattttctgtttgggggagaaacaatgggatttggcagcttaaagggttttaaatggtacaaaagttaccaaagcaaaaaactttaccttctacctgcctctttttcacagagcctcagcaagcttggcagtctcatgtcccccttaacctcaacttgtctccttaaccgcaaacttccaaaaccagcgcccatttcaaagggaacatcgaacaacagcagcccaagtttccattggaagctggggcttgccacaagttggggtggctggtttctggggctgggaattggaaactgtgtttggggagccctcatcattgggttatgccaggtaagataagttggaccctccactggttatctgatatgctttccaaaggtcagaaaatatttgggggtctagaactatactatcccacactgtagccactagctacatgttgtttgtttgtttgtttgttttgagacagtaacgctctgtttcccaggctggagtgcagtggcgcaatctcagctcactgtcacctctacctctgggttcaagcgattcttgtgcctcagcctcccaagtagctgggattacaggcacacacaatgacgcccacctaatttttgtggttttagtagagatggggtttcgccatgttggccaggctggtctcaaactcctgacctcaagtgatccacctgcctcggcctccctaactgccaggattacaggcatgagcccccgcgcttgacctgaattttagttttaattaattaaaaatacatagtttcagttttcagttcttcagtcacgctaaccatatttcgagtgctcagtagccagatgtggctagaggctaccatattcaacaatgcaaatatagaatgtttggctgggcacagtggctcactaatcccagcactttgggaggccagggcaggtgaatcgcttgaggtcaggagttcgagaccagcctggccaacatggcgaaaccccatctctactaaaaatacaaaaattacctgggtaaggggggcgtgcacctataatcccagctattcaggaggctgaggcagaagaatcgcttgaacccgggaggtggaggttgcagtgagctgtgagccgagatcatgccactgtactccagcctaggtgacagagtgagactttggggaaaaaaaaaaaagaaaaaaacaaatataggctgggcgaggtggttcatgcctgtaatcctgcactttgggaggtcaaggcgagtggatcacctgacgtcaggagtttgagaccagcctggtcaatatggtgaaaccctgtctctgctaaaaatacaaaaattagccaggcgttgtggtgggcgcctgtagtcccagctactcgggaggatgagacaggagaattgcttgaacccgggagacagaggttacagtgagccaagatggtgccactgcattccagtctgggcaacagagtgagaccatcaaaaaaaaaaaaatttatatatatatatatatatatatatatatatatatatatatatgtgtgtgtatgtatgtatgtattagaatgtttatatcattgtgtcattgaagaaagtttcatgaacagctttggtctagagcatgtgttggcaaactaaggcctaagggccaaatctgggccatagccaggttttgtatgattgagctaaaaataattttatggccgggtgtggtgccttacgcctataatcccagcactttgggaggccgaggcgggcggatcacgaggtcaggagttcgagactagcctggccaacatggtgaaaccccttctctactaaaaatacagaaattagccaggcatggtggcagatgcctgtaatcccagctactcaggaggctgaggcaggaaaatcacttgaaccctgaaggcggaggttgcagtgagtagagatcacgccactgcactccagcctgggcaaaagagtgaaactccatctcaaaaaaaaaaatagtttcgcatttttaaaaggcttcatttttgttttaaagcaaaagagactatatgcggcccacaaaacctaaaattatttacaatgtggccctttacagaaaaagtttaccttccctgttctagagactcagtgaacatagtggctttactgctattttttcccatctctgggaatttccctctgtcactcctgggaaaactggcactgcagccagcccctggtttctgacacctgggactgtttagtactcccagctctggataactcagttaaaaccaaattaatcctctagagaccaggaagttctcttaatgtcttttgagaaatagagttctttttaagaatttgtattaaacaagaagtctgactgctgctttattcactattctgttaaatgttggtgtcgatttaccttacccatcaagacttctggaggtatcagagtaagggaaatacagattatatatgggccttcaacactgggagtcctttatccatactacttcaactcataaaccccatagaccatttgtaacttcttttttttttttttttttgagactgagtctcgctgtctcccagactgaagtgcagtggcacaatctcagcccactgcaatctctgcctcccgggttcaaatgattctcctgcctcagcctcccaagtagctgggattacaggtgcccaccaccacgcccggctaattttttatttttttattttattttattttatttttttgagacagagtctgactctgtcacccaggctggagtgcaactgtgtaatctcagctcactgcaacctctgcctctcgggttcaagcaattctcttgcctcagcctcccaagtagctgggattacaggtacgcaccgctacccccagctaatttttgtattttttttctttcttttttttttttgagacagagtcttgctctgtcgcccaggctggagtacagtggctgcggtcttggatcactgcatcctctgcctcccgggttcacgccgttctcctgcctcagcctcctgagtagctgggactacaagcgcctgccaacacgcctggctaattttttgtatttttagtagagacagggtgtcaccgtattagctaggatggtctcgatttcctgacctcgtgatctgcccacttcggcctcccaaagtgctgggattacagacatgagccactgcgcccagcaatttttgtatttttggtagagacagggtttcaccaggttggccaggctggtctcgaactcctgacctcaagcaatctactcatctcggcctcccaaagtgctgggattacaggcgtgagccaccgcgcctggcctaatttttgtatttttagtagagacggggtttcaccatgttggccaggctggtctccaacttctggcttcaagtgatccgcctgctttggcctcccaaagtgctgggattacaggtgtgagccaccgcacccagcccatttgtagtttcttaaagccccagatcttctgactatttgaaatgagagaacataatctgtccctcttactcttgtcttctagaagagcggtgttccataaatccttaggattctgaggttatgccccagagactgtcttagagaataaaggggagaccaagccgttaaaatttccccactacttttgtaccattgcagtttggcttttagatgtttactatatgggagttctgcttaaagtttgaaaacactgctctagatagacccttccactctggatgcctcttccatcctatttgggccctggatattaagtgtctgggccaagaggtcttaatttgtggtaatgagatgggtgaaccattagtgaaggtcatgattatacctgggccatgttacaggattttagattgcctgctcccccttcattcagttcctgtagagcctttggggaatcagggcaagaatttgggcatgatggtgttaccctaaaagcttctttattatgtgagataatcttgaagagggggattctccctgagcccatcttagatatttatccttttctttgtgtgaactagaaattcagtcttttctcttctccttctaccaggaaccctttttctctgagcaacagctcttctcctacgcccattctgggctttgccctctcggaggccatggggctcttttgtctgatggtagcctttctcatcctctttgccatgtgaaggagccgtctccacctcccatagttctcccgcgtctggttggccccgtgtgttccttttcctatacctccccaggcagcctggggaacgtggttggctcagggtttgacagagaaaagacaaataaatactgtattaataagatgtttcttgagtctcctgtgtatatttcttttccacagttggctgagtgccttcgtgagagtacaaggcccgaagggtagtgatggtgctaaactcaacatggatttggctgagctc

SEQ ID NO: 151770 - DNA, 561 bp, Homo sapiens
  misc_feature (1)...(561): n = a,t,c or g
gactctgggacccgggacactgttctcaagctcctgcgcgagtggtatatgatcatctctcgagagatgtttaaccctatgtatgccttgttccgtacctcacctggtgatcgagtcacctacaccatcaatccatcttcccactgcaaccccaaccacctcagctacttcaagtttgtcggacgcattgtggccaaagctgtatatgacaacccgtcttctggagtgctactttactcgatccttttacaaacacatcttgggcaagtcagtcaagatatacagatatggagagtgaagattaccacttctaccaaggtctggtttatctgctggaaaatgatgtctccacactaaggctatgacctcaccttcagcactgaggtccaagaagtttggagtttgtgaagttcgtgacctccaaacccaatggggggcaacatcttggtaacagaggaggaataagaaggagtatgtacacctggtatgccagatgagaatgacaggagccatccgcaagcagtttgggnggcttccttaaaaaggttcctaatgngatca

SEQ ID NO: 151771 - DNA, 530 bp, Homo sapiens; identical to SEQ ID NO: 135422
  misc_feature (1)...(530): n = a,t,c or g

SEQ ID NO: 151772 - DNA, 587 bp, Homo sapiens
acacacacacacacaacagaagaagacttgaagtctatacacaggaggctagttctgactggtcacaggtctggattgtagactgtaggaaatgtaagcatccaaggagctgttgggaaaagcttacaaaacacagtggagaaaagcagaagagttgggaaaggcatccttttgtcctggatagctacagttttccccacccaaatatgggaagcttctttgcaagctcaatgtatgagaagtggaagggccaacctctagcctgtctctaaggaaagcagagttgcacccttatgtgatttttgtctcccttttatccagtcggagtctagccagtcagaggcgtctgtccggagggaggaatcacccatggatgtggaccagccatctcccagtgctcaagatactcaatccattgcctccgacggaaccccacagggggagaaggaaaaggaagaaagaccacctgagttaccccgctcagcgagcagctgagtttggacgagctgtgggacatgcttggggagtgtctaaaggaactagaggaatcccatgaccagcatgcggtgctagtgctacagcctgct

SEQ ID NO: 151773 - DNA, 2597 bp, Homo sapiens
atgacccccccccacctccctcccagacgggcttcagatgatgaatttgagaatcttagaattaaaggccctaatgctgtacagctggtgaagaccacccctttgaagccctcacctctgcctgtcatccctgatactatcaaggaagtgatctatgatatgctgaatgctctggctgcataccatgctccagaggaagttggtttcacatccccaatgctgtttgatgagaggaagtatccctaccacctcatgctgcaaaaatttctctgctccggaggccacaatgctctttttgaaactttcaactgggctctgtccatgggaggtaaagttcctgtttctgagggattggaacactcagacttgcctgatggcacaggagaattcctagatgcctggcttatgctggtggagaagatggtgaatcccaccacggtgcttgaatctccacattcgctgcctgccaaattgcctggaggtgtccagaactttccccagttcagtgcactgcgcttccttgtggtaactcagaaagcagcctttacttgcatcaaaaacttatggaaccggaaacccctgaaggtatatggtggacgaatggctgaatcgatgctggccattctatgccacatcctccgaggagaacctgtgattcgagagagactaagcaaggagaaggaggggtctcgaggagaagaggatacagggcaagaggaaggtggctcccgccgggaacctcaagtcaaccagcaacaactgcaacagctcatggacatgggcttcacaagggaacatgcaatggaggcactgttgaacaccagcaccatggagcaggccacagagtaccttttaacccaccctcctccaatcatgggaggagttgttcgggatctcagcatgtctgaagaggaccagatgatgagagcaattgctatgtctctgggacaggatattccaatggatcaaagggcagagtcacctgaggaagttgcttgccggaaggaggaagaggaacggaaagctcgggaaaagcaggaggaggaagaggctaaatgtctagagaagttccaggatgctgacccgttggaacaagatgagctccacactttcacagatactatgttgccaggctgcttccaccttcttgatgagctgccagacacagtataccgtgtgtgtgacctgatcatgacagcaatcaaacgtaatggagcagattatcgtgacatgattctgaagcaagtagtcaatcaggtgtgggaagctgctgatgtattgatcaaagctgctcttcccctgacaacaagtgacacaaaaaccgtgtcagagtggataagtcagatggccacactgccccaggcctccaatttggctactagaatcttgcttttaacgctactttttgagattgaggtccgcagctggagttacccaccatttcaagataaggaccattgtaaaaaggaaaaggaaaattttgaagccattgctgcagctttggcagcagagcgggagagcaagcctcctgtccgagacacccgtgagagccagctggcacacagcaaggacgagcctcctccactctcccctgcccccttaaccccagccacgccttcctcccttgacccattcttctcccgggagccctcatctatgcacatctcctcaagcctgccccctgacacacagaagttccttcgctttgcagagactcaccgcactgtgttaaaccagatcctacggcagtccacgacccaccttgctgatgggccttttgctgtcctggtagactacattcgtgtcctcgactttgatgtcaagcgcaaatatttccaccaagagctggagcgtttagatgaggggctccggaaagaagacatggctgtgcatgtccgtcgtgaccatgtgtttgaagactcctatcacactgcttcacagtctctcactcacacaaatgactggatgtatcctgggttttctgcacagctcttttctgcttctgctttcttatgcaggtatatagtatttgaaggagaagaagggcaggatgctggcgggctcctgcgggagtggtatatgatcatctctcgagagatgtttaaccctatgtatgccttgttccgtacctcacctggtgatcgagtcacctacaccatcaatccatcttccccactgcaaccccaaccacctcagcttacttcaagtttgtcggacgctattgtggcccaaagctgtatatgacaaccgtcttctggagtgctactttactcgatccttttacaaacacatcttgggcaagtcagtcagatatacagatatggagagtgaagattaccacttctaccaaggtctggtttatctgctggaaaatgatgtctccacactaggctatgacctcaccttcagcactgaggtaggtcaggaaatcctaatcacagcacatcccagccaatctggaagatccaattcacaggttcaccttagaactagcactgcgtgaccttctcatagttctaaggaagcatcttgacttcttaaagctgtagcaggtgtttgtgagtgacatcacaaacaggaaaaaccaagaatttgca

SEQ ID NO: 151774 - DNA, 2218 bp, Homo sapiens
atgccacagcttccaggtatcagtctccctgaaggtgtggacccctcttttctggctgccctgcctgatgacatccgtcgggaagttctacagaaccagctaggcattcgtccaccaacccggactgccccctccacaaatagctcagcgcctgcagtggtggggaatcctggtgtgactgaagtgagccctgagtttctggctgccctgcctccagccattcaggaggaagtactggcacagcagacagctgagcagcagcgaccagaactagcacagaatgccagctcagacacccttatggaccctgtgaccttaatccagactctgccctcagacctgcgccgtagtgtcctagaggatatggaggacagtgtgttagctgtgatgccacctgacattgcagctgaggctcaagccctgagacgagagcaagaagcccggcagcgacagctcatgcatgagcgtctgtttgggcacagtagcacctccgcactctctgctattctccgaagcccggctttcaccagtcgcttaagtggcaaccgtggggtccagtatactcgccttgctgtgcagagaggtggcaccttccagatggggggtagcagcagccataacaggccttctggcagtaatgtagatactctcctccgcctccgaggacggctccttctggaccacgaagccctttcttgtctcttggtcctactttttgtggatgagccaaagctcaatactagccgtctacaccgagtactgagaaatctctgctaccatgcccagacccgccactgggtcatccgcagtctgctctccatcttgcagcgcagcagtgagagtgagctatgcattgaaacacccaaactcactacaagtgaggaaaagggcaaaaagtcgagcaagagctgtgggtcaagtagccatgagaaccgtcccctggacctgctacacaagatggagtcaaagagctccaaccagctttcctggctctcagtatccatggatgcagccctaggctgcaggactaatatatttcagatccagcgttcaggggggcgtaaacataccgagaagcatgcaagcggtggctccaccgtccacatccatccccaagctgctcctgttgtctgcagacacgttttggatacactcattcaattggccaaggtatttcccagccacttcacacagcagcggaccaaagaaacaaactgtgagagtgatcgggaaaggggcaataaggcctgtagcccatgctcctcacagtcctccagcagtggcatttgcacagacttctgggacttattggtaaaactggacaacatgaatgtcagccggaaaggcaagaactccgtgaagtcagtgccagtgagcgctggcgaaaacaaggtgtcagaagcacaggctaattctggcagcggtgcttcctccaccaccactgccacctcaaccacatctaccaccaccaccactgccgcctccaccacgcccacaccccctactgcacccacccctgtcacttctgctccagccctggttgctgccacggctatttccaccattgtcgtagctgcttcgaccacagtgactacccccacgactgctaccactactgtttcaatttctcccactactaagggcagcaaatctccagcgaaggtgagtgatgggggcagcagcagtacagactttaagatggtgtcctctggcctcactgaaaaccagctacagctctctgtagaggtgttgacatcccactcttgttctgaggaaggcttagaggatgcagccaacgtactactgcagctctcccggggggactctgggacccgggacactgttctcaagctgctactgaatggagcccgccatctgggttataccctttgtaaacaaataggtaccctgctggccgagctgcgggaatacaacctcgagcagcagcggcgagcccaatgtgaaaccctctctcctgatggcctgcctgaggagcagccacagaccaccaagctgaagggcaaaatgcagagcaggttcctccggtttaggctcagctagcagcatccaggcagctgttcggcagctggaggctgaggctgatgccattatacaaatgtcggagtctagccagtcagaggcgtctgtccggagggaggaatcacccatggatgtggaccagccatctcccagtgctcaagatactcaatccattgcc

SEQ ID NO: 151775 - DNA, 6896 bp, Homo sapiens
atggtgtccccagaacccaagacaggacactcaataaggaattggctggatgagttaaaagatctcccaatattacatgcatactccaatctcccctcatccccggctgttgatctcgccatccatagctccaaggaaggtagaatggactggactgaaggtcaagtcacaggaccggttgttcgctcagcagctacaagtggagctggtagcactacctctggtgttgtgtctggcagcctcggctctcgggagatcaactacatccttcgtgtccttgggccagccgcatgccgcaatccagacatattcacagaagtggccaactgctgtatccgcatcgcccttcctgccccttcgaggctcaggaactggcaacggctcttctaggattcctcgggaatctgctccagaaatggccacggcagaatctctggtggaagagctctcagaggatgcagctggtggggcatccccaggagtggagctgcctgctctgggctgctcagaactgccagctgctgaagtgtcacccacagcctcctctaagaatttggaaactatttgtgagtatgcttattgtatggcaatgttaccggaaacgggtcttgatccataccccaagagagggttcttggatctcacacaagaaagaatttggacagacatccccccatccccaggaaatatccctaccacccatccactgatggtgcgccatgcagaccacagttctctgacactgggcagtggctcttcaacaactcgtctcacccagggcatcgggcgcagtcagaggaccctaaggcagctgacggccaatactggccacaccattcatgttcactaccctgggaatcgccagcccaaccctcctcttatactgcagaggttgcttggtccctcagctgctgctgacatccttcagctgagcagcagccttcccctacaaagccggggtcgggcccgcctcctgggtaggcaacgatgacgtccacatcatcgcccgttctgatgatgagctgctggatgactttttccatgatcagaggcacagctaccagccaagcaggaaccctgtccagcatccccacagccctgacccgctggacagaagaatgcaaagttctcgatgctgagagcatgcatgactgtgtttcagtggttaaagtgtccattgtcaatcacctggaattcctgagggatgaggagctggaagaaaggcgagagaagcgcaggaaacaactggctgaggaagaaacaaagataactgataaaggcaaagaagataaggagaacagggatcagagtgcacagtgtactgcatctaagtcaaatgactccactgaacagaatctctcagatgggacgcctatgcctgacagctacccaacaaccccatcttcaactgatgcagctacatctgagtccaaggagacccttggcactctgcaatcctcacaacagcaaccaacactcccaaccccaccagctttgggagaggttcctcaggagctgcagtctccagctggagaagggggcagctctacacagctattgatgcctgtagagccagaggaattgggtcccacaaggccaagtggggaagcagaaacaactcagatggagttatccccagctcccactataacctcactttccccagagagagctgaggattctgatgcactgacggctgtcagcagtcagctagaaggctctcctatggatacaagcagcctggcttcctgtaccttagaggaggctgtgggtgacacttcagcagctggcagttctgagcagcccagagcaggcagctccactcctggggatgccccaccagctgtggcggaagtgcaaggcaggagtgatgggtcaggggaatctgcccagccacctgaggacagctccccacctgcatcctctgagagctcttccaccagagattctgccgtggccatttctggagcagattcccgaggaatcctagaagagccgttgccttcaacaagcagtgaagaagaagatccccttgcgggtatcagtctccctgaaggtgtggacccctcttttctggctgccctgcctgatgacatccgtcgggaagttctacagaaccagctaggcattcgtccaccaacccggactgccccctccacaaatagctcagcgcctgcagtggtggggaatcctggtgtgactgaagtgagccctgagtttctggctgccctgcctccagccattcaggaggaagtactggcacagcagagagctgagcagcagcgacgagaactagcacagaatgccagctcagacacccctatggaccctgtgaccttcatccagactctgccctcagacctgcgccgtagtgtcctagaggatatggaggacagtgtgttagctgtgatgccacctgacattgcagctgaggctcaagccctgagacgagagcaagaagcccggcagcgacagctcatgcatgagcgtctgtttgggcacagtagcacctccgcactctctgctattctccgaagcccggctttcaccagtcgcttaagtggcaaccgtggggtccagtatactcgccttgctgtgcagagaggtggcaccttccagatggggggtagcagcagccataacaggccttctggcagtaatgtagatactctcctccgcctccgaggacggctccttctggaccacgaagccctttcttgtctcttggtcctactttttgtggatgagccaaagctcaatactagccgtctacaccgagtactgagaaatctctgctaccatgcccagacccgccactgggtcatccgcagtctgctctccatcttgcagcgcagcagtgagagtgagctatgcattgaaacacccaaactcactacaagtgaggaaaagggcaaaaagtcgagcaagagctgtgggtcaagtagccatgagaaccgtcccctggacctgctacacaagatggagtcaaagagctccaaccagctttcctggcttcttcagtatccatggatgcagccctaggctgcaggactaatatatttcagatccagcgttcaggggggcgtaaacataccgagaagcatgcaagcggtggctccaccgtccacatccatccccaagctgctcctgttgtctgcagacacgttttggatacactcattcaattggccaaggtatttcccagccacttcacacagcagcggaccaaagaaacaaactgtgagagtgatcgggaaaggggcaataaggcctgtagcccatgctcctcacagtcctccagcagtggcatttgcacagacttctgggacttattggtaaaactggacaacatgaatgtcagccggaaaggcaagaactccgtgaagtcagtgccagtgagcgctggcggtgagggggaaacctctccatacagcctcgaggcctctccactggggcagctcatgaacatgttgtcacacccagtcatccgccggagctctctcttaactgagaaactcctcagactcctttctctcatctcaattgctctcccagaaaacaaggtgtcagaagcacaggctaattctggcagcggtgcttcctccaccaccactgccacctcaaccacatctaccaccaccaccactgccgcctccaccacgcccacacccccgtacgtgcacccaccccgtgtcacttctgctccagcccgtggttgctgccacggctatttccaccattgtcgtagctgcttcgaccacagtgactacccccacgactgctaccactactgtttcaatttctcccactactaagggcagcaaatctccagcgaaggtgagtgatgggggcagcagcagtacagactttaagatgggtgtcctctggcctcactgaaaaccagctacagctctctgtagaggtgttgacatcccactcttgttctgaggaaggcttagaggatgcagccaacgtactactgcagctctcccggggggactctgggacccgggacactgttctcaagctgctactgaatggagcccgccatctgggttataccctttgtaaacaaataggtaccctgctggccgagctgcgggaatacaacctcgagcagcagcggcgagcccaatgtgaaaccctctctcctgatggcctgcctgaggagcagccacagaccaccaagctgaagggcaaaatgcagagcaggtttgacatggctgagaatgtggcaattgtggcatctcagaagcgacctttgggtggccgggagctccagctgccttctatgtccatgttgacatccaagacatctacccagaagttcttcttgagggtactacaggtcatcatccagctccgggacgacacgcgccgggctaacaagaaagccaagcagacaggcaggctaggttcctccggtttaggctcagctagcagcatccaggcagctgttcggcagctggaggctgaggctgatgccattatacaaatggtacgtgagggtcaaagggcgcggagacagcaacaagcagcaacgtcggagtctagccagtcagaggcgtctgtccggagggaggaatcacccatggatgtggaccagccatctcccagtgctcaagatactcaatccattgcctccgatggaaccccacagggggagaaggaaaaggaagaaagaccacctgagttacccctgctcagcgagcagctgagtttggacgagctgtgggacatgcttggggagtgtctaaaggaactagaggaatcccatgaccagcatgcggtgctagtgctacagcctgctgtcgaggccttctttctggtccatgccacagagcgggagagcaagcctcctgtccgagacacccgtgagagccagctggcacacatcaaggacgagcctcctccactctcccctgcccccttaaccccagccacgcctttcttcctttgaccaattcttttccggggagccctcatctatgcacatctcctcaagcctgccccctgacacacagaagttccttcgctttgcagagactcaccgcactgtgttaaaccagatcctacggcagtccacgacccaccttgctgatgggccttttgctgtcctggtagactacattcgtgtcctcgactttgatgtcaagcgcaaatatttccgccaagagctggagcgtttagatgaggggctccggaaagaagacatggctgtgcatgtccgtcgtgaccatgtgtttgaagactcctatcgtgagctgcatcgcaaatcccccgaagaaatgaagaatcgattgtatatagtatttgaaggagaagaagggcaggatgctgagcgggctcctgcgggagtggtatatgatcatctctcgagagatgtttaaccctagtgtatgccttgttccgtacctcacctgggtgatccgagtcacctaacaccatcaatccatctttcccactggcaaccccaaccacctcagctaatttcaagtttgtcggacgcattgtgggccaaagctgtatatgacaaccgtcttctgggagtgctactttactcgatccttttacaaacaccatcttgggcaagtcagtcagatatacagatatggagagtgaagattaccacttctaccaaggtctggtttatctgctggaaaatgatgtctccacactaggctatgacctcaccttcagcacttgaggtccaagagtttgggagtttgtgaagtttcgtggacctcaaacccaatgggggccaacatcttgggtaacagaggagattaaggaaggagttttgttacacctggtattgccagatgaggattgacaggggccttcccgcaagcagttgccggcctttctaggaaggcttctatgagatcatcccaaacgcgcctaatctccatcttcaactgagcatgagttagagctgcttatatcaggactgcccaccattgacatcgatgatctgaatcccaacactgaataccacaagtaccagtccaactctatttcagatccagtggttcctggaagaaacattgccgttcctttcgaatcaaaactgacccgtgcccaaagttccctcccagtttgttcacggggtaccttccaagggtaacccctggcaagggctttgcctgcccctcgaagggcatggaatggggctttcaggaagttttcaggttcccttcggaggtggacaggtcccacagatcgccctgccttcagctcacacatgttttaatcagctggatctgcctgcctatgagagctttgagaagctccgccacatgctactgttggctatccaggagtgctctgaaggctttgggctggcctaataaggccctgcccaactcccgtggggtttttttttaccattgttggacctggggaggggggagttaaaaaaaagaaccgggaaagaaattgtcaaaaaccaataaatgaaaatccaccaactcaccgtgtgtgtcccagctgccccatcttccccagcgctatcacctgttcctcttctcattctctccccgccgcctgtttcctcaccttctctccccggttccatgccgtccatgattccccaccccatgtgttttaaaaagggcagttaggctttggcaggggacctgtctgttcccaattgttttgaacagtgtgctcctcagattctgtgttcagaaggatttgctgcattgagacttgaaacctttggataggggaaaaaattatatatatatatatttttttgttctgtttgcatttcttaattttgtgcttggaatgtgttgatgtgcacaaccaaatattccaatccggaacaagattggcgtctgtgttgtggaggtttcaaataaagagccctcttcataaaaaaaaaaaaaaaa

SEQ ID NO: 151776 - DNA, 1151 bp, Homo sapiens; identical to SEQ ID NO: 145948
  misc_feature (1)...(1151): n = a,t,c or g

SEQ ID NO: 151777 - DNA, 1184 bp, Homo sapiens; identical to SEQ ID NO: 113231

SEQ ID NO: 151778 - DNA, 577 bp, Homo sapiens; identical to SEQ ID NO: 145990
  misc_feature (1)...(577): n = a,t,c or g

SEQ ID NO: 151779 - DNA, 558 bp, Homo sapiens; identical to SEQ ID NO: 145991

SEQ ID NO: 151780 - DNA, 404 bp, Homo sapiens; identical to SEQ ID NO: 145992
  misc_feature (1)...(404): n = a,t,c or g

SEQ ID NO: 151781 - DNA, 471 bp, Homo sapiens; identical to SEQ ID NO: 145993

SEQ ID NO: 151782 - DNA, 1170 bp, Homo sapiens; identical to SEQ ID NO: 145994

SEQ ID NO: 151783 - DNA, 529 bp, Homo sapiens; identical to SEQ ID NO: 146009

SEQ ID NO: 151784 - DNA, 2934 bp, Homo sapiens; identical to SEQ ID NO: 146010
  misc_feature (1)...(2934): n = a,t,c or g

SEQ ID NO: 151785 - DNA, 2394 bp, Homo sapiens
  misc_feature (1)...(2394): n = a,t,c or g
agcacaggaagtgacaacttagggagccccgtagggcgctgcaggccccggggaccccagcacgtgggtctaaagagagacggagtctagctctcctgccacccagagtggcttccatctcagcactctgtgggtctggtgatggaagatgcagtctctgctgatcacatgtgccctctgccagggcacctactgagaggtgcggtcctgggggtggaggcctgcctggcaggtgtgcgtgcctcgtacgtgtgttatgggcactggtctaggccaggtatgacacccactctcctgtgagatttcactttagtttttaaaaggtccagttctacagagtgagacctatctatctgagtactacatatgttttaagacttggttctttttttgagggatccttgaccctgggaagtctggagcaccctgagaagggggcaccatgtgtgcctttgcccacgtgtcctgaggggctgcttgtctgggagggagggagagaacattcagcagcaggtgcttttttatggccttttcttaaaataacctaagggggacacatccatcttgcagagaagtttacagaactccccttgaaaactgctgctgaggctcctgttaaattttctgtggcatcttttatgcgttggtaaaaactgcagtgtctttggacctgagagtggctactccgtggttttgtgacctgtaagcgtggggttcaggggtgtgtggccctgcagggtcccacgcctccctgagcactgactggaagtttcactggctggtggctgtcccttctcccatcagggtccccagcaaagttaactacacagaggacccaggggaaacgagctgtgtagccactgacttgctcgcgcggccgtggcctctgaggggcactcgccggttaagacagggtgggagtagtgctttccagttcagactctaacttctcccaaagtgtcctaagaaaatactggatcggctcatagatttatgctccttatgatgccctaacttgggaaggttgttctaggggacaggccgggcagtgttcccacaaacaactttagagttcgaaggccccagggccccgctgtctcttggccattagatacctttcggcaggtaagggactaccaatgcttacgtcaaaacagcagaatcggctttgcagagcactttggggagcagatattaacttatttttgtgttggacagaaatgaaatcttgcgatttttaatcgctatgataatacttccaaattttatgatttttctgaaggaaataatgcaaacattttaaatatgtttctccccctttccaaaaactgttaaactaatgagcaagtaacactaactttgaatgtctctacaatacccgttgataactcagtggagccaggctttggggtagcggccctggagcttgcagggtttctcgccactgggggctggaccacgcccccagctgtgaccgtgggtgtggctggctctcggccctgcccagctttttttctgaggacgtggtgacttcctgaacatcagcttcaatcctccatcattaatgtgaagcaaaacacaaaaaccgccccaattanaaaaggattccttgggcatccgaaaccagcatcttgcaccttaaacccataccccacccgtgttgcgcccacagggggggatggtcccaatgggccagcttaaaaatgtggtcacctgttgggggaaactctttcaggcaccttgaagtgagaacccaagctgtccgtcctcaggccggcctttcttccggcgacaccccgtccatggctggctgggtcccccttcgcagtgttggtctgtcttgacatctaaaccccccggcgtgtgcaagtgccccatcttccagggacttaccttattttcccagaatttaaaccctgttttttataattcaagttaaatgcaaatgactgtccagttgcccaaatatccttgatcctatgagtgtaagttgatgactgtttgtttagtccagtaggagtaaaaatgcctgtgtcccccacggggtgtccacagcccctcaccccatacccctgttgaggtgtgaaatgccccccgtcagaaattaaatacaaaccttaaatgtgccctattgggtgtcctaaaccttccatacaatgttaaggtcagattcccttttaggaatacctgggtgctgtcccccaggtttgatagttagacttaaaaacttgaaattcactttttggggggagggattttcctgaaatagagagttgagacttgccagttgggggaaaatagcatttaaaatggaaagctgtgtttggaaaattgtgtatgagtatttttgtattaaaaacattttaaaggcttttttcttaacttaaaaaaaaa

SEQ ID NO: 151786 - DNA, 16177 bp, Homo sapiens; identical to SEQ ID NO: 146024
  misc_feature (1)...(16177): n = a,t,c or g

SEQ ID NO: 151787 - DNA, 1251 bp, Homo sapiens; identical to SEQ ID NO: 146025

SEQ ID NO: 151788 - DNA, 401 bp, Homo sapiens; identical to SEQ ID NO: 146044

SEQ ID NO: 151789 - DNA, 420 bp, Homo sapiens; identical to SEQ ID NO: 146045

SEQ ID NO: 151790 - DNA, 2817 bp, Homo sapiens; identical to SEQ ID NO: 146046

SEQ ID NO: 151791 - DNA, 494 bp, Homo sapiens; identical to SEQ ID NO: 146047

SEQ ID NO: 151792 - DNA, 639 bp, Homo sapiens; identical to SEQ ID NO: 119936

SEQ ID NO: 151793 - DNA, 729 bp, Homo sapiens; identical to SEQ ID NO: 141063

SEQ ID NO: 151794 - DNA, 712 bp, Homo sapiens; identical to SEQ ID NO: 146050

SEQ ID NO: 151795 - DNA, 2873 bp, Homo sapiens; identical to SEQ ID NO: 146051

SEQ ID NO: 151796 - DNA, 3114 bp, Homo sapiens; identical to SEQ ID NO: 146052
  misc_feature (1)...(3114): n = a,t,c or g

SEQ ID NO: 151797 - DNA, 1873 bp, Homo sapiens
  misc_feature (1)...(1873): n = a,t,c or g
gctcgccccctccgccgccgccgcccgcccctgcgactacgctgcggcctcccgcccgctcccgctcgctcccgcggccctcgctcgcctcgcgccggcagttttgggcctacacctcccctccccccgccagccgccaaagacttgaccacgtaacgagcccaactcccccgaacgccgcccgccgctcgccatggatgccggtgtgactgaaagtggactaaatgtgactctcaccattcggcttcttatgcacggaaaggaagtaggaagcatcattgggaagaaaggggagtcggttaagaggatccgcgaggagacgtggcgcgcggatcaacatctcggaggggaattgtccggagagaatcatcactctgaccggccccaccaatgccatctttaaggctttcgctatgatcatcgacaagctggaggaaagaatatcaacagctccatgaccaacagtaccgcggccagcaggcccccggtcaccctgaggctggtggtgccggccacccagtgcggctccctgattgggaaaggcgggtgtaagatcaaagagatccgcgagagtacgggggcgcaggttcaaggttggcgggggatatgcctgcccaactccaccgagccgggccatcaccatcgcttggcgtgccgaagtcttgtcaccgagtgtgttcaagcagattttgcctgggtcatgctggagacgctcttcccagttttccgcaagggaggagttcatggaccatttccgttaccagcccatgccggccagcttccccagttcatcttgcgcgggcggccaagattcggtgcagcgacgtggggggcttacccccatggccacccttgacctgggaagggaccacttttagatggcttattcgatttcaagggacaacacaccatttctccgctcgatctgggccaagcttgaaccagggtnggcaagccaacaagtctcaatgttcacatgatgcacggcggcacccggatttcgcgggaattgactcagcttctccagagggtgaaaggctattgggcaaagtttgaatgcatctactcnaaaacaccccatgaactcaccatttccaaataacttaatttggctgcataatcgggcgccaagcagacagcgatttaatgagatccgcccagatgtcgggggcccaggatcaaaaattggcccaacccagtggaaaggctcctctggtagggcaggttactattcactgggctctgctgcccagtaattagtctggcccagtatctaatcaatgcccaggctttcctctgagaagggcatggggtgcagctaggaacagtgtaggttccctcaataacccctttctgctgttctcccatgatccaactgtgtaggttcccctccaataaccccctttctgctgttcttccccccccatgatcccaactgtgtaaatttctgggtcagtgattcccaggttttaaataatttgtaagtgttccagtttctacacaactttatccatccgctaagaatttaaaaatcacattctctgttccagctgttaatgcctgggatccatatttagttttataagcctttccccggtttttagttttggtttggggtttttgggccccatgaattttatttctggtttgtcgataagaaatgtaagagtggaatgttaataaatttccagtttagttctgtaatgtcaagaatttaagaattaaaaaacgggattggttnnnnnnnnnnnnnnggggcggccgttttagaggatccttgggggggccttttaaaagatcccttggggggcccaattttaccgggggtggggaagaaaatattttctcctttttggggggggtttttaaaagt

SEQ ID NO: 151798 - DNA, 457 bp, Homo sapiens; identical to SEQ ID NO: 146058

SEQ ID NO: 151799 - DNA, 2703 bp, Homo sapiens; identical to SEQ ID NO: 146059
  misc_feature (1)...(2703): n = a,t,c or g

SEQ ID NO: 151800 - DNA, 611 bp, Homo sapiens
  misc_feature (1)...(611): n = a,t,c or g
caccttctacaacgagcttcgcgtcggctcccgagganaccccaccctgctcaccgaggcccccctcaatcccaaggccaaccgcgagaagatgacccagatcatgtttgagaccttcaacgtgcccgccatgtacgtggccatccaggcgtgcgtgtccctctacgcctccggaggaccaccggcatcgtgctggactccggcgacgcgtcacccacaacgtgcccatttatgagggctacgcgctgccgcacgccatcatgcgcctggacctggcgggccgcgatctcaccgactacctgatgaagatcctcactgagcgtggctactccttcgtgaccacagctgagcgcgagatcgtgcgcgacatcaaggagaagctgtgctacgtggccctggacttcgagaacgagatggcgacggcgcctcctcctcctccctggaaaagagctacgagctgccagacgggaggtcatcaccatcggcaacgagcgcttccgctgcccggagacgctcttccatcctggcctcgctgtccacctttcagcagatgtggataccaagcaggagtacgaagaagccggnccttcatcgtcaangcaaattgtttt

SEQ ID NO: 151801 - DNA, 403 bp, Homo sapiens
cggacgcgtgggcggacgcgtgggctcgcttcccttccgcggcgaccagggcccgagccgagagtagcagttgtagctacccgcccaaaaactagacacaatgtgcgacgaagacgagaccaccgccctcgtgtgcgacaatggctccggcctggtgaaagccggcttcgccggggatgacgcccctagggccgtggtcccgtccatcgtgggccgcccccgacaccagggcgtcatggtcgggatgggtcaaaaagattcctacgtgggcgacgaggctcagagcaagagagggatcctgaccctgaagtaccttatcgagcacgggatcatcaccaactgggatgacatggagaagaatgggccacaccttctacacgagcttcgcgtggtcccgaggagg

SEQ ID NO: 151802 - DNA, 1605 bp, Homo sapiens
cccacgcgttcgcccacgcgttcggcgccaagtgaagcctcgcttccctcccgcggcgaccagggcccgagccgacgagtagcagttgtagctacccgcccagaaactagacacaatgtgcgacgaagacgagaccaccgccctcgtgtgcgacaatggctccggcctggtgaaagccggcttcgccggggatgacgcccctagggccgtgttcccgtccatcgtgggccgcccccgacaccagggcgtcatggtcggtatgggtcagaaagattcctacgtgggcgacgaggctcagagcaagagaggtatcctgacccctgaagtacccctatcgagcacgggatcatcaccaacctgggatgacatggagaagatcttggcaccacaccttcttacaaacgagcttcgcgtgggcttcccgaaggaggacccccaacccttgcttaaccgaaggccccccttaaattccccaaggccaaccgcgaagaaagaatgaaccccagattatgtttgagaccttcaacgtgcccgccaatgtacgtggccatccaggccgtgcctgctccctctacgcctccggcaggacccaccggcatcgtgctggactccggcgacggcgtcacccacaacgtgcccatttatgagggctacgcgcctgccgcacgccattcatgcgccatggaccatggcgggccgcgactctcaccgactaccctgatgaagatcctcacgtgagcgtggctactccttcgtgaccacagctgagcgccgagatcgtgcgcgaccatcaaggagaagctgtgctaccgtggccctggacttcgagaacgagatggcgacggccgccatccatccatcctcccatggaaaagagctacgagctgccagacggggcaggtcatcaccatcggcaacgagccgcttccgctgcccggagacgcctcttccagccctcctttcatcgggtatggaagtcggcggggcatttcacgagaccaccttacaacagcatcatgaagtgttacattcgacatccaggaaggaccttttatgccaacaacgttcatgtcggggggcacccacgattgtacccctgggattcgctgacccgcatgcaagaaagagattcaccggcgctggcaccccagcacccatgaggatcaaggattcattcgcccccgccggagcgcaaaatactcggtgtggaatcggcggcttccatccttggcctcggttgtccacttcccagcagaagtgggatcaccaaagcaggagtacgaacgaggccggccctttccatcgtccaccggcaaatgcttctagacacactccacctccaagcacgcgacttctcaaggacgacgaatcttctcaattgggggggcggctgagctccagccaccccgcagtcactttctttgttaacaacttcccgttgctgccatccgtaaacttgacacagtgtttataacgtgtacatacattaactttattacctccattttgttatttttcgaaacaaagccctgtggaagaaaatggaaaacttgaagaagcattaaagtcattctggttaagctgcgaaaaaaaaaaaaaaaaaaa

SEQ ID NO: 151803 - DNA, 406 bp, Homo sapiens; identical to SEQ ID NO: 145599

SEQ ID NO: 151804 - DNA, 583 bp, Homo sapiens; identical to SEQ ID NO: 145600

SEQ ID NO: 151805 - DNA, 533 bp, Homo sapiens
gtgggtgcacaagactccatgggcggggccacacgcacattggctgggatcaaagccaaagaagttctatagttccaggctcagagatttgaagatgagtggcctctgctagatctcctttctcttgccttctcattcacaaatttctgatacaagggagtcccaaagggaggaaagtggccagaccagagaccccaggagatggtaggaggctggaagaagagaagccgagaagccccttggaagtagccccccgctcccagtaccaccaccaagggcaggggcaggggctcaccagacaggcgcttgaagggcacattcaatgccgcggtgcagccggaaaccgcaggctgtgctgaccagctcagagatggcactggctgcctgctcatcattctccaggtccccagatgacgccagcactgcaccttcactcagtaccaggtagccgagctggtctgggattcgctccagcccctgggtcagtgcagaagtcatcgcagtcttcggtgctgggggagctccctaccaga

SEQ ID NO: 151806 - DNA, 1446 bp, Homo sapiens
  misc_feature (1)...(1446): n = a,t,c or g
gtttttttttttttttttttggagaacaattaaactcatgtttattagggagtgagggagcacaaagggaggtctccttgcccttgttctccttaacaaagcttaaaagtcccnaaaccctgggcccgtccaggtaggggtggaaggtgggcaagaagaaggccctagttctaagaagcaagccaagacccgacagtggtcgcctgcctcaatcacagaggccccaggacccaaaatccgcttctccgaaccccttcgccctccggcaggctgcagacatcaattggcttcccgacctcgggttctgcctcttcaccacaaacacccttttgtcctggacaccgtcaccaagcagtgtgtgttctcccaaagaccactggaggagagacacaccagacaggcgcttgaagggcacattcatgccgcggtgcagccggaaaaccgcaggctgtgctgaacagctacagagatggcactggctgcctgctcatcattctccaggtccccagatgacgccagcactgcaccttcactcagtaccaggtagccgagctggtctgggattcgctccagcccctgggtcagcgcagaagtctagtgggtaaagatgcaagtcgtgagaagcatgctagagggatggacggcccgatacccttcacctgcaaacccaagtctctgggttgacgatggccccaggttttctcattccccagccaggtcccttcccggccccctcccccctacatggtcctcaatactgatcttcccgagcctccttctgcccccactctggccccgaggctcccctggccttccacatcccacctttgctaccccaaggggcctgtgctgcccctctggcccctgccctcagaccctctcttcacctcccttcgtctccgcccgacctgcagactacccgcagccccagaacaccctcccacagacccctccccagcattctcgtcgccatccctcccatttccatcccctcttcctccccgagcggataggaggtgagggtggagcgcaggcccaccagggggaaaccacacagactggggagcagagacgctgaacccccggcgggtcctctcgcgcatgcgtcctcactcaccatcgcagtcttcggtgctgggggagctccctaccagataggtagcttccggcttcaggccccggtcacgtgcttgcagccgctgcgctcctccttctgcttgcgccactggcctttagccccgcctctagcatgaggattggacagtggccacgtcgtcagacccaaccagccagtgcgaagcgctgtttcccggaggcgcacgttgattggtgatatcccctctttaacacccatctccccgcccctcagtgcctgagcgagaggaagacgcgggagcgtccgaggagggaaggatctgggaggggcgggagtaggccggggttgac

SEQ ID NO: 151807 - DNA, 443 bp, Homo sapiens; identical to SEQ ID NO: 146042

SEQ ID NO: 151808 - DNA, 5840 bp, Homo sapiens; identical to SEQ ID NO: 146043

SEQ ID NO: 151809 - DNA, 509 bp, Homo sapiens; identical to SEQ ID NO: 146069
  misc_feature (1)...(509): n = a,t,c or g

SEQ ID NO: 151810 - DNA, 490 bp, Homo sapiens; identical to SEQ ID NO: 133265
  misc_feature (1)...(490): n = a,t,c or g

SEQ ID NO: 151811 - DNA, 403 bp, Homo sapiens; identical to SEQ ID NO: 146071
  misc_feature (1)...(403): n = a,t,c or g

SEQ ID NO: 151812 - DNA, 447 bp, Homo sapiens; identical to SEQ ID NO: 146072
  misc_feature (1)...(447): n = a,t,c or g

SEQ ID NO: 151813 - DNA, 612 bp, Homo sapiens; identical to SEQ ID NO: 146073

SEQ ID NO: 151814 - DNA, 690 bp, Homo sapiens; identical to SEQ ID NO: 145835

SEQ ID NO: 151815 - DNA, 975 bp, Homo sapiens; identical to SEQ ID NO: 135593

SEQ ID NO: 151816 - DNA, 1926 bp, Homo sapiens; identical to SEQ ID NO: 146076

SEQ ID NO: 151817 - DNA, 678 bp, Homo sapiens; identical to SEQ ID NO: 146077

SEQ ID NO: 151818 - DNA, 611 bp, Homo sapiens; identical to SEQ ID NO: 146078
  misc_feature (1)...(611): n = a,t,c or g

SEQ ID NO: 151819 - DNA, 1752 bp, Homo sapiens; identical to SEQ ID NO: 146079

SEQ ID NO: 151820 - DNA, 1078 bp, Homo sapiens; identical to SEQ ID NO: 146090
  misc_feature (1)...(1078): n = a,t,c or g

SEQ ID NO: 151821 - DNA, 654 bp, Homo sapiens; identical to SEQ ID NO: 144884
  misc_feature (1)...(654): n = a,t,c or g

SEQ ID NO: 151822 - DNA, 666 bp, Homo sapiens; identical to SEQ ID NO: 146092
  misc_feature (1)...(666): n = a,t,c or g

SEQ ID NO: 151823 - DNA, 574 bp, Homo sapiens
cctgggaatccagtatacctcaagaccttgcatcttcctcaggctccaccctataccgatgctccacctgcctactcagagctctatcgtccgagctttgtgcacccaggggctgccacagtccccaccatgtcagccgcatttcctggagcctctctgtatcttcccatggcccagtctgtggctgttgggcctttaggttccacaatccccatggcttattatccagtcggtcccatctatccacctggctccacagtgctggtggaaggagggtatgatgcaggtgccagatttggagctggggctactgctggcaacattcctgtaaaagaagatcaagatcacgaccgagagcagggtgaggaagacaacggtgataacaacttggaaaggagagggaaaatgtagagatgtttcaggattgaggatgtctcagtagttcctggagtcatctgatttagtcactgttttcgtaaagatcctcttgttttcattaactagtgtccacttccatccaaacccatgttcccccaccaaccccaatttccatggcacataataaaaaaaaaaa

SEQ ID NO: 151824 - DNA, 2163 bp, Homo sapiens
gggggtgacacggaagtagctccgaacaggaagaggacgaaaaaaataaccagtccgcgacgccgatacattccggacccgcaaccaccatgaacagcataggttaatatccaacacagcctgacctaccctgtgcagtctcctgggaatccagtataccctcagacctttgaatctttcctcaggctccaccctatacccgatgctccacctgcctactcagagctctatcgtccgagctttgtgcacccaggggctgccacagtccccaccatgtcagccgcatttcctggaagcctctctgtatcttcccatggcccaagtctgtggctgttgggcctttaaggttccacaatccccaatggcttattatccagtcggtcccatctaatccaaccttggctccacaagtgcttggtgggaaaggagggtatgatgcaggtggcaagattttggagctggtgctatatggtggcaacatatccttctccaccttcctgggatgccctccccaatgctgctcagcttgcagtcatgcagggagccaacgtcctcgtaactcagcaggaaggggaacttcttcatgggtggttcagatggtggctacacccatctggtgaggaaccaaggccacctttgtgcccgggaaaagacatcacatacccttcagcacttctcacaatgtaactgctttagtcatattaacctgaagttgcagtttagacacatgttgttggggtgtctttctggtgcccaaactttcaggcacttttcaaatttaataaggaaccatgtaatggtagcagtacctccctaaagcattttgaggtaggggaggtatccattcataaaatgaatgtgggtgaagccgccctaaggattttcctttaatttctctggagtaatactgtaccatactggtctttgcttttagtaataaaacatcaaattaggtttggagggaactttgatcttcctaagaattaaagttgccaaattattctgattggtctttaatctcctttaaagtctttgatatatattacttgttataaatgggaacgcattagttgtctgcccttttcctttccatcccttgccccacccatcccatctccaaccctagtcttccatttcctcccgccagtctccaattgaaatcaatgggtgcaggacagaaagccagtcaggactaatttccttcctttcctcgcacttctccccactcggtcatcttttaactagtgttttcacaaggatcctctgaaaccctctctgtgccccaagtcacagatgcccattaacttctgctttcgtatctcctcagggcaaaagtgggaggggtgccttatggggccctcctcataggttggtctctggcatacacgaacctaacccaaatttgctttgggtgccagaaaaactgggcctatgtttggaaccaaggatgtcgtccaacctgtactgtgaaccaaccagtggggtttaaaaatatgaggggccaaggaggaggatgccattccaaaaagcttggattgatgtgttcaagagctaaattaagggggagttttcagatccaaaaaactgggttacccatttttttgcccagagtgtctggatgccggcccactcattcgggctccccccagaattcccttagactggggttaaatggggtccatattggtgaatgtctcacctacaaaaatgacttgagtcccagtgaaatctccattaggggtttaagaatatttccagggatccctaatggtttttgatttttgttttctgaaattgggattttattttattttaatcttataatttcagttcatcctaaattgtgtgttctgtacgatgtgatgtttgactgtaccatttgactgttatgggaagttcagcgttggtatgtctcttctctacactgtgggtgcaccttaacttggtggaatttttatactaaaaaatgtagggattaaagactattttgaagatttgaataaagtgatgaagttgcattacacctcactgcaaggattctttacttagcttgtttttagatttcttctatatatattttatttatatcccatctagaattcagctaggtgctgctgctgctctgtttcctttgatgacgctttgaaataaaggcaggagtac

SEQ ID NO: 151825 - DNA, 367 bp, Homo sapiens; identical to SEQ ID NO: 126354

SEQ ID NO: 151826 - DNA, 2922 bp, Homo sapiens; identical to SEQ ID NO: 146113
  misc_feature (1)...(2922): n = a,t,c or g

SEQ ID NO: 151827 - DNA, 1885 bp, Homo sapiens
acatcattacgccaagcttggcacgagggcagtgcgaagggctcgaagatgtgccggttggcagagctacgtggataacctgatgtgcgatggctgctgccaggaggccgccattgccggctactgcgacgccaaatacgtctgggcagccacggccgggggcgtcgtttcagagcattacgccaatagaaatagatatgattgtaggaaaagacccggaaaggtttcttttaccagcggtttgactcttggcgcagaagaaatgctcagtgatcagagatagtctatacgtccgatggtgactgcacaatggacatccgggacaaacagtcaaaggtggggagccaacaatacaatgtggcttgtcggcagatctgggtagagcattggttattagttatggggaaaggaaaggtgttccaccggaggcacactttaacaaggaaagcatatgaaactccgctttatacctgaagggaggtctgatgtgttaagcagcctctccccatctacctaggcaactgtctttcatcaacaaccctaattatgggtcacaatgctacccaaactgtaggatggtagctaatttttctttacctattttctaaatgtcatggattcctgtttgcccaatgggatcatttgtatgtttaaccactgtatggtaaaccaacccttatctgggcaacataattgcagcacaataatgatttgcatgataccttgaaatctcgggggagggggcatgccaagttggggcatcactttgtcttaggcaattaatggggatattgattacttaaaattaagtttaatatttaagcaaggtgccggttgtacaatctctgatccagtgtcttttcagcactttgagcatttacttggctcatttagtcttccttttgtagcgcatggttgggaggaaaaagtgcatgcatcattccttcactcttctctttttcccgccccccccttcccttcgcacataggcatttgggttgcttccatctttttttatggcagtgcctgtttttttttttaaccaatttaaaattccctttttgtttgatgaggctattgaggagctggcagtagttttgcttttaggactgggcgttgcacttgagcagagacaaacctttattcatagtgtctccaggacatatgaagaggtgcaatggcaaaacaagagcaaaaagcacttctccccattgaccttacagtaaccatactgattgaatccccaggggacattccatcattgcaatagctcagatttttcttccttttttctttgcacaccagcctctacctccttaggtaaaaatggtaaaaaggctgcccattatgggacattagggtatccccaaccataacccatctgggagtgtgtcccagtttgtttctttcatagggaccaaatttttatttgccagcttgagttttttataggaagttgcatttatgggggaccgggctgtcttgtgagaaattttttctcatatgtattctgtgccatactattcgttaaaatgaactgttgctattgtgagatggattttaaactgaccctattaagggtttcctttccgaaatggcacctactttagggtattcctagtatttgccttctattgtttgggccttgtggataatgtacgagatttaaaaacaaatcttgttgctgatttgtccatttctttccctgcactttgttacatctgggatacagttctaactccatctgatttaataatggcatttaaaaaaatgccaataactattaaacaccttgtttacagacagatgaaataaatttattccaaccaaaaaaaaacggacgcgtgagtcgacccaggaatccagacgtactgcaggcgtcgat

SEQ ID NO: 151828 - DNA, 486 bp, Homo sapiens; identical to SEQ ID NO: 146132

SEQ ID NO: 151829 - DNA, 1110 bp, Homo sapiens; identical to SEQ ID NO: 146133

SEQ ID NO: 151830 - DNA, 1651 bp, Homo sapiens; identical to SEQ ID NO: 146134
  misc_feature (1)...(1651): n = a,t,c or g

SEQ ID NO: 151831 - DNA, 444 bp, Homo sapiens
  misc_feature (1)...(444): n = a,t,c or g
ccgtccccatagagccngccttcgtgaanttttgacccgcgctgcaggaattcggcacgagcaggaatgagccagatgtttatgaaactagcgacctacctgaggatgatcaagcggagttcgatgcggaggagctgacaagcacaagtgtggaacacatcattgtcaatcctaatgctgcctatgacaagttcaaggacaagagagtggggacaaagggacttgatttctcagatcgtattggaaaaaccaagaggacaggatatgaatctggagaatatgagatgcttggagagggtctgggagtgaaggagacaccccagcaaaagtaccagcgcctactgcatgaggtccaagagctgactgtaatactgtacaactgtttctgaccattaaatgctgttgtactctgnnnnnnnnnnnnnnnnnnnnnnnctcccggca

SEQ ID NO: 151832 - DNA, 485 bp, Homo sapiens
gcccgggacccgaacccagcctctcccctacccgaacaccggccccggctccaccgaggcccgggtcccccagcccgtctcgccgccgccatgcgaccgctaaatacgccgaccttcccggcattgcaggaatgagccagatgtttatgaaactagcgacctacctgaggatgatcaagcggagttcgatgcggaggagctgacaacacaagtgtggaaccatcattgtcaccatcaagcagctgcacgagcaagccatgcagtttggtcagctcctgacacacttggataccacccagcagatgattgctaattccttgaaggacaataccaccctcttgacccaggtgcagacaaccatgcgtgaaaacctggccacagttgaggggaactttgccagcattgatgaacggatgaagaagctgggaaagtgagcacatttgggagctggagaacaggggttatcctacccctgtgaactctgt

SEQ ID NO: 151833 - DNA, 447 bp, Homo sapiens
aggggaactttgccaggaatgagccagatgtttatgaaactagcgacctacctgaggatgatcaagcggagttcgatgcggaggagctgacaagcacaagtgtggaacacatcattgtcaatcctaatgctgcctatgacaagttcaaggacaagagagtggggacaaagggacttgatttctcagatcgtattggaaaaaccaagaggacaggatatgaatctggagaatatgagatgcttggagagggtctgggagtgaaggagacaccccagcaaaagtaccagcgcctactgcatgaggtccaagagctgacaactcatgtccaatactgctttgcctggtgtggggaaggattgggtcttgtcccccaacacagcttctgtggctgactgtaatactgtacaactgtttctgaccattaaatgctgttgtactctgaaaaaa

SEQ ID NO: 151834 - DNA, 1317 bp, Homo sapiens
atggcggaccctaaatacgccgaccttcccggcattcccatcctccgcccaagggctcccgccgctcgttctccgatcggcctcagcaccccccgaactcttctgacccgactgggccgggccgccggacggcaccaggccccctttccggcagtcgcggtagctcggcccagaaatcgactccgggccaggaatgagccagatgtttatgaaactagcgacctacctgaggatgatcaagcggagttcgatgcggaggagctgacaagcacaagtgtggaacacatcattgtcaatcctaatgctgcctatgacaagttcaaggacaagagagtggggacaaagggacttgatttctcagatcgtattggaaaaaccaagaggacaggatatgaatctggagaatatgagatgcttggagagggtctgggagtgaaggagacaccccagcaaaagtaccagcgcctactgcatgaggtccaagagctgacaactgaagttgaaaaaatcaagacgacagtgaaggagtcagccacagaggagaagctgacccctgtgttgctggctaaacagctggcagccctgaagcagcagctggttgcttcccacctggagaagctgctgggaccagatgctgcaatcaaccttaccgaccccgatggcgccctggctaagcgcctactactgcagctggaagcaacaaagaacagcaaagggggatcagggggaaaaaccactgggacccccccagatagcagccttgtcacttatgaactacattctcggcctgagcaggacaagttctctcaagctgccaaagtcgcagaacttgaaaagcgcctgacagagctggagacagctgtacgttgtgatcaggatgctcaggagactgtagagctgttgcaagcaaaggtgagcgccctagaccttgcagttttggatcaagtggaggctcggctacagagtgtcctgggaaaggtgaacgagattgccaagcataaagcctctgtagaagatgcagatacacaaagcaaggtgcaccagctatatgaaactatacagcgctggagccccattgcctccaccctccctgagctggtgcagagacttgtcaccatcaagcagctgcacgagcaagccatgcagtttggtcagctcctgacacacttggataccacccagcagatgattgctaattccttgaaggacaataccaccctcttgacccaggtgcagacaaccatgcgtgaaaacctggccacagttgaggggaactttgccagcattgatgaacggatgaagaagctgggaaagtga

SEQ ID NO: 151835 - DNA, 410 bp, Homo sapiens
tttcgtttttcccctacccgaacaccggccccggctctttcgttgtccgggtcccccagcccgtctcgccgccgccatggcggaccctaaatacgccgaccttcccggcattgccaggaatgagccaggtgtttatgaaactagcgacctacctgaggatgatcaagcggagttcgatgcgtttgcacaagtaagaccattcaatgcttcttctctgcatgtttttttcatctgccatctcgcatgcaatgctctgccactgtgctattgttgtagctaatcgttttaaattccagtgagtccctggctgggtcactgaggggcctgctggccttatgtttaaagatcattaatcaagggttagaaacagctatgatccatgaatcattgtctcttccccttgtgaggtc

SEQ ID NO: 151836 - DNA, 2013 bp, Homo sapiens
  misc_feature (1)...(2013): n = a,t,c or g
agacttcctgctcatctgccgctccctttgccgccgccttagcccgggacccgaacccagcctctcccctacccgaacaccggccccggctccaccgaggcccgggtcccccagcccgtctcgccgccgccatggcggaccctaaatacgccgaccttaccggcattgccaggaatgatccagatgtttatgaaactagcgacctacctgaggatgatcatgcggagttcgatgcgtttgcacaagagctggaggagctgacaagcacaagtgtgggaacacattcattgtcaatcctaatgctgcctatggacaagttcaaggacaagagagtgggggacaaagggatttgattttctcagatcgtattgggaaaaaccaagaggacaggatatgaatctggagaatatgagatgctcggagagggtctgggagtgaaggagacaccccagcaaaagtaccagcgcctactgcatgaggtccaagagctgacaactgaagttgaaaaaatcaagacgacagtgaaggagtgcagccgcagaggagaagctgacccctgtgttgctggctaaacagcctggcagccctgaagcagcaggctgggttgcttcccacctgggagnaagctgctgggaccagatgctgcaatcaaccttaaccgaccccgatgggcgccctgggctaaggcgcctactactgcaggctggaagcaacaaagaacagcctagggggatcaaggggaaaaacccctgggacccccccagataggcagccttgtcacttatgaactacattctcgggcctgagcaggacaagttctcttcaagcttgccaaagtcgcagaaacttgaaaagcgccttgacagagctgggagacagctgttacgttgttgattcaggatgctcagaatcccctttctgcaggtctacagggagcctgtctcatggagactgtagagctgttgcaagcaaaggtgagcgccctagaccttgcagttttgggatcaagtgggaggctcggcttacagagtgtcctggggaaaggtgaacgagatttgccaagcattaaagcctctgttaggaaggtgcaggttacacaaaggcaaggttgcaccagcttattattgaaactattacagcgctgggagcccctttgccttccaccctccctggagctgggtgcagaagacttgtcacccatcaaagcagcttgcacgaagcaagcccatgccagtttggtcagctcctggacacactttggataccacccagccgatgaattgctaatttccttggaaggacaaataccaaccctctttgaccccaggttgcagacaaaccattgcgtgaaaacctggcccaccagttgaagggaaactttgcccaacaatgaagaaacggatgaaaaaagctggggaaaagtgaagcacatttggggaagctggaagaaccagggggttaatcccctacccccctgtgaaactctgtttaaccagcttacatatgggtttccccctttacctataactcctagcatcccccatccccatttgacacttggggggcaaaggggttccttctttgcatgtgggggtttattacccttcccctggatggaatacagagtgggtaagctaaggggttgggttatcatcagaagggtgggtttccccctcaggccctggggggataaaggacgttggggcccagccacatggccaacttcatgttccaatactgctttgccctggtgtggggaaggattgggtcttgtcccccaacacagacttctgtggctgactgtaatactgtacaactgtttctgaccgattaaatgctgttgtactctgtgtggcctctgctgtgtttcctggggaggaagcagcactaggatatagatattcattcgtcataacaggcaatctaagccactctatactacaagagatggatttaaattgtaaccaatatcttaccaaagaactaaataaaaaatgggtccagagccagaaa

SEQ ID NO: 151837 - DNA, 4632 bp, Homo sapiens; identical to SEQ ID NO: 146160

SEQ ID NO: 151838 - DNA, 1178 bp, Homo sapiens; identical to SEQ ID NO: 146161
  misc_feature (1)...(1178): n = a,t,c or g

SEQ ID NO: 151839 - DNA, 459 bp, Homo sapiens
  misc_feature (1)...(459): n = a,t,c or g
gcatcaactcttaagtttttatgagacatcagtcctgttgtaaattcagaatctgagcagtggtcattttatgaatcagtaaattactgccttacccataacaactttgactgttaaatgttttgtttttttttaaagcccatcgccgaagcaccattcaagttcgacatggaattggatgacttgcctaaggaaaaagctcaaagaactaatttttgaagagactgctagattccagccaggatacagatcttaaatttgtcaggacaagggctcagaggactggacgtgctcagacatcggtgttcttcttcccagttcttgacccctggncctgtctccagcccgtcttgggcttatccactttgactcctttgaggccgttttggaaggggccggtttctgggtagttgttggctttnatgcttttcaaaggattttctttcagtcccagagaat

SEQ ID NO: 151840 - DNA, 839 bp, Homo sapiens
gctactacctagggcaccttaaagtcaagtgacaagcccccctatttgcaacttcaccctttgaccccataactgtttccccccagagcaggagcttgtggaaatacccttggctgatgttgcagcctgcagcaagtgccttccgtctccggaatccttggggagcacttgtccacgtcttttctcatatcatggtagtcactaacatatataaggtatgtgctattggcccagcttttagaaaatgcagtcatttttctaaataaaaaggaagtactgcacccagcagtgtcactctgtagttactgtggtcacttgtaccatatagaggtgtaacacttgtcaagaagcgttatgtgcagtacttaatgtttgtaagacttacaaaaaaagatttaaggggccagctacacctcgaccatttggttaaaaaaagtacaaaggttgcagtgctgagctgtgggcggtttctggggatgtcccagggtggaactccacatgctggtgcatataacgcccttgagccacttcaaatgtgggtgtttcagtaaccacgttccatgcctgaggatttagcagagaggaacactgcgtctttaaatgagaaagtatacaattctttttccttctacagcatgtcagcatctcaagttcatttttcaacctacagtataacaatttgtaataaagcctccaggagctcatgacgtgaagcactgttctgtcctcaagtactcaaatatttctgatactgctgagtcagactgtcagaaaaagcttagcactaactcgtgtttggagctctatccatattttactgatctctttaagtatttgtg

SEQ ID NO: 151841 - DNA, 3132 bp, Homo sapiens
acataatttctggagccctgtaccaacgtgtggccacatattctgtcaggaaccctgtgtgatcatggtctggatctgcaacacgggccaggccaaagtcacagatcttgagatcacaggtggtgttgagcagcaggcaggcaggcaatcggtccgagtggctgtcggctcttcagctctcccgctcggcgtcttccttcctcctcccggtcagcgtcggcggctgcaccggcggcggcgcagtccctgcgggaggggcgacaagagctgaggcgcggccgccgagcgtcgagctcagcgcggcggtagcggcggcggcccaggcagccaacgatggcggcggcggttgtcggcgggcgcgggccggaagtatggtccgcgggcacgctgttcgacgtggggccgcgctacaccaacctctcgtacattcggcgagggcgcctcacgacatgtgtgtgctctgcttatgataatgtcaacaaagttcgagtatgctatcaagaaaatcagcccctttgagcactcagacctactgccagagaaccctgagggagataaaaaatcttactgcgcttcagacatgagaacattcattggaatcaatgacattattccgagcaccaaccaatcgagcaaatgaaaggatgtatataatagtacagggacctcatggaaacagatctttacaagctcttgaagacacaacaccttcagcaatgaccaatatctggtattttctctaccaaatcctcagagggttaaaatatatccattcagcttaacgttctgcaccgtgaacctcaagcctttccaacctgctgctcaacacccacctgtgatctcaagatctgtgactttggcctgggcccgtgttgcagatccagaccatgatcacacagggttcctgacagaatatgtggccacacgttgggtacagggctccagaaattatgttggaattccaagggctacaccaagtccattggatatttggtctgtaggctgcattctgggcagaaatgctttcttaacagggcccatctttccaggggaagcattatctttgaccagctggaaccacatttttggggtattcttgggatccccatcacaagaaggacctgaattgtataattaaattttaaaagctagggaactatttgctttcttctcacacatcaaaaataatggtgccattggaacatgcttgtccccaaaatgctgactccaaaagctctgggactttattgggccaaaattgtttgacattcaaccccacacaagaggattgaagtagaacaggctctggccccaccccatatctggagcagtattacgtacccgagtgaccgagcccatcgccgaagcaccaattcaagttcgaccatggaaattggatgacttgcctaaggaaaagctcaaaggaactaattttttgaagagacttgctagattcccagccaggggtccagattttaaattttgttcagaccaaggggtccgagggcttggacgtgctcagacatcggtgttcttcttcccagttcttgacccctggtcctgtcttccagccctgtcttggcttatccactttgactcctttgaacccgtttgggagggggcggtttctgggtagttgtgggttttatggcttttcaaagatttctttcagtccaggaggattcctcctggggcagccctgttgttgtgttcacccattggtgaccttgcgggcagtatgtacttcagtgcaccttactgcttactgttgctttagtcactaattgctttctggtttgaaagatgcagtggttcctccctctcctgaatccttttctacatgatgccctgctgaccatgcagccgcaccagagagagattcttccccaattggctctagtcactggcatctcactttatgatagggaaggctactacctagggcactttaagtcagtgacagccccttatttgcacttcaccttttgaccataactgtttccccagagcaggagcttgtgggaaataccttgggctggatgttgcagcctgcagcaagtgcttccgtctccggaatccttggggagcacttgtccacgtcttttctcatatcatggtagtcactaacatatataaggtattgtgctattggcccagcttttagaaaatgcagtcatttttctttaattaaaaaggaagtactggacccagcagtgtcactctgtagttactgtggtcacttgtaccatatagaggtgtaacacttgtcaagaagcgttatgtgcagtacttaatgtttgtaagacttacaaaaaaagatttaaagtggcagcttcactcgacatttggtgagagaagtacaaaggttgcagtgctgagctgtgggcggtttctggggatgtcccagggtggaactccacatgctggtgcatatacgcccttgagctacttcaaatgtggtttatacctcgcagatacaagaatctttatgaatatacaattctttttccttctacagcttagctccgtcttttcaaccacgaacatttaaaacccgacctactagcactgttctgtcctcaagtactcaaataatttctgatactgctggagtcagactgtcagaaaaagctagcactaactcgtgtttggagctctatccatattttactgaatctctttaagtatttgttcctgccactgtgtactgtggagttgactcggtgttctgtcccagtgcggtgcctcctcttgacttccccactgctctctgtggtgagaaatttgccttgttcaataattactgtacccctcgtcatgaactgttacagcctttcctgtgccagagatgactgtcccaagtgcccacatgccctacgattgaaatgaaaacttctattgttacctctgagttgtgttcccacggaaaatgctatccagcagatcatttaggaaaaataattctatttttagcttttcatttctcagctgtccttttttcttgtttgatttttgacagcaatggagaatgggttatataaagactgcctgctaatatgaacagaaatgcatttgtaattcatggaaaataaatgtacatcttctatcttcacattcaaaaaaaaaaaaaaa

SEQ ID NO: 151842 - DNA, 517 bp, Homo sapiens; identical to SEQ ID NO: 146173

SEQ ID NO: 151843 - DNA, 2119 bp, Homo sapiens; identical to SEQ ID NO: 146174
  misc_feature (1)...(2119): n = a,t,c or g

SEQ ID NO: 151844 - DNA, 529 bp, Homo sapiens; identical to SEQ ID NO: 146175
  misc_feature (1)...(529): n = a,t,c or g

SEQ ID NO: 151845 - DNA, 401 bp, Homo sapiens; identical to SEQ ID NO: 146176

SEQ ID NO: 151846 - DNA, 785 bp, Homo sapiens; identical to SEQ ID NO: 146177

SEQ ID NO: 151847 - DNA, 1621 bp, Homo sapiens; identical to SEQ ID NO: 146178
  misc_feature (1)...(1621): n = a,t,c or g

SEQ ID NO: 151848 - DNA, 1946 bp, Homo sapiens; identical to SEQ ID NO: 146179

SEQ ID NO: 151849 - DNA, 2009 bp, Homo sapiens; identical to SEQ ID NO: 146180
  misc_feature (1)...(2009): n = a,t,c or g

SEQ ID NO: 151850 - DNA, 1320 bp, Homo sapiens; identical to SEQ ID NO: 123183

SEQ ID NO: 151851 - DNA, 819 bp, Homo sapiens
atgacagacgaggacctggtgttcagaaagcacagggtgactgtgtggcagaaggagtgttcattccccttccagcagccacaacaccatgacctccacactgcacccagcttcaaagacaaggtaactgaggctcaaaaaggtcatagatttgccgaaggtcagccagatgggaagggtggacttgggcttaagtcaagccaaaagctgggtctattggatcgggttcgcctttctaatcctcgtggtagcaatactaaaggaaagctatttacccctctgaatgtagatgccatagaagaaagtccttctaaagaaccaaagcctgttggcttaaacaataaagagagtctccgcacggctttccgcatgaaagcctacgctttctggcagagttctgaagatgccgggacaggtgaccccatggcggaagacagggggtatgggaatgacttccccatcgaagacatgatccccaccctgaaggccgccatccgagccgtcagaattctacaattccgtctctataaaaaaaaattcaaggagactttgaggccttacgatgtgaaggatgtgattgagcagtattctgccgggcatctcgacatgctttccaggataaagtaccttcagacgagcatttgtggctggagggtgaacatctggacctctgattgcatatccccagccatgctgaccttgcggggcaagagagaaagaaagtgccgtcagtggaggagcagctgggtttccaaggaggagacggaaggagccatgactgtttcagggtgcataattttaatggtcctggacctgtga

SEQ ID NO: 151852 - DNA, 2949 bp, Homo sapiens
gacccgcgcgggatgtgaccccctgaccccctgcctggcctcccctgccccccagggggcccgcctttgcctgcttttgggggtgggtggggaggggcgcgcggatcatggcattggagttcccgggcttgcagccgccgccgccgcctcgttcacgcaccccgagcgccccttcttcccagagcagcagcggagaaggcgaagcggccggcgggggcgaggcagatggggctcaaggcgcgcagggcggcgggggcggctggcggcggcggcgacgggggcggcggaggcggcggggcggctaacccagccggaggggacgcggcggcggccggcgacgaggagcggaaagtggggctggcgcccggcgacgtggagcaagtcaccttggcgctcggggccggagccgacaaagacgggaccctgctgctggagggcggcggccgcgacgaggggcagcggaggaccccgcagggcatcgggctcctggccaagaccccgctgagccgcccagtcaagagaaacaacgccaagtaccggcgcatccaaactttgatctacgacgccctggagagaccgcggggctgggcgctgctttaccacagcgttggtgttcctgattgtcctaggggtgcttgattctggctgtcctggaccacattcaaggagtatgagactgtctcgggagactggcttctgttactggagacatttgctattttcatctttggagccgagtttgctttgaggatctgggctgctggatgttgctgccgatacaaaggctggcggggccgactgaagtttgccaggaagcccctgtgcatgttggacatctttgtgctgattgcctctgtgccagtggttgctgtgggaaaccaaggcaatgttctggccacctccctgcgaagcctgcgcttcctgcagatcctgcgcatgctgcgggatggaccgggagaaggtggcacctggaagcttctggggctcagccatctgtgcccacagcaaagaactcatcacggcctggtacatcggtttcctgacactcatcctttcttcatttcttgtctacctggttgagaaagacgtcccagaggtggatgcacaaggagaggagatgaaagaggagtttgagacctatgcagatgccctgtggtggggcctgatcacactggccaccattggctatggagacaagacacccaaaacgtgggaaggccgtctgattgccgccaccttttccttaattggcgtctccttttttgcccttccagcgggcatcctggggtccgggctggccctcaaggtgcaggagcaacaccgtcagaagcactttgagaaaaggaggaagccagctgctgagctcattcaggctgcctggaggtattatgctaccaaccccaacaggattgacctggtggcgacatggagattttatgaatcagtcgtctcttttcctttcttcaggaaagaacagctggaggcagcatccagccaaaagctgggtctcttggatcgggttcgcctttctaatcctcgtggtagcaatactaaaggaaagctatttacccctctgaatgtagatgccatagaagaaagtccttctaaagaaccaaagcctgttggcttaaacaataaagagcgtttccgcacggccttccgcatgaaagcctacgctttctggcagagttctgaagatgccgggacaggtgaccccatggcggaagacaggggctatgggaatgacttccccatcgaagacatgatccccaccctgaaggccgccatccgagccgtcagaattctacaattccgtctctataaaaaaaaattcaaggagactttgaggccttacgatgtgaaggatgtgattgagcagtattctgccgggcatctcgacatgctttccaggataaagtaccttcagacgagaatagatatgattttcacccctgggacctccctccacgccaaaacacaaggaagtcttcagaaagggtcagcatttcaccttcccatcccagcaatcttcccggggattgaaccatatgtaggccagaccatccacattcagaaattcgaagaccaaaggcattgatgggggaagtttgttaaaagtttgaaaggacaggtttcagggactggggaggaagctggacttcctcgtggatatgcacatgcaacacatggaacggttgcaggtgcaggtcacggagtattacccaaccaagggcacctcctcgccagctgaagcagagaagaaggaggacaacaggtattccgatttgaaaaccatcatctgcaactattctgagacaggccccccggaaccaccctacagcttccaccaggtgaccattgacaaagtcagcccctatgggttttttgcacatgaccctgtgaacctgccccgagggggacccagttctggaaaggttcaggcaactcctccttcctcagcaacaacgtatgtggagaggcccacggtcctgcctatcttgactcttctcgactcccgagtgagctgccactcccaggctgacctgcagggcccctactcggaccgaatctccccccggcagagacgtagcatcacgcgagacagtgacacacctctgtccctgatgtcggtcaaccacgaggagctggagaggtctccaagtggcttcagcatctcccaggacagagatgattatgtgttcggccccaatggggggtcgagctggatgagggagaagcggtacctcgccgagggtgagacggacacagacacggaccccttcacgcccagcggctccatgcctctgtcgtccacaggggatgggatttctgattcagtatggaccccttccaataagcccatttaaaagaggtcactggctgacccctccttgtaatgtagacagactttgtatagttcacttactcttacacccgacgcttaccagc

SEQ ID NO: 151853 - DNA, 647 bp, Homo sapiens; identical to SEQ ID NO: 146205

SEQ ID NO: 151854 - DNA, 535 bp, Homo sapiens; identical to SEQ ID NO: 130889
  misc_feature (1)...(535): n = a,t,c or g

SEQ ID NO: 151855 - DNA, 467 bp, Homo sapiens; identical to SEQ ID NO: 130890
  misc_feature (1)...(467): n = a,t,c or g

SEQ ID NO: 151856 - DNA, 798 bp, Homo sapiens
atggacgtgacagtctcggagctcctggagctcttcctgcagagcccgctggtgacctgggtgaaaacttttggcccgtttggaagcggcagccaggacaacctgactatgtacatggatttagtggacggcatctttttgaaccaaattatgctgcaaatagatcccaggcccacaaatcaacgcatcaataagcacgtcaacaatgatgtgaaccttcgcattcagaatttgaccatcttggtgagaaacattaagacctactaccaggacatgggatatggccagacacaggcctggggagcagggatcctggagagctttctcgggggaaatgtctgcctgcggctggtggggttgactggcagggaaggggtgtcctctggggaagagcggcacctgcagagctttggagacataaagcagcctgaaggttggggcgtctcttgcgggtacaggttcaggaagggagagctggaacctctggaggtggccgtgttcgtgggaacagggtcagtgggagcagctgtcatggtggccatgggagctgctaccctggaggccccagaggcactagagagcatcaaccaggaatcttcctgtggctgcataaagccttgtggaaactccctggagtggcgacagctggcccgtgcacttcttgtgagatggggtgatgattatgatgaagaaggtgaagaagcagatgaggaaggggaagaaggaggagatgaggaaaatgatccagactatgacccaaagaaggatcaaaacccaacagagtgcaagcagcagtga

SEQ ID NO: 151857 - DNA, 1100 bp, Homo sapiens
atggacgtgacagtctcggagctcctggagctcttcctgcagagcccgctggtgacctgggtgaaaacttttggcccgtttggaagcggcagccaggacaacctgactatgtacatggatttagtggacggcatctttttgaaccaaattatgctgcaaatagatcccaggcccacaaatcaacgcatcaataagcacgtcaacaatgatgtgaaccttcgcattcagaatttgaccatcttggtgagaaacattaagacctactaccaggacatgggatatggccagacacaggcctggggagcagggatcctggagagctttctcgggggaaatgtctgcctgcggctggtggggttgactggcagggaaggggtgtcctctgggcaagagcggcacctgcagagctttggagacataaagcagcctgaagaggcacaaggtcgaatggtgggttcctttgagcgtacccctcagatttgtggccttgggtacaggttcaggaagggagagctggaacctctggaggtggccgtgttcgtgggaacagggtcagtgggagcagctgtcatggtggccatgggagctgctaccctggaggccccagaggcactagagagcatcaaccaggaatcttcctgtggctgcataaagccttgtggaaactccctggagtggcgacagctggcccgtgcacttcttgtgagatggggtgatgattatgatgaagaaggtgaagaagcagatgaggaaggggaagaaggaggagatgaggaaaatgatccagactatgacccaaagaaggatcaaaacccaacagagtgcaagcagcagtgaagcaggatatatgtggccttgaggataacctgcactgtcctagcctaaacacgactcttatttacttacagccttatgtctttgtattttcttggtagactgggtaatttttgttttaaaggacaggaaactgatattttaaagaccaatctgttctacctaggcatttttaactagtttttctgccagctatgttgactgcgcgaattctgacacgcatgttcattcattgctacataagttgggtcttctggaatatgttt

SEQ ID NO: 151858 - DNA, 763 bp, Homo sapiens
gcacgagcaaagacatacaggatgaggtcagaaccagatgattctgatccctttccttttgatggaccagaaattatgggttgtacagggtgccagatagattggaaaaaaggaaagaatgtcactttgaaaactattaaggaagaagcagaaacacatgggacgtgggacagttcgtactgtgacctaaaacagtttccaatgattctttctttaactttttttgcccctcctgaagttcctgagagtggagatctgggatgatgatgctgaagctatccttgctgcagacttcgaaattggtcactttttacgtgagcgtataatcccaagatcagtgttatattttactggagaagctattgaagatgatgatgatgattatgatgaagaaggtgaaaaaagcggatgaggtaatgtttaccaaatgagcaaataattctctgtggttaccacatttgagaagcaaatttgaatggacttattgtattcctttgctataatcattctgtgatttgggataaaaacattttggaaaacatgattttagaatttctacaagcccaaaacaatgtatgtataaggtttcaataaataaattgcaaaactcagcaacatttttttatttcaaataattttgttctgctgcagggttatcagctctttgaagaagtcaaaagctgcagtaaacttttccaacgttggctgcagtaactattttcaataaaagctgtctggatgtctaaaaaaaaaaaaaaaaaaa

SEQ ID NO: 151859 - DNA, 995 bp, Homo sapiens
atgtccccctggcatttcaaataggcccaaaatttttagctttttacaaaatttagaaaccttttattagattttcctccatatgcccttacccccccctgaggtagttaggtaaacagtactacccattttaattacacagtaaacagaagcacggggaaggtgacatactcatactttaagcaataagaattagaagaaaccatagaagcttggggccttctctctagctctaacccaaagaaaatgaattttatttttttttttttaaaagaaaacagcatcaatcacttaagattttcttcctctttttttttttttttttacacttgcttattagtatagcatctcgttccaaagctggtaccttttcttcaacaatgtgttaaaaactgagtataacccttaattcaaggtaggcctctacttctacctgaattggtacaaaattaagacattatcttgtaagaactaaaattgtatttgaaatttttattttagctgcaaaaacaaaaacaagcaaacaaacaacaaataacttgaaaataggcttgtcaaatggtgtaaattcatcctttccagggaagcagaaggtagaccctaccacaaagaaaagatgcttagttaatggagggttaaatttaaaaatacagttaaaattcaggctaacttctgaaaatcccgttttattcacctcactgtggtaccagtaactatactgagtcaggttactttacagttaactatgtcacctaaaacacaataatccattaacactctaataacagttattgggtgtggtcatactggaaattcttaaccatatagttgtcttgccaattttttttttaaacaataaattgtcttagtataagtcactgcatttctgtaacaaagtaatgaaaggcacagctaatccaagcggacttaaccctattcaacaaccagctgaaaaaatactttggttcttcaagcgaaaaaattacaaaaaaaaa

SEQ ID NO: 151860 - DNA, 1711 bp, Homo sapiens
atctgctcgcggcgccgcctcctgctcctcccgctgctgctgccgctgccgccctgagtcactgcctgcgcagctccggccgcctggctccccatactagtcgccgatatttggagttcttacaacatggcagacattgacaacaaagaacagtctgaacttgatcaagatttggatgatgttgaagaagtagaagaagaggaaactggtgaagaaacaaaactcaaagcacggtcagcgtaactgttcagatgatgcaaaatcctcagattcttgcagcccgttcaagaaagacttgatggtctggtaggaaacaccaacaggatacattgaaagcctgccttagggtagttaaaagacggagtgaatgctctcaaaaacctgcaagttaaatgtgcacagaaagaaacccaacttctatgaggaagttcacgatcttgaaaggaagtatgctgttatctatcagcctctatttgataagcgatttgaaattattaatgcaatttatgaacctacggaagaagaatgtgaatggaaaccagatgaagaagatgagatttcggaggaattgaaagaaaaggccaagattgaagatgagaaaaaggatgaagaaaaagaagaccccaaaggaattccctgaatttgggttaactgtttttaaagaatgttgacttgctcagtgatatggttcaggaacacgatgaacctattctgaagcacttgaaagatattaaagtgaagttctcagatgctggccagcctatgagttttgtcttagaatttcactttgaacccaatgaaatattttacaaatggaagtgctgacaaagacattacgtgatgagttcgataccagatgaattctgatccttttttcttttgaatggaaccagaacattagggttgtacagggtgccagatagattggaaaaaaggaaagaatgtcactttgaaaactattaggaagtaggccgaaaccacaagggacgtggggacagtttcgtactgtgaactaaaaccagtttcccaatgactctttctctaactttttttgccccctcctgaagttcttggagagtgaagatcggaatgatgaatgctgaagctatccttgctgcagacttcgaaattggtcagctttttaccgtgagcgtataatcccaagatcaagtgttatattttactggagaagctattgaagatgatgatgatgattatgatgaagaaggtgaagaagcggatgaggaaggggaagaagaaggagatgaggaaaatgatccagactattgacccaaagaaaggatcaaaacccagcagagtgcaagcagcagtgaagcaggatgtatgtggccttgaggataacctgcactggtctaccttctgcttccctggaaaggatgaatttacatcatttgacaagcctattttcaagttatttgttgtttgtttgcttgtttttgtttttgcagctaaaataaaaatttcaaatacaattttagttcttacaagataatgtcttaattttgtaccaattcaggtagaagtagaggcctaccttgaattaagggttatactcagtttttaacacattgttgaagaaaaggtaccagctttggaacgagatgctatactaataagcaagtgtaaaaaaaaaaaaaaaaagaggaagaaaatcttaagtgattgatgctgttttcttttaaaaaaaaaa

SEQ ID NO: 151861 - DNA, 813 bp, Homo sapiens
  misc_feature (1)...(813): n = a,t,c or g
ccactgaagcgctcagatggctgtaacgacggccgacccacgcgtccgcccacgcgtccggacacaactgtgttcactagcaacctcaaacagacactattggtgcacctgactcctgtggagagagtctgccgttactgccctgtggggcaaggtgaacgtggatgaaagttggtggtaaggccctgggcaggctgctggtggtcctaccctgggaccccaaaaggtcctttnaaagccctttgggggaatctgtcccaactccctgaatgctgttaatggggcaaacccctaaaggtgaaaggctcaatggcaaaagaaaaagtgctcgggtgccctttagtggtgggcctggcttcacctgggacaaccctcaaagggcacctttgcccacactggagtgagcttgcactgttgacaagcttgccacgtgggatccctgaagaacttcagggctcctggggcaaacgtgctgggtcttgtgttgcttgggcccaatcaacttttgggcaaaagaatttcaaccccaacaagttgcaaggcttgcctaatcaagaaaattggttggcttggtgttggctaaatgcccttggccccacaagtaatcacttaagcctcgctttccttgctggtccaatttccaattaaaaggttcctttggttccctaagtccaacttattaaactggggggatattattgaaagggccttgagcatctgggattcttgcctaattaaaaaacatttattttcatcgcatacaagaataaaacaagcgcggccgattaagaggatacttcaggggcgcaagat

SEQ ID NO: 151862 - DNA, 461 bp, Homo sapiens; identical to SEQ ID NO: 146210

SEQ ID NO: 151863 - DNA, 418 bp, Homo sapiens; identical to SEQ ID NO: 146211

SEQ ID NO: 151864 - DNA, 4341 bp, Homo sapiens; identical to SEQ ID NO: 146212

SEQ ID NO: 151865 - DNA, 928 bp, Homo sapiens; identical to SEQ ID NO: 146213

SEQ ID NO: 151866 - DNA, 654 bp, Homo sapiens; identical to SEQ ID NO: 144884
  misc_feature (1)...(654): n = a,t,c or g

SEQ ID NO: 151867 - DNA, 659 bp, Homo sapiens; identical to SEQ ID NO: 146215
  misc_feature (1)...(659): n = a,t,c or g

SEQ ID NO: 151868 - DNA, 474 bp, Homo sapiens
catctgtgctactcagatgctggagagcatgatcaagaagccccgccccactcgggctgaaggcagtgatgtggccaatgcagtcctggatggagccgactgcatcatgctgtctggagaaacagccaaaggggactatcctctggaggctgtgcgcatgcagcacctgatagctcgtgaggctgaggcagccatgttccaccgcaagctgtttgaagaacttgtgcgagcctcaagtcactccacagacctcatggaagccatggccatgggcagcgtggaggcttcttataagtgtttagcagcagctttgatagttctgacggagtctggcaggtctgctcaccaggtggccagataccgcccacgtgcccccatcattgctgtgacccggaatccccagacagctcgtcaggcccacctgtaccgtggcatcttccctgtgctgtgcaaggacccagtccaggaggcctg

SEQ ID NO: 151869 - DNA, 2354 bp, Homo sapiens
ggctgaggcagtggctccttgcacagcagctgcacgcgccgtggctccggatcttcttcgtctttgcagcgtacgcccgagtcggtcagcgccggaggacctcagcagccatgtcgaagccccatagtgaagccgggactgccttcattcagacccagcagctgcacgcagccatggctgacacattcctggagcacatgtgccgcctggacattgattcaccacccatcacagcccggaacactggcatcatctgtaccattggcccagcttcccgatcagtggagacgttgaaggagatgattaagtctggaatgaatgtggctcgtctgaacttctctcatggaactcatgagtaccatgcggagaccatcaagaatgtgcgcacagccacggaaagctttgcttctgacccctacctctaccggcccgttgctgtggctctagacactaaaggacctgagatccgaactgggctcatcaagggcagcggcactgcagagctggagctgaagaagggagccactctcaaaatcacgctggataacgcctacatggaaaagtgtgacgagaacatcctgtggctggactacaagaacatctgcaaggtggtggaagtgggcagcaagatctacgtggatgatgggcttatttctctccaggtgaagcagaaaggtgccgacttcctggtgacggaggtggaaaatggtggctccttgggcagcaagaagggtgtgaaccttcctggggctgctgtggacttgcctgctgtgtcggagaaggacatccaggatctgaagtttggggtcgagcaggatgttgatatggtgtttgcgtcattcatccgcaaggcatctgatgtccatgaagttaggaaggtcctgggagagaagggaaagaacatcaagattatcagcaaaatcgagaatcatgagggggttcggaggtttgatgaaatcctggaggccagtgatgggatcatggtggctcgtggtgatctaggcattgagattcctgcagagaaggtcttccttgctcagaagatgatgattggacggtgcaaccgagctgggaagcctgtcatctgtgctactcagatgctggagagcatgatcaagaagccccgccccactcgggctgaaggcagtgatgtggccaatgcagtcctggatggagccgactgcatcatgctgtctggagaaacagccaaaggggactatcctctggaggctgtgcgcatgcagcacctgattgcccgtgagcacgatggctgccatctaccacttgcaattatttgaggaactccgccgcctggcgcccattaccagcgaccccacagaagccaccgccgtgggtgccgtggaggcctccttcaagtgctgcagtggggccataatcgtcctcaccaagtctggcaaggtctgctcaccaggtggccaagataccgcccacgtgcccccatcattgctgtgacccggaattccccagacagctcgtcaggcccacctgtaccgtggcatcttcccatgtgctgtgaagggacccagttccaggaggcctgggctgaggacgtggacctccgggtgaacttttgccatgaatgtttggcaaggcccgaggcttctttcaagaaaggggagatgtggttcattgtgctgaccggaatggcgcccctggctccggctttcaccaacaccatgcgtgttgttcctgtgcccgtgatggaccccagagcccctcctccaagcccctgtcccacccccttcccccagccccatccattaggccagcaacgctttgtagaacttcactctggggctgtaacgtggcactggtaaggttgggacaacagggaagaagatcaacgcctcactgaaacatggctgtgtttgcagcctgctcttagtgggacaagcccagagcctgggttgcccatcagtgtggccccacccaatcaagggaagaaggaggaatgctggactggaggcccctggagccagatggcaagagggtgacagcttcctttcctgtgtgtactctgtccagttcctttagaaaaaatggatgcccagaggactcccaaccctggcttggggtcaagaaacagccagcaagagttaggggtccttagggcactgggctgttgttccattgaagccgactctggccctggcccttacttgcttctctagctctctaggcctctccagtttgcacctgtccccaccctccactcagctgtcctgcagcaaacactccaccctccaccttccattttcccccactactgcagcacctccaggcctgttgctatagagcctacctgtatgtcaataaacaacagctgaagcacc

SEQ ID NO: 151870 - DNA, 1469 bp, Homo sapiens
ctgtattgttatttttcgtcactacctccccgggtcgggagtgggtaatttgcgcgcctgctgccttccttggatgtggtagccgtttctcaggctccctctccggaatcgaaccctgattccccgtcacccgtggtcaccatggtaggcgcggcgactaccatcgaaagttgatagggcagacgttcgaatgggtcgtcgccgccacggggggcgtgcgatcggcccgaggttatctagagtcaccaaagccgccggcgcccgacccccggaacccaaagactttggtttcccggaagctgcccggcgggtcatgggaataacgcccgccgcatcgccggtcggaatcgtttatggtcggaactacgacggtatctgatcgtcttcgaacctccgactttcgttcttgattaatgaaaacaattctggcaaatgcctttcgttttggtccgtcttgcgccggtccaagaatttcacctctagcggcgcaatacgaatgcccccggccgtccctcttaatcatggcctcaggttccgaaaaccaacaaaatagaaccgcggtcctattccattattaactagctgcggtatccaggcggctcgggcctgctttgaacactctaattttttcaaagtaaaacgcttcgggccccgcgggacactcagctaagagcatcgagggggcgccgagaggcaaggggcggggacgggcggtggctcgcctcgcggcggaccgcccgcccgctcccaagatccaacttccgagctttgtgcccgcagcactctttaatatccgctattggagcttgaaactaccccggttgttggcaacacacttgccctccaatggatccctcgttaaagggatttaaagtggacttcattccaattacagggcctcgaaagagcccctgtattgttatttttcgtcactacctcccccgggtcgggagtgggtaatttgcgcgcctgctgccttccttggattgtggtagccgtttctcaggctcccctctcccggaaatcgaacccttgattccccgttcacccgtggtcaccatggtcggcacggcgactaccatcgaaagttgatagggcagacgttcgaatgggtcgtcgtccgccgccacgggggggcgtgcgatcggcccgaggttatctagagtcaccaaagccgccggcgcccgccccccggccggggccggagaggggctgaccgggttggttttgatctgataaatgcacgcatccccccccgcgaagggggtcagcgcccgtcggcatgtattagctctagaattaccacagttatccaagtaggagaggagcgagcgaccaaaggaaccataactgatttaatgagccattcgcagtttcactgtaccggccgtgcgtacttagacatgcatggcttaatctttgagacaagcatatgctactggcctcgagccgaatttgccgatgcgcgg

SEQ ID NO: 151871 - DNA, 406 bp, Homo sapiens; identical to SEQ ID NO: 146216

SEQ ID NO: 151872 - DNA, 491 bp, Homo sapiens; identical to SEQ ID NO: 146217

SEQ ID NO: 151873 - DNA, 1155 bp, Homo sapiens; identical to SEQ ID NO: 146218
  misc_feature (1)...(1155): n = a,t,c or g

SEQ ID NO: 151874 - DNA, 1602 bp, Homo sapiens
  misc_feature (1)...(1602): n = a,t,c or g
atggtctacggggcttctgaggcaatcgggcagcgtcagtcttcagccgctaagccaagaaggagtcagtcagagagccttgggccagagttccaggggctctgggagtggctgccaggaaagcgggacttgccgctaagggtgaaggagaaggggttgaggggtacttgcccctgccccaggaaagcgggacttgctgctaagggtgaaggagaaggggttgaggggttcttgcccctgccccaggaaagcagagaagggaacaggaggacaggagactggtctcctaagggaggtcccccgatccgagtcacggcaccaaatttcatgcgtgtctgtgtgaagagaccaccaaacaggctttgtgtgagcaacatggctgtttatttcacctgggtgcagaaaaagaaatcatctttggcattttcttcagttgtcacatcagatcttaaaagcaagaagagaagactttcagggaagagcctggagaccagctcggcgtccctgatggtctacggggcttccgaggcgaccgggcagcgtcagtcttcagccgctaagccgagaaggagtcagtcagagagtcttgggccagagttccaggggctccgggagtggctgccagcgatttccaatagatttctgcgtggccttgacacagacagctagtgtgaatccccgcccacagaggggcggcacgttggttgccgtacaacgtggtggttccctgcatctctgcccacgtcggagaggtgcgtcggcttccgtacaacacggatactctctctctgacgcaacttcctgtcctgcgcaattctatttgacctttgaactggcaaaggcttttttcttcctcttccggggacgttgtctgcaggtatggatgttgttctcttttccctgtctttatttccttaccaatcggctgccatccgaggagctgaggaagcctagagctctcagaagcagtcctttgagctggtgtaggggtaaggggcacaacagggaggttggtggtgaggaagttccttactttgatctttggaaatcccttgttcctggtggcacctccaaagccgcactcagaatggtcccagcgtttgacatacccgacgtaggccttccccctacaatacagccctctaacaaaacctaggctgtccccgaaccccgatggtaatagaatctgtttaccgtttatacccaagaaggttgggaaagcaccccaatntctgcatgtggtgtgtgccccaggcagacttcgagggggttcgtgctgtaagacctaaagtttcttatgaagattgtccaaaacaaagaaacatgtcagcagggcctatgggtggttccattgtgtgctaaaatgtggtcgtgaccaggatcaaagcgtgcttttcccttatcggagggagcaggaaaattcgttgtggaaaaagtgtttgaagggcaccaagccacaggagtccaggaaagctaaaattaaaaaaatggaacctttttttggagtaattaaaaattgaaaagacgctgtcccaataggaaaaagttgggtgtgctgggagctacctcacctcagctttgangagagcccatttgttttgc

SEQ ID NO: 151875 - DNA, 861 bp, Homo sapiens; identical to SEQ ID NO: 146235
  misc_feature (1)...(861): n = a,t,c or g

SEQ ID NO: 151876 - DNA, 1740 bp, Homo sapiens
  misc_feature (1)...(1740): n = a,t,c or g
ccagccctgggattttcaggggttttcagtcggtgatcaggactgaacagagagaactcaccatggagtctgggctgaactggcttcttcttgtggctgttttaaaaggtgtccagtgtgaggtgcagatattggagtctgggggaggccaggtgcagccgggggggtcccgaacactctcctgtgcagcctctgggttcatcttttccaactatgtcatgacctgggtccggcaggctccagggaaggggctggagtgggtctcaagtactgctgcctccggtgcgaacaccttctatgcagaatctgtgaagggccgcttcaccgtctcccgagagaactccgagaacatgatgtatctgcaaatgagcagcctgagagacgaggacacgggcatttattactgtgcgaaagatggcgacgttccgaacttgggagttgcttggatagtagcaggccccggcaatgtaaggccgcgcaagtggttcgacgcctggggccaagggaccacggtcaccgtctcgtcagcatccccgaccagccccaaggtcttcccgctgagcctctgcagcacccagccagatgggaacgtggtcatcgcctgcctgcctggtccagggcttcttcccccaggagccactcagtgtgacctggagcgaaagcggacagggcgtgaccgccagaaacttcccacccagccaggatggcctccggggacctgtacaccacgagcagccagctgaccctgccggccacacagtgcctagcccgccaagtccgtgacatgccacgtgaagcactacacgaatccccacccagatgttgatggggccctgcccagttccctcaactccacctaccccatctccctcaactccacctaccccatctccctcatgctgccacccccgactgtcactgcaccgaccgggccctcgaaggacttgtttttaggttcagaagcgaacctcacgtgcacactgaccggccttgagagatgcctcagggtgtcactttcaatctgaaggccttcaagtggggaagagcgctgttcaaggaccaacntgaggcgtgaccctctgtggctgnctacagcgtggtccagttgtcttgccggggctggcgcgaagccatggaaccattggtaagacctttcacttgcactgctgccctaccccgtagtccaaggacccgcgctaaccgcccaccctcttcaaaatccgggaaacacatttccgggcccgagggtccaccctgctgccgcccgccgtcggaggagctggccctgaacgagctggtgacgctgacgtgcctggcacggcgctttcagcccccaaggaccgtgttgggttcgctggttgcaggggtccccaaaacttcccccgcgaaaaagtacctgacttgggcattcccggcaggagcccaggcaagggcacccaccaccttcgctgtgaccagcatattggggcgtggcaacccgaggattggaagaagggggacacctttttcctgcatggctggccacgatggccctcgcgctggccttcacacagaagaccatcgaccgcttggcgggtaaacccacccatgtcaatgtgtctgttgtcatggcggaggtggacggcacctgctactgagccggccccgcctgtccccacccctgaataaactccatgctcccccaaaaaaaaaaaaaaaaaaaaaaaaaaaaaaaaaaaaaaaaaaaaaaaaaaaaaaaaa

SEQ ID NO: 151877 - DNA, 514 bp, Homo sapiens; identical to SEQ ID NO: 135649
  misc_feature (1)...(514): n = a,t,c or g

SEQ ID NO: 151878 - DNA, 1642 bp, Homo sapiens
aattccggcggaagtggtggaggaacttccggcagcggcagctcaagtggccaaggcaagatgggtcaaagtcagagtggtggtcatggtcctggaggtggcaagaaggatgacaaggacaagaaaaagaaatatgaacctcctgtaccaactagagtggggaaaaagaagaagaaaacaaagggaccagatgctgccagcaaactgccactggtgacacctcacactcagtgccggttaaaattactgaagttagagagaattaaagactatcttctcatggaggaagaattcattagaaatcaggaacaaatgaaaccattagaagaaaagcaagaggaggaaagatcaaaagtggatgatctgagggggaccccgatgtcagtaggaaccttggaagagattattgatgacaatcatgccatcgtgtctacatctgtgggctcagaacactaccgtcagcattctttcatttgtagacaaggatctgctggaacctggctgctcggtcctgctcaaccacaaggtgcatgccgtgataggggtgctgatggatgacacggatcccctggtcacagtgatgaaggtagaaaaggccccccaggagacctatgcagatattggggggttggacaaccaaattcaggaaattaaggaatctgtggagcttcctctcacccatcctgaatattatgaagagatgggtataaagcctcctaagggggtccatccttttggtcccacctggccacgggtaaaacctttttgcccaaggcagtagcaaaccaaaccctcagccactttcttgagagtggttggctctgaacttattcagaagtacctaggtgatgggcccaaaacccctcccgggaattgttccggagtttctgaagaactggccccgtccctccggtttattgatagaattttgcccccattgggacacaacagatatgacctccaattcctggtgtgagaagagaattacagcgaacaatgtttggaactgctgaacccagttgggatggatttgattcttaggggagattgtgaaagttatcatggccacaaaccgaataggaaacttggatcccagcacttatcagaccaggccgcattgacaggaagattgagttccccctgcctgatgaaaagacgaagaagcgcatctttcagattcacacaagcaggatgacgctggctgatgatgtaacccctggacgacctgatcatggctaaagatgacctctctggttgctgacatcaaggcaatctgtacagaagctggtctgatggccttaagagaacgtagaatgaaagtaacaaatgaagacttcaaaaaatctaaagaaaatgttctttataagaaacaggaaggcacccctgagggggtggtatctctaatgaaccatggcttgtcatcaggaaaatggttgggagatttctcaatccctgaaagggatgaggttggggggagttgcccagaggaatccctgttcccactgattttttattagcaaaacatcctgtgtcttttggagtacgatgtgtaagtgcccattgggtggcctgttggtcactgtgcatcagtctgctttcccaataaagggtgctttttcccaaacaaaaaaaaaaaaaaaaa

SEQ ID NO: 151879 - DNA, 1282 bp, Homo sapiens
agcgatagaacactgtcagagtggtgacaaccccgagagtcgtcggggtttcctgcttcaacagtggcttggacggaacccggcgctcgttccccaccccggccggaccggccatagccagcctcccgtcacttttcaccggcacccctcggattgccaaaggtcccccgccggccgcttcaagggcgggccaagccaccgcggccagccgccgccttttcataagtcgccgcccatgacgacagcgcgtcccacctcgcaaggtgcgccagaacgtaccaccagggactcagaggccgccatcaaccgcacagatcaacctggaggctctacgcctcctacgtttaccctgtccatgtcttactactttgaccgcgatgaatgtggctttgaagaacttttgccaaatactttcttcaccaatctcatgaggagaggggaacattgctgagaaaacttgatgaaagcttgcagaaccaacgaaggttggccgaatctttcctttcaggatattaaagaaaccaagacttgtgatgacttgggagagcggggctgaatgccaatggaagtgtgcattacattttggaaaaaaatgttgaatcaagtcactactggaacttgcacaaactgggccactgacaagaactgacccccaatttgtgtggacttcatttgagacacatttaccttgaatgagcagggtgaaaggccatcaaaagaatttggggtgaccacggtgacccaaactttggcgcaagatgggaagcgccccgaatcttggctttggcgaatatctcttttgacaaagcacaccctggggagacagtgataatgaaagctaagcctcgggctaatttccccaatagccgtggggtgactttcctggtcaccaaggcagtgcatgcatgttggggtttcctttaccttttctataagttgtaccaaaacatccacttaagttctttgatttgtaccattccttcaaataaagaaatttggtacccaggtgttgtctttgaggtcttggatgaatcagaaatctatccaggctatcttccagattccttaagtgccgttgttcagttctaatcacactaatcaaaaagaaacgagtatttgtatttattaaactcattagtttgggcagtatactaaggtgtggctgtcttggattcagatagaactaagggttcccgactctgaatccagagtctgagttaaatgtttccaatggttcagtctagctttcacagtttttatgaataaaaggcattaaaggctg

SEQ ID NO: 151880 - DNA, 637 bp, Homo sapiens; identical to SEQ ID NO: 144817
  misc_feature (1)...(637): n = a,t,c or g

SEQ ID NO: 151881 - DNA, 710 bp, Homo sapiens
aattttgccctcgaggccaagaattcggcgagggcaataagctcctagtcccagacgcccatggggtcatttcacagaggaggaccaaggctactatcgacaagcctgtggggcaaaggtgaatgtggaaagatgctggaggaagaaaacccctgggaaaggctccctggttgtctaccccatggacccagaggttctttgacagctttggcaacctgtcctctgcctctgccatccatgggcaaacccccaaagtcaaggcacatggccaagaaggtgctgactttccttgggagatgccaacaaagcacctggatgatctcaaagggcacctttgcccaagcctgaagtgaactgcacttgtgacaaagctgcatgtggatcctgagaacttcaaagctcctggggaaatgtgctggtgacccgttttgggcaatcccattttcggcaaaagaattcacccctgaaggttgcagggcttcctgggcagaaagatgggtgacttggagttggccagtgccctgttcctccagataccactgaagcctcttggcccatgaattcagaagctttcaaggataaggcttttattcttgcaagcaattacaaataataaatctatttctgctaagagatcacacatgattttcttcagctcttttttttacatctttttaaatatatgagccacaaagggtttatattgagaa

SEQ ID NO: 151882 - DNA, 1236 bp, Homo sapiens; identical to SEQ ID NO: 146240

SEQ ID NO: 151883 - DNA, 1912 bp, Homo sapiens; identical to SEQ ID NO: 146241

SEQ ID NO: 151884 - DNA, 563 bp, Homo sapiens; identical to SEQ ID NO: 136144

SEQ ID NO: 151885 - DNA, 1134 bp, Homo sapiens; identical to SEQ ID NO: 136146

SEQ ID NO: 151886 - DNA, 809 bp, Homo sapiens
ctgttcccagctttctctgattcccgggaatgcaagttgatgaaaaaattgctagaggcccacgaggagcagaatgtggacagctacaccgagtcggtgaaggaatacgactccatctcccggctggacccagtggctcaccaccatgctgctgcgcatcaagaagaccatccagggcgatgaggaggacctgcgctaagccccacccagccccccagtgcccgtcttcctgtcccatctgctcagagagaggtggggccgagactttgctggagagcttccctcctttcccatctggggagtcccgcgggccacagtgggcagggtggcaccggggggtcagcatgcaggggcgccagaggcccaggctggctggccggacaagtcaccctctgttctcgctacattcccttgccccctggccatttatttaagccccccataggtgccccttcacccccaaaaaccagctgtaacagaatcttttgataacagacctattttgctaagggggtgctgcccggggatttgggggtcagcatctggccccctatctcctgaccagctgagtcatgaggccggtttctctctctctcccacttttgtcccccagccaagctctaaagcacatgtagcccgctgagaccagcttcctgcagccccgacctctcaggttagaccctgggccctggagcttaggggattctccccaccccagccccacacctgctccttccctaatgctttgaggttttcttggttggaagctgcagctggcccaagaaagaaaataaaaaacaacacttttg

SEQ ID NO: 151887 - DNA, 583 bp, Homo sapiens
  misc_feature (1)...(583): n = a,t,c or g
tggggaattcccgcgggcaacagtgggcaagtggcaccggggtcagcatncagggggcccagaggcccaggctgctggccggacagtcaccctctgttctcgctacattcccttgccccctgtcccatttattttaagcccccattaggtgcccttcacccccaaaaccagctgtaacagaatcttttgatacaagacctaatttgcttaggggtgctgcccggggaatttggggtcaagcatctggcccccctatctccctgaccagctgaagtcatgaggccggtttctctctctctccccacttttgtcccccagccaagcttataaagcacatgtagccgctgagacctgctgtttctgtctgggggcaggctcctcttcccccagccccgggagcctcccccagcttcctgcagccccgacctctcaggttagaccctgggccctggagcttaggggattctccccaccccagccccacacctgctccttccctaatgctttgaggtttttttggttggaagctgcagctggcccaagaaagaaaataaaaaaccacccttttgaaaaaaaaaaaaaa

SEQ ID NO: 151888 - DNA, 1417 bp, Homo sapiens
  misc_feature (1)...(1417): n = a,t,c or g
ggccgcaagcgacgccgccggtgcgacgtcaacgcagccgggcgagttttaccgatctgtgttccgcggcccgttcgcggttgagtcttcccaggggtcagggtcaggcgctgtgctagaaaccctttgaggccgccatgtacaattccgggaaggaagcggaggcgatggcgctgttggccgaggcggagcccaaagtgaagaacctcgcagtccttcttctctggcctctttggaggctcatccaaaatagaggaagcatgcgagaatctacgccagagcagcaaacatgttcaaaatggccaaaaactgggagtgctgctggaaaccgcgttctgccaggcttgcacagctgcacctgcagctccagagcaaagcacgacgcagccaccttgctttgtggacggctggcaactgcattcaaggaaagccgacccccaaggagggccatttaactgttttgattgcgtagcattcgagatctacaacagacatgggccgaattcacgattgcggccaagcaccacatctccatttgctgagatctattgagacagaagttggtggacatcgagaaggccattgcccacttacggagncagtctgcagactacttacaaagggcgagggagttccaacagcttcaccaacaagtgtctgctggaaggtgggctggttacgcctgcgctgctgggagcagttattcagaaggccattggacattttacggaacaggttgggggaccaaatgcccattggacaagcccccctccgtcaaagtacaagcgccaaagactacttctttcaaggccgccctttgccacttttgcatggacatgcttcaagcccaagctggcttttccaaaagtatgaggagctgttcccagttttctctgattcccgggaatgcaaattgatgaaaaaaattgctaaaggccccacggggagcagaatgtgggacagcttacaccgagttcggtgaaaggaattacgactcccatctcccggctggaaccagtggctcaaccacccattgcttgcgcattcaagaagaccatccggggcgattgaggaaggaacctgcgctaaagccccacccagccccccaagtgcccgtcttcgctgtcccatctgctcagagagagccaagctctaaagcacatgtagtccgctgagacctgctgtttctgctgggggcaggctcctcttcccccagccccgggagcctcccccagcttcctgcagccccgacctctcaggttagaccctgggccctggagcttaggggattctccccaccccagccccacacctgctccttccctaatgctttgaggttttcttggttggaagctgcagctggcccaagaaagaaaataaaaaacaacacttttgcaaaaaaaaaaaaaaaaaaccc

SEQ ID NO: 151889 - DNA, 2157 bp, Homo sapiens
atgctgataaccgggagccccgccctgggttcggctatcccgggcaccccgggccggcggggcgaggctctccaattgctgggccagagcgggacccttcctttccgcaccctcctgggtatctccggtcttcaggcctccttcggagagccctgctccgagcccattgggcttccaatcttggcctgcctagcgccgagcagccaatcagaaggcagtcctcccgagggggcgggacgagggggtggtgctgattggctgagcctgaagtcgccacggactcggggcaacaggcagatttgcctgctgagggtggagacccacgagccgaggcctcctgcagtgttctgcacagcaaaccgcacgctatggctgacagccgggatgccgccagcgaccagatgcagcactggaaggagcagcgggccgcgcaggaaatacctaggagtagatttattgggtcataagaaagctgatgtcctgaccactggagctggtaacccagtaggagacaaacttaatgttattacagtagggccccgtgggccccttcttgttcaggatgtggttttcactgatgaaatggctcattttgaccgagagagaattcctgagagagttgtgcatgctaaaggagcaggggcctttggctactttgaggtcacacatgacattaccaaatactccaaggcaaaggtatttgagcatattggaaagaagactcccatcgcagttcggttctccactgttgctggagaatcgggttcagctgacacagttcgggaccctcgtgggtttgcagtgaaattttacacagaagatggtaactgggatctcgttggaaataacacccccattttcttcatcagggatcccatattggtttctttcttgttcagtgatcgggggattccagatggacatcgccacatgaatggatatggatcacatactttcaagctggttaatgcaaatggggaggcagtttattgcaaattccattataagactgaccagggcatcaaaaacctttctgttgaagatgcggcgagactttcccaggaagatcctgactatggcatccgggatctttttaacgccattgccacaggaaagtacccctcctggactttttacatccaggtcatgacatttaatcaggcagaaacttttccatttaatccattcgatctcaccaaggtttggcctcacaaggactaccctctcatcccagttggtaaactggtcttaaaccggaatccagttaattactttgctgaggttgaacagatagccttcgacccaagcaacatgccacctggcattgaggccagtcctgacaaaatgcttcagggccgcctttttgcctatcctgacactcaccgccatcgcctgggacccaattatcttcatatacctgtgaactgtccctaccgtgctcgagtggccaactaccagcgtgacggcccgatgtgcatgcaggacaatcagggtggtgctccaaattactaccccaacagctttggtgctccggaacaacagccttctgccctggagcacagcatccaatattctggagaagtgcggagattcaacactgccaatgatgataacgttactcagactagcttgtatcttacttaccgtttcatggagaacattgaaaaggtgcgggcattctatgtgaacgtgctgaatgaggaacagaggaaacgtctgtgtgagaacattgccggccacctgaaggatgcacaaattttcatccagaagaaagcggtcaagaacttcactgaggtccaccctgactacgggagccacatccaggctcttctggacaagtacaatgctgagaagcctaagcgaagcttagcgttcatccgtgtaacccgctcatcactggatgaagattctcctgtgctagatgtgcaaatgcaagctagtggcttcaaaatagagaatcccactttctatagcagattgtgtaacaattttaatgctatttccccaggggaaaatgaagctctgactatcgagcaaatgggaagcactgaggcaaactgcctccttaggaactccgtgcagctcgtggcttttgtgattgagattacttcaagaaagtcagacattgtggaaagacacaaatgtgcatggacctga

SEQ ID NO: 151890 - DNA, 482 bp, Homo sapiens
  misc_feature (1)...(482): n = a,t,c or g
cccttcagntgcccggcaatgtctcacacagacgtttcctctgttcctcattcagcacgttcacatagaatgcccgcacctgagtaacgtatcatcattgncagtgttgaatctccgcacttctccagaatattggatgctgtgctccaaggcagaaggctgttgttccggagcacccaaagctgttggggtagtaatttggagcaccaccctgattgtcctgcatgcacatcgggccgtcacgctggtagttggccactcgagcacgggtagggacagttcacaggtatatgaagataattgggtcccagggcgatggcggtgagtgtcaggataggcaaaaaggcggccctgcagtaataaatacaatagacactgactaggggcagtaacatataacataggaatgggctgtaaacttcattctgaaatttgaagtacaaagcactctgtacatggttaccacaaaattctgcctttcc

SEQ ID NO: 151891 - DNA, 3673 bp, Homo sapiens
  misc_feature (1)...(3673): n = a,t,c or g
cagcagggtctaagtattccgtctgcaaaactggcaggccaccaacggccgcgtcccagggcggcctgaaggatgctgataaccgggagccccgccctgggttcggctatcccgggcaccccgggccggcggggcgaggctctccaattgctgggccagagcgggacccttcctttccgcaccctcctgggtatctccggtcttcaggcctccttcggagagccctgctccgagcccattgggcttccaatcttggcctgcctagcgccgagcagccaatcagaaggcagtcctcccgagggggcgggacgagggggtggtgctgattggctgagcctgaagtcgccacggactcggggcaacaggcagatttgcctgctgagggtggagacccacgagccgaggcctcctgcagtgttctgcacagcaaaccgcacgctatggctgacagccgggatcccgccagcgaccagatgcagcactggaaggagcagcgggccgcgcaggattgagatgagggcgtgcaccacaagtatccaagggaacaacgtgcaggacaagtggaagagcaactgcgaagtccctgatgtggaatgtgcctgcacgtttctggagagcctgaagccagggtggctggggcaaagcaagcagggggctaagagaagcggtggagacgagtgcctccaaagttctcatctatgggaatttgtacgagacctgcttctatctcctgaagaaaactgtggcattctggaatgggaagatagggaacaaggaatttttcgggtggttaaatcggaagccctggcaaagatgtggggacaaaggaagaaaaatgacagaatgacatatgaaaagttgagcagagccctgagatactactataaaacaggaattttggagcgggttgaccgaagagaaaaactattcaattctgccattagagacacatccaatgctcccatcccaaaggttcaaaagttttcaaataactgtggcagctcaccaaaggtgcgggcattctatgtgaacgtgctgaatgaggaacagaggaaacgtctgtgtgagaacattgccggccacctgaaggatgcacaaattttcatccagaagaaagcggtcaagaacttcactgaggtccaccctgactacgggagccacatccaggctcttctggacaagtacaatgctgagaagcctaaggtttggcctcacaaggactaccctctcatcccagttggtaaactggtcttaaaccggaatccagttaattactttgctgaggttgaacagatagccttcgacccaagcaacatgccacctggcattgaggccagtcctgacaaaatgcttcagaaagctgatgtcctgaccactggagctggtaacccagtaggagacaaacttaatgttattacagtagggccccgtgggcccttttcttgttcaggatgtggttttcactgatgaaatggctcattttgaccgagagagaattcctgaagagaagttgtgcatgctaaaaggaagcaggggccttttggtacttttgaaggtcacacattgacattaccaaatactccaaaggcaaaaggtattttgaagcatatttggaaaagaagacttcccatcgcagtttcggttcttccactgtttgctgggagaatcgggtttcagcttgacacagtttcggggaccctcgtgggttttgcagtgaaattttacacagaagatggtaactgggatctcgttggaaataacacccccattttcttcatcagggatcccatattgtttccatcttttatccacagccaaaaagagaaatcctcagacacatctgaaggatccggacatggtctgggacttctggagcctacgtcctgagtctctgcatcaggtttctttcttgttcagtgatcgggggattccagatggacatcgccacatgaatggatatggatcacatactttcaagctggttaatgcaaatggggaggcagtttattgcaaattccattataagactgaccaggggcatcaaaaacctttctgttgaagatgcggcgagactttcccagggaagatcctggactatgggcatccgggatcttttttaaacgccattggccacagggaaagtacccctcctggactttttacatccaggtcatgacatttaatcaggcagaaacttttccatttaatccattcgatctcaccaaggtttggcctcacaaggactaccctctcatcccagttggtaaactggtccttaaacccggaatccagttaattactttgcctgaggttggaacagatagcccttcgaccccaagcaacatgccacctggcatgtgaggcccagttcctggacaaaatggctttcaggggccgccttttttgcctattcctggacactcaccgccattcgcctgggggacccaattattctttcatattacctgtggaacttgttccctaccgtggttcggagtggggccaacttaccaggcgtgacgggcccgatgttgcattgcaggacaatcaggggtgggtggttcccaaatttattaaccccaacagctttgggtgctcgggaacaacagccttctgccttggaagcacagcatccaatattctggagaaagtgcggagattcaacactgccaatggatggataacgttaattcaggtggcgggcatttttatgttgaacgtgctgaattgagggaacaggagggaaacgtctgtgttgaggaacatttgccggccacctggaagggatggcacaaattttcatcccagaaggaaagcgggtcaagaacttccactgagggtcccacccctgacctacgggagcccacatccccaggctcttctggaccaagtacaaagcctgagaaccctaagaatgcgatttcacacctttgtgcagtccggaatctcacctnggcggccaagggaagaaggccaaatcctgtgaaggcccggggcccccgcaccctgtgccagcgaagccttagccgttccatcccgtgtaacccccgcctcatccacctggatgaaagattcctccctgtgcctagatgtgcaaatgcaagcctagtggccttcaaaatagagaatccccactttcctatagcagattgtgtaacaattttaaaatgctatttcccccagggggaaaatgaaggttaggatttaaccagtccatttaaaaaaaaaaattggttttgaccggatggattgggattattccatttaaaaatggattaggaaggcaagtttctaggctaggaaatatggattttatttgaccaaaatttgttgaaattatgtatgtttaccatatcaccctcatggccctattatattaaaatatggcctataaatatataaaaaggaaaagataaagatgatctactcaggaaatttttatttttctaagggttctcataggaaaagtacatttaatacagcagtgtcatcagaagataacttgagcaccgtcatggcttaatgtttattccctgataataattgatcaaattccatttttttcactggagttacattaatgttaattcagcactgatttcacaacagatcaatttgtaattgcttacatttttacaataaataatctgtacgtaagaacaaaaaaaaaaaa

SEQ ID NO: 151892 - DNA, 654 bp, Homo sapiens; identical to SEQ ID NO: 144884
  misc_feature (1)...(654): n = a,t,c or g

SEQ ID NO: 151893 - DNA, 704 bp, Homo sapiens
  misc_feature (1)...(704): n = a,t,c or g
ccccgactcttctggtccccacagactcagagagaacccaccatggtgcttgtctcctgccgacaagaccaacgtcataggccgcctggggtaaggtcggcgcgcacgctgtgcgcagtatgtgtgcggaggccctggagaggatgttcctgtccttccccaccaccaagacctacttcccgcacttcgacctgagccacgggttttgcccaggtttaagggccacgggcaaggaaggtggccgacgcgcttgaccaaacgccgtggccaacgtgggacggacattgcccaacgcgcttgttcggcccttgaagcgacctgcacgcgcacaagctttcgggtgggacccggttcaacttcaaagctcctaaaggccacttgccttgcttgggtgaaccttgggccgcccaccttccccggccgagtttcaacccctggcggttgcaacgtcttccctggggacaaagtttcctgggctttttgttgaagcaccgttgcttgaaccttccaaattaccgttaaagcttggaagccttcggttggccattgttttctttgcccctttggggcttccccccagcccctcctcccctttcctgcacccgtacccccgtggtcttttgaataaaattttgaattgggggggcaaaaaaaaaaaaaaaaaaaagatctttnaatttaagggggcggaaagtttatttcaa

SEQ ID NO: 151894 - DNA, 939 bp, Homo sapiens
  misc_feature (1)...(939): n = a,t,c or g
cccacgcgtccgatcgccgccatcatgggtcgcatgcatgctcccgggtgagctcggggcatcaagccggattgctgggcggtgggtgggaggaagacagggagtgtgggcagcgggccgaggggatgatgttctgggctgctctggcactagccgccacttcaccttcgagactgcttctctcccccgggaagggccctgtccccagtcgggctttacccttatcggacgcagcgtcccccacttggttgaagttgaccatctgacgacgtgaaggagccagatttacaaacttggccaagaagggcccttactccttcacgagatcggtggtaatcctgagagattcacatggttgttgcacaagtacgtttagggaacaggccatgacactttcaagatccctaaagtctaagggacttgatcctgatcttcctgaagatctctaccatttaattaagaaacgcagttgctgttcgaaagcatcttgagaggaacacgaaaggataaggatgctaaattcccgtctgattctaatagagaagccggattcacccgttttggctccgatattataaagaccaagcggagtcctccctccccaattgggaaatatgaaatcatctaacagcctctgccctgggtcgcataaatttggtctggtgtactccaagcaaataaaatgattgtttaactaaaagnnnnnnnnnnnnggaacggggggggccgttttaaagaacccttcggggggccaaacttaaccggggattggaaggaaatagttttttccttatggggggcggaattaaaacctacctgggaatttttggaaagaacctttacttttggggggggacataatgggacaacctccctacaaaaatttaaggctttaggggaaaaataaaattttaaagggtatagggggtaaaactacct

SEQ ID NO: 151895 - DNA, 639 bp, Homo sapiens; identical to SEQ ID NO: 133780

SEQ ID NO: 151896 - DNA, 944 bp, Homo sapiens
gtgcaaaggatggttgcacattgtggagcaggggcatgacattcgaggccgttcaattaagataacactgccaccttgaaaatgtctttcagccaacgttttccctgggggctttgaaatacaaccaacagtggtctaaggattgaagtgtgtttcagggccgtgccatattagtggacagcacttagtagctgtgaggaagatgcggagtcagaagatgaagaggaggagaatgtgaaactcttaagtatatctgaaaggcggtctgcccctggggtggttagcatggttccacagaaaaaagttaaaacttgctgctgatgaagatgatgacgatgatgatgaagaggatgatgatgaagatgatgatgatgatgattttgatgatgaggaagctgaagaaaaagcgccagtgaagaaatctatacgagatactccagccaaaaatgcacaaaagtcaaatcagaatggaaaagactcaaaaccatcatcaacaccaagatcaaaaggacaagaatccttcaagaaacaggaaaaaactcctaaaacaccaaaaggacctagttctgtagaagacattaaagcaaaaatgcaagcaagtatagaaaaagcgcattgaacagtcctgggcactacatgtaaattaagcccaaagatggggagaaaggaaaaggagagacaaatatagtccatactgagtgtcatcaacaatccagactgaagtcttctattttaatctcaatccccttttctgatttgccacccatgcctcttcaggctggaaacaatctcttggttccctaaagcactttcttctgactgctgtgattcagtgaaccttgccctttgctttctattacttgtgcatttgcctcacctgacaatgttttaaatcgcctttgtatctccttagctgctcaataaatatttgaatgcatcaaaaa

SEQ ID NO: 151897 - DNA, 1692 bp, Homo sapiens; identical to SEQ ID NO: 133781

SEQ ID NO: 151898 - DNA, 2584 bp, Homo sapiens; identical to SEQ ID NO: 133783

SEQ ID NO: 151899 - DNA, 1376 bp, Homo sapiens
tccgtcctgcgcggttgttctctggagcagcgttcttttatatacggccgccttctctcctacctaagtgcgtgccgccacccgatggaagattcgatggacatggacatgagccccctgaggccccagaactatcttttcggttgtgaactaaaggccgacaaagattatcactttaaggtggataatgatgaaaatgagcaccagttatctttaagaacggtcagtttaggggctggtgcaaaggatgagttgcacattgttgaagcagaggcaatgaattaccgaaggcaagtccaattaaacgtaacacttggcaactttgaaaatgtcctgtacagccaacggtttcccttggggggcttttgaaataacaccaccagtggtcttaaggttgaagtgtggttcagggccagtgcatattaagtggacaagcacttatgtagctgtggaaggaaagatgcagaagtccagaagattgaagaaggaaggaaggattgtgaaactccttaaagtatatcttggaaagccggtctgccccttggaaggttggtagcaaggtttccacagaaaaaaaagtaaaaactttgcttgcttgatggaaagatgatgaccgaatgaatgatgaagaaggatgatgattgaagatgatgatgatgatgattttgatgatgaggaagctgaagaaaaagcgccaagtgaagaaatctataccgagatactccagcccaaaaatgcagcgaaagtcaaaatcagaatgggaaaagactccaaaaaccatcattcacacccaagaatcaaaaaggacaagaatccttccaagaaaccaggaaaaaactccttaaaacaccaaaagggacctaagttctgtagaagacattaaagcaaaaatgcaagcaagtatagaaaaaggtggttctcttcccaaagtggaagccaaattcatcaattatgtgaagaatttgctcccggatgactgaccaagaggctattcaagatctctggcagtggaggaagtctctttaagaaaatagtgtagacaatttggtaagagaatttaccgtcttatttcatttctgtaacagttgatatctggctgtccttttttataatgcagagtgagaactttccctacccggggtttgataaatgtttgtccaggttctatttgccaaggaattgtgttgtcccaaaatgcctgtttaagtttttaaagatggaacttcacccctttgcttggttttaagtatgtatggaatgttatgataggacatagtagtagcggtggtcagacatgggaaatggtgtgggagacaaaaatatacatgtgaaataaaactcagtattttaataaagtaaaaaaaaaaaaaaaaaaa

SEQ ID NO: 151900 - DNA, 691 bp, Homo sapiens
  misc_feature (1)...(691): n = a,t,c or g
actcttctggtcccacaagactcagagagaacccacccatggttgctgtctcctgcccgacaaagaccaacgtcaaggccggcttggggtaaggtcggcgcgcacgctgtgcgcagtatgtgtgcggaggccctggagaggatgttcctgtccttccccaccaaccaagacctacttcccgcacttcgaccttgagccacggtttctgcccaggtttaagggccacggcaagaaggtggccgacgcgctgaccaacgccgtggcgcacgtgggacgacatgcccaaacgcgctgttccgcccttgagcgacctgcacgcgcacaagttttcgggtgggacccggttcaactttcaagctccttaagccacttgccttgcttgggtgaaccctgggccggcccacttccccgtccgagtttcaacccctggcggttgcaaggcttccttggggacaaagtttcctggggtttttgttgaagcaaccttgttgaactttcaaattacctttaaagttgggagccttcggtgggccattgtttttttgcccctttgggcctcccccncagcccctcctcccctttcctgcacccgtacccccgtggtcttttgaataaaattttgaattgggggggcaaaaaaaaaaaaaaaaaaaagatctttnaatttaagggggcggaaagtttatttcaa

SEQ ID NO: 151901 - DNA, 1800 bp, Homo sapiens; identical to SEQ ID NO: 125769

SEQ ID NO: 151902 - DNA, 1641 bp, Homo sapiens; identical to SEQ ID NO: 125770

SEQ ID NO: 151903 - DNA, 369 bp, Homo sapiens; identical to SEQ ID NO: 146268

SEQ ID NO: 151904 - DNA, 351 bp, Homo sapiens; identical to SEQ ID NO: 146269
  misc_feature (1)...(351): n = a,t,c or g

SEQ ID NO: 151905 - DNA, 391 bp, Homo sapiens; identical to SEQ ID NO: 146270

SEQ ID NO: 151906 - DNA, 2134 bp, Homo sapiens; identical to SEQ ID NO: 146271
  misc_feature (1)...(2134): n = a,t,c or g

SEQ ID NO: 151907 - DNA, 505 bp, Homo sapiens; identical to SEQ ID NO: 146276

SEQ ID NO: 151908 - DNA, 890 bp, Homo sapiens; identical to SEQ ID NO: 146277

SEQ ID NO: 151909 - DNA, 3073 bp, Homo sapiens; identical to SEQ ID NO: 146278

SEQ ID NO: 151910 - DNA, 467 bp, Homo sapiens; identical to SEQ ID NO: 146279
  misc_feature (1)...(467): n = a,t,c or g

SEQ ID NO: 151911 - DNA, 459 bp, Homo sapiens; identical to SEQ ID NO: 146280

SEQ ID NO: 151912 - DNA, 727 bp, Homo sapiens; identical to SEQ ID NO: 146281

SEQ ID NO: 151913 - DNA, 716 bp, Homo sapiens
ggcgccgcgcgtgtgaggttgtctagtccacgctcggatgccatgccgtccaaagggtcccgctgcagtcggtgcagggtcttcgggacgcaagaaagacagcggacagctgttggcgcactagcaaacgcgcccaatggtctcatccaaggttgaacgggcgggcccctggagatgattgaagcccgcgcacgcctacagtacaaagctgctggagcccagttctgcttctcggcaaggcagcgatttgctgggtgtagacatcccgtgtcccgtgtaaaagggtgggtggtccacgtggccccagatttatgctatccgtcagtcccatctcccaaaagcccctggtggcctattacccagaaatgtgagtgagcatgggtccttcccatgagatgtggatgaggctttccaaagaagggagatcaaagacatccttcatcccagttatggaccggaaccctgctgggttagctggacccttcgttcgctgtgagttccaaaaagttttggaggtcctggtgccccgcgctcgctaccagaaatcctaccgataagcccatcgtgacttcaaaacttcacttgtataattaaacagttttctgagggattttaaagtttcaagaactgtgtgtggccttatgtgttggtattggatgtttaaccagacagaaatcagtaaacatcctggacctataaaaaaaaaaaaaaaaaaa

SEQ ID NO: 151914 - DNA, 582 bp, Homo sapiens; identical to SEQ ID NO: 146258
  misc_feature (1)...(582): n = a,t,c or g

SEQ ID NO: 151915 - DNA, 764 bp, Homo sapiens; identical to SEQ ID NO: 146259
  misc_feature (1)...(764): n = a,t,c or g

SEQ ID NO: 151916 - DNA, 1209 bp, Homo sapiens
cttctctcgccaggcgtcctcgtggaagtgacatcgtctttaaaccccctcgtggcaatccctgacgcaccgccgtgatgcccagggaagacagggcgacctggaagtccaactacttccttaagatcatccaactattggatgattatccgaaatgtttcattgtgggagcagacaatgtgggctccaagcagatgcagcagatccgaattgttccctggggggaagcttgtgttttgatggggcaaaaaaccatgaatgggccaggcccatccgagggccacctggaaaacaacccagcctctgaagaattgcttcctcattaaccgggggcatttgggcttttgtttcacccagggaggaccctcactgagatcaagggacatgttgctggcccaataaggttgccaggctgctgcccgttgttggtgccaattgcccccatgtgaagtcactgtgccagccccagaacactggtctcggggcccgagaagacttctttttttccagggctttaggtatcacccactaaaaatctcccagggggcacccattgaaaatcctgaagttatgtgcagcttaatcaagacttggagacaaaatgggaagccaaacgaaagccaaggctgctgaaaaaatgctcaaaaatctccccccttctccctttggggctggtcaacccaagcaaggtgttccgaaaaaatggcaagcatcctacaaaccctgaaagtgcttgaatatccacaagaggaaaactctgccattctcgctttcctgggagggtgtcccgcaaatgttgccaagtgtctgtcctgcaagattggctaccccaactgttgcatcaagtacccccattcctatcatcaaacgggtacaaacgagtccctggcccttgtctgtggacgccggattacaccttccccacttgctgaaaaggtcaaggcttttcttggctgatccatcctgcctttgtgtgctgctgccgcctgtgggttgctgccaccacagcttgcttcgctctgctgctgcagcccccagctaaggttgaagccaaggaagagtcggaggagtcggacgaggatatgggatttggttctctttgactaatcaccaaaaaagcaaccaactttagccaagttttaatttgcaaaaacaagggaaataaaggcttatctctctttaaaaaaaaaaaaaaaaagggcggccgct

SEQ ID NO: 151917 - DNA, 506 bp, Homo sapiens; identical to SEQ ID NO: 146317
  misc_feature (1)...(506): n = a,t,c or g

SEQ ID NO: 151918 - DNA, 1297 bp, Homo sapiens; identical to SEQ ID NO: 146318

SEQ ID NO: 151919 - DNA, 2293 bp, Homo sapiens
agcagtcattatggcgaaccttggctgctggatgctggttctctttgtggccacatggagtgacctgggcctctgcaagaagcgcccgaagcctggaggatggaacactgggggcagccgatacccggggcagggcagccctggaggcaaccgctacccacctcagggcggtggtggctgggggcagcctcatggtggtggctgggggcagcctcatggtggtggctgggggcagccccatggtggtggctggggtcaaggaggtggcacccacagtcagtggaacaagccgagtaagccaaaaaccaacatgaagcacatggctggtgctgcagcagctggggcagtggtggggggccttggcggctacatgctgggaagtgccatgagcaggcccatcatacatttcggcagtgactatgaggaccgctactatcgtgaaaacatgcaccgttaccccaaccaagtgtactacaggcccatggatgagtacagcaaccagaacaactttgtgcacgactgcgtcaatatcacaatcaagcagcacacggtcaccacaaccaccaagggggagaacttcaccgagaccgacgttaagatgatggagcgcgtggttgagcagatgtgtatcacccagtacgagagggaatctcaggcctattaccagagaggatcgagcatggtcctcttctcctctccacctgtgatcctcctgatctctttcctcatcttcctgatagtgggatgaggaaggtcttcctgttttcaccatctttctaatctttttccagcttgagggaggcggtatccacctgcagcccttttagtggtggtgtctcactctttcttctctctttgtcccggataggctaatcaatacccttggcactgatgggcactggaaaacatagagtagacctgagatgctggtcaagccccctttgattgagttcatcatgagccgttgctaatgccaggccagtaaaagtataacagcaaataaccattggttgtctgaaatacctttgcctggatacctctggctccttcagcagctagagctcagtatactaatgccctatcttagtagagatttcatagctatttagagatattttccattttaagaaaacccgacaacatttctgccaggtttgttaggaggccacatgatacttattcaaaaaaatcctagagattcttagctcttgggatgcaggctcagccgctggagcatgagctctgtgtgtaccgagaactggggtgatgttttacttttcacagtatgggctacacagcagctgttcaacaagagtaaatattgtcacaacactgaacctctggctagaggacatattcacagtgaacataactgtaacatatatgaaaggcttctgggacttgaaatcaaatgtttgggaatggtgcccttggaggcaacctcccattttagatgtttaaaggaccctatatgtggcattcctttctttaaactataggtaattaaggcagctgaaaagtaaattgccttctagacactgaaggcaaatctcctttgtccatttacctggaaaccagaatgattttgacatacaggagagctgcagttgtgaaagcaccatcatcatagaggatgatgtaattaaaaaatggtcagtgtgcaaagaaaagaactgcttgcatttctttatttctgtctcataattgtcaaaaaccagaattaggtcaagttcatagtttctgtaattggcttttgaatcaaagaatagggagacaatctaaaaaatatcttaggttggagatgacagaaatatgattgatttgaagtggaaaaagaaattctgttaatgttaattaaagtaaaattattccctgaattgtttgatattgtcacctagcagatatgtattacttttctgcaatgttattattggcttgcactttgtgagtattctatgtaaaaatatatatgtatataaaatatatattgcataggacagacttaggagttttgtttagagcagttaacatctgaagtgtctaatgcattaacttttgtaaggtactgaatacttaatatgtgggaaacccttttgcgtggtccttaggcttacaatgtgcactgaatcgtttcatgtaagaatccaaagtggacaccattaacaggtctttgaaatatgcatgtactttatattttctatatttgtaactttgcatgttcttgttttgttatataaaaaaattgtaaatgtttaatatctgactgaaattaaacgagcgaagatgagcacca

SEQ ID NO: 151920 - DNA, 2703 bp, Homo sapiens
ccgcccgcgagcgccgccgcttcccttccccgccccgcgtccctccccctcggccccgcgcgtcgcctgtcctccgagccagtcgctgacagccgcggcgccgcgagcttctcctctcctcacgaccgaggcaggactcctgaatatttttcaaaactgaacaatttcagccatgtctgagctttccgtcttcctggaggcacaaatctagtttagctgaaccacaacagattagcagtcattatggcgaaccttggctgctggatgctggttctctttgtggccacatggagtgacctgggcctctgcaagaagcgcccgaagcctggaggatggaacactgggggcagccgatacccggggcagggcagccctggaggcaaccgctacccacctcagggcggtggtggctgggggcagcctcatggtggtggctgggggcagcctcatggtggtggctgggggcagccccatggtggtggctggggacagcctcatggtgggggctggggtcaaggaggaggcacccacagtcagtggaacaagccgagtaagccaaaaaccaacatgaagcacatggctggtgctgcaacagctggggcagtgtaggggggcctttgcagctactcgcctgggaagtgccatgagcaggcccatcatacatttcggcagtgactatgaggaccgttactatcgtgaaaaacatgcaccgttaccccaaccaagtgtactacaggcccatggatgagtacagcaaccagaacaactttgtgcacgactgcgtcaatatcacaatcaagcagcacacggtcaccacaaccaccaagggggagaacttcaccgagaccgacgttaagatgatggagcgcgtggttgagcagatgtgtatcacccagtacgagagggaatctcaggcctattaccagagaggatcgagcatgggcctcttctcctctccacctgtgatcctcctgatctctttcctcatcttcctgatagtgggatgaggaaggtcttcctgttttcaccatctttctaatctttttccagcttgagggaggcggtatccacctgcagcccttttagtgggtggtgtcctcaatccttcctctctccttttggtccccgggataggctaatcaataccctgggcactgatggggcactgggaaaaacataggagtaggacctgagatgctgggtcaagccccccttggattggagttcatcatgagccgttgctaatgccaggccagtaaaagttataacggcaaatacccattggttaatctggacttatttttggacttagtgcaacaggttgaaggctaaaaacaattctcggaacagtctgaaatacctttgcctgggatacctctgtgttcttttagcagttagaggtcaagtatacttatcgccctatcttaagtaagagatttcatagctatttagaagatattttcccatttttaaggaaaaccccgacaacatttctggcgggtgtgttttgggggcccactggatctctacccaaaaaatccctagagattcttagctcttggggatgcaggctcagcaccgctggagcatgagctctgtgtgtaccgagaactggggtgatgttttacttttcacagtatgggctacacagcagctgttcaacaagagtaaatattgtcacaacactgaacctctggctagaggacatattcacagatagaacataactgtaacatatatgaaaggcttctgggacttgaaatcaaatgtttgggaatggtgccccttggaggccaacctccccattttagatgtttaaaggacccctatatgtggcattcctttcctttaaactatagatgatgtaaagcagtgaaaaagtaattgccttctagccactgagggcaaatctcctttgtccctttacctggaaaacagaatgaattttgacatacaggagagctgcagttgtgaaagcaccatcatcatagaggatgatgtaattaaaaaatggtcaggtgtgcaaagaaaagaactgcttgcgatttctttatttctgtctcaataattgtcaaaaacccagattagggccaaggtcatggttctggtaattcggctcttgaatcaaaagaatagggagaccaatcttaaaaattatcctaaggttggagatgacagcaattatgattgatttgaagtggaaaaagtaaattccgttaatgcttaattaaagtaaaattattcccctgaattgtttgatattgctcacctagccagatatgtattacttttctggcaatgttattattggccttgcactttgtgaagtattctatgtaaaaatatatatgtatagtaaaatatatattgcataggacagacttagggagttttgtttagaccagttaccatctaaagtggtcaaaacccctaaccttttgtaaggtactgaatacttaatatgtgggaaaccctttttgcgtggtccttaggcttacaatgttgcactgaatcgttttcatggtaagaatccaaagtggacaccattaacagggtctttgaaaatatgcatgtactttatattttctatatttgtaactttgcatgttcttggttttgttatataaaaaaaattgtaaatggttaatatctggactgaaattaaacgagcgaagatggagcaccaaaaaaaaaaaaaaaaaa

SEQ ID NO: 151921 - DNA, 637 bp, Homo sapiens; identical to SEQ ID NO: 144817
  misc_feature (1)...(637): n = a,t,c or g

SEQ ID NO: 151922 - DNA, 724 bp, Homo sapiens; identical to SEQ ID NO: 146325
  misc_feature (1)...(724): n = a,t,c or g

SEQ ID NO: 151923 - DNA, 722 bp, Homo sapiens
gacactcgctttttggaacgtctgaggttatcaataagctccttagtcccagacgcccatgggtcatttcacagaggaggaccaaggctactatcgacaagcctgtggggcaaaggtgaatgtggaaagatgctggaggagaaacccctgggaaggctccctggttgtctaccccatggaccccagaggtttctttgacagctttggcaacctgtcctctgcctctgcccatccatgggcaaaccccaaaagtcaaggccacaagggcaaaaaaggtgctgacttcccttgggaagatgcccataaagcacctgggattgatcttcaagggcaccttttgccccagcttgagttgaacttgcacttgttgacaagcttgcatgtgggatccctgaggaactttcaagcttcctggggaaatgttgctggtgacccgtttttgggcaatcccattttcggcaaaagaatttcacccctgaaggtgccaggtttttcttgggcagaaagatgggtgacttggagttggccaattgcccttgttccttccagataccactgaagcctcttggcccatgaattcagaagctttcaaggataaggcttttattcttgcaagcaattacaaataataaatctatttctgctaagagatcacacatgattttcttcagctcttttttttacatctttttaaatatatgagccacaaagggtttatattg

SEQ ID NO: 151924 - DNA, 508 bp, Homo sapiens; identical to SEQ ID NO: 144786

SEQ ID NO: 151925 - DNA, 1029 bp, Homo sapiens
ggaattcgggacaccgggtgtagagggcggtcgcggcgggcagtggcggcagaatgttgactaccagtgtatttagcctagttggcaagcgagcaatttccacctctgtgtgtgtacgagctcatgaaagtgttgtgaagagcgaagacttttcgctcccagcttatatggatcggcgtgaccaccccttgccggaggtggcccatgtcaagcacctgtctgccagccagaaggcactgaaggagaaggagaaggcctcctggagcagcctctccatggatgagaaagtcgagtgtgggtattgaagggacccacaggcgcgcccagcagctctcggaagcgtgtgtgtgacagagcctctgctcacttctgggcctactgtctagagagcagtcttgcacaggagggttgctctgctgggtttcggggtcactgtgccagtgccccagtttatgtgctcaccagtcacttagctctgccagctgacaggatcttttgctgggcccccttccctgtgctgagtggaggtagcctctcagcatatctgctgggtaagacatagttaactgtaaattattgaaagaaactcagcaaaatgcatagtgtttggtatgaaaggggcagaaaaataacaagattaaatagaccctaatactgtaattcaagtaagaaataattttgcagttttaatttgcacctgaagcgaactgtatgcattttcttccttccttgccctgtcacatgcctgcgtgggcacgtgtgtgcacgtatgtgcgtgaacatgatgtggcctggcttggtgtatccttcagctctgtgtttcctccttcacaagtgtggttttggggagaagtggttgaatgttgcagaggagggagctgctgacctttgtgcctgtaaatggctgtcctctctgcccccagtgtatcgcattaaagttcaaggagagctttgcttgaggatgaacagggggcttcgaacgagtgggaagacggttgtggggcggtgcattgtttcttcatcggtttc

SEQ ID NO: 151926 - DNA, 895 bp, Homo sapiens
cgacgttcgcagcgctacccttttccgctccacggtgacctccgtgcggccgggtgcgggcggagtcttcctcgatcccgtggtgctccgcggcgcggccttgctctcttccggtcgcgggacaccgggtgtagagggcggtcgcggcagggcagtggcgccagaatgttggcttaccaggggtatttagccctagttggcaagcgagcaattttcaacctctgtggtgtgtacgagctcaatgaaagtttttgtgaagagcgaagacttttcgctcccaaccttatatggaatcggcggtgacccacccccttgccggaaggtggccccatgtcaaagcaccctgctctgcccagcccagaaggccactgaaggagaaggagaaagccctcctgggagcagccttttccatgggatgaggaaagttcgagttgttattcgcattaaagttcaaggaagaggctttgcttgaagattgaacaagggggctccgaaccgagttgggaaagaccggtttgtttgggccggtgccattgtttccttcaatcgggttttcaccgcggctcgttattcatgttgggcagaagcactatgttttaacggcccccttccccgcaaagtttttgaacaaagagttgggttggcccaagcaggaccaagaggatgcttggacaatgaaggtgaacccccatccaaggctttagcctccaagttgggactacgaaaagaacgagttggaagaagtgagagatgcttggcctgcgcctgcaacttgcggctggctctttcaccgccatgcaaactccatgcctatttactggaaacctgttatgccaaacacgttgtaccactgctaataaatgagccagtttacctgaaaaaaaaaaaaaaaaaa

SEQ ID NO: 151927 - DNA, 550 bp, Homo sapiens
tccaacagaaagataccaagagcctttactggtaatgagaagaggaaagattttctgtttataataaccagaaagaaatggaattgtctaataaccatcaattgagtatgagcctagttgagttgagtatgagtctagtatgggatgctaatcttctggggtgggggaagtcctgtgagctaaccaaaccctcctggtctctggtgaggtccacaagtaggcactccaggaagaaggggagttcctggcacctgcctgccaaactctgctctacttgctgaactttgctcagcatgaacagggcattctggctacaagttcccccaaactatcccagattgtatctttaaggcacaccaattcctctgcttaaggacttctgttcacaatgaattgtattagttattcttaacattccaaagagaaagttctgcatcagaggccacccctgtccagccattgtgaccctgagatcccgagactgtggggatgagggcagagcattgaacatcagggattctggtcatgggggtcaacttgagcatgattt

SEQ ID NO: 151928 - DNA, 687 bp, Homo sapiens
gaggggtccgaggtggacttcacggcatgcgtgcgctatccacttttttgcccgtccatattcaacggcttctttgaggagttcattttccatcgttttcttgccgagcaggcgctggagttctttaatctgcttcatggcggcagcaagttcagaggcaggaacaacctgttctccggcggcgacagcagtaagacttccttcctggtattgcttacgccagagaaataactggctggctgctacaccatgttgccgggcaacgagggagaccgtcatccccggttcaaagctctgctgaacaattgcgatcttttcctgtgtggtacgccgtctgcgtttctccggccctaagacatcaatcatctgttctccaatgactagtctaaaaacttcggacatggtgccatctttgttttcctctccaggtgatcgtgttgccatcgaatctggtgctccccgagaaaatgatgaattctgcaagatgggccgatacaatctgtcaccttccatcttcttctgtgccacaccccccgatgatgggaacctctgccggttccctgaaattgtgaagttgagtctggaggaagcaaagtgcctccctttctgcgtggccccccatggccccagccgtggagctctagggtgccgaagtgccgctttccccctgacccaacccagatgcat

SEQ ID NO: 151929 - DNA, 3063 bp, Homo sapiens
atgtccaaacctaagtgtctcgtaattcttgtaggaattcagaagtcatcccagatgcctcaattcccacctcctgcgggatctgaaagaaggagagggattaggcaatgggaaatgggtgtagttggaggtgaaatgggggtgtggtggccaccaggtgtgcagggcagccctccacaggcccacaggaggcttggcagcagggagcagctctttgcaccacccctgaaggagaaaagtcatattccaccttggggctacagtagggagaactatcctatccctgaaccaggcccaaatggaaggccagtcaccgaagtgtggggcagcccaggacctactgtccagtgggggtgggaggggctgcatgaggccctgtcccctgccctaatcaaccaagcacagaaagaccctgaagtgaggctgggggcaatggtcagagtgtctgtagatactcaccctccccctctcacacctagacagtcaggtcccctttctgcccttgaggagttgggggtgtcctttcccactttgtcctacctcacaccagaaccgcagcttctgggtgaacatcagatcaaaggcagctttcctggtagatccacagctttgctactgaaagaggtcttgctgaggatgcattctgttggaatctgtggctcagatgtccacctactgggagtatttgtcgaatttgggaattttattgtgaaaaagcccatggtgctgggacatgaagcttcgggaacagtccgaaaaagtgggatcatcggtaaaagcaccctaaaaccagggtgatcgtgttgccatcgagcctgggtgctcccccgaggaaaattgatggaattcttgccaagatgggcccgatacaatctgtcaccttccatcttcttctgtgccacgccccccgatgacgggaacctctgccggttctataagcacaatgcagccttttgttacaagcttcctgacaatgtcacctttgaggaaggcgccctgatcgagccactttctgtggggatccatgcctgcaggagaggcggagttaccctggggacacaaggtccttgtgtgtgggagctgggccaatcggggatgggtcactttgctcgtggccaaagcaatgggagcagctcaagtagtggtgactgatctgtctgctacccgattgtccaaagccaaggagattggggctgatttagtcctccagatctccaaggagagccctcaggaaatcgccaggaaagtagaaggtctgctggggtgcaagccggaagtcaccatcgagtgcacgggggcagaggcctccatccaggcgggcatctacgccactcgctctggtgggaccctcgtgcttgtggggctgggctctgagatgaccaccgtacccctactgcaatgcagccatccgggaggtggatatcaagggcgtgtttcgatactgcaacacgtgggccagtggcgatttcgatgcttgcgtccaagtctgtggaatgtcaaaacccctcgtcacccatagggtttcctcttggagaaaagttttggaggcctttgaaacatttaaaaagggattggggttgaaaatcatgctcaagtgtgaccccagtgaccagaatctctgatgttaatgggctctgccttcaatccccacaggtcctgggatctcaggggcacaatgggctggacatgggttggggctctgatgcagaactttctcttttgaaatgttaaggaataacctaatacaaattccattgtgaaacaagaaagtccctaccgcagagggaattgggtgtgcccttaaaagataccaatctggggatagtttgggggaacttggtaagcccaggaatgcccctgttccatgcctgagcagaagttccagcaaagtagagcagagtttgggcgaggcaggtcccccaggaacgcccgttcgtgtcctggagtgccttcattgaggaaggaaatcctggcccttgggtttccctggtgccactgcgtactgaaccagaggggaatgagggctgagttatgaagagataacttcatgaagacttaagctggcccagaggctgatgttcatgaaaatgtgccactcagggtgcgtgggatgaaggcttgtcagcacttccaggtttagaacggcaatgtttctagagacatattggccgtttgttttgatgataaaaggggaataggaaaaggcatcactttcctggatccaggataatttttaaaccaatcaaatgaaaaaaacaagcaaacaaaaaagggaaatgtcatgtgagggtaaaccagtttgcattcccccaatgtgggaaaagtaagaggactactcagcacctgtttgaagattgcctcttctccagctcttgagaattgtgttatttcacttgccaaaataagcccctccccccccaacaatgccccagccccaccccctaaagcatggtcccttgtcacccaggcaaccaaggaaactgctacttgtggacctcaccagagaaccagaagggtttggttagctcacaggacttccccccacccccagaaagattagcatccccatacctagacctcatacctcaacctcaacctaggctccatacctcaattggatgggttattaggaccaattcccatttctttctggttaattataaaacagaaaatctttccctcttctccattacccagtaaaggccccttggtatcctttcctgttggaatgatttcctatgaaccttggtcttaatttttaaatggtggggttttttttcctggtaaagatttggaccctaaatcggcatcatgcccaacttgtgacttttgagaactattcatcaagaatgaggatatagtagccatgacatagcttgagctatagcctttaattcccttccttgggctatgggtggaagggtgagtttgaagaggttctgattttcttgtaacctgggaaagccatgaccttgtgcccggtctctttcgagattgctttgggtaatagatattggtggtggtatctgaaaaaaaaaatagtaaaaaaaaaaagtcgacggc

SEQ ID NO: 151930 - DNA, 807 bp, Homo sapiens; identical to SEQ ID NO: 146333

SEQ ID NO: 151931 - DNA, 1435 bp, Homo sapiens; identical to SEQ ID NO: 146334

SEQ ID NO: 151932 - DNA, 637 bp, Homo sapiens; identical to SEQ ID NO: 144817
  misc_feature (1)...(637): n = a,t,c or g

SEQ ID NO: 151933 - DNA, 718 bp, Homo sapiens; identical to SEQ ID NO: 146340
  misc_feature (1)...(718): n = a,t,c or g

SEQ ID NO: 151934 - DNA, 402 bp, Homo sapiens
agagacagaggcacctccggacagagacgtgaagcactgaataaatagatcagaatgactgaaaaagccccagagccacatgtggaggaggatgacgatgatgagctggacagcaagctcaattataagcctccaccacagaagtccctgaaagagctgcaggaaatggacaaagatgatgagagtctaattaagtacaagaaaacgctgctgggagatggtcctgtggtgacaggtatgtgtgtacagagaacagggtgggtggaagatcgctgagagggaagaagacattttggctgctcaggagcagcagcaaagggaagaggaccaactgcttccaggaaaaagtgagcgaggcacaatttatatatgctgattaaagttatgaactgtataattaaa

SEQ ID NO: 151935 - DNA, 1317 bp, Homo sapiens
  misc_feature (1)...(1317): n = a,t,c or g
ccgtaatttccgggtcgacgatttcgtcagaggcaccccggacagagacgtgaagcactgaataaatagatcatttttgattgtttaaagccccagaaccacatgtggaggaggatgactgatgatgagctggacagcaagctcaattataagcctccaccacagaagtccctgaaagagctgcaggaaatggacaaagatgatgagagtctaattaagtacaagaaaaccgctgctgggagatggtcctgtggtgacagatcccgaaagcccccaatgtccgttgtcacccggctcaccctgggtttgtgagagtgccccggggaccaatcaccatggaccttacttggaagatctggaaagccctcaaaaaaggaaaccatttggtgttaaaaggaaggttctggaatattaggagttcaaaatttcactttccaaagttgaacaggggataattgttgttcagggcctgaaattacgttcagcacacctacaggactgggggtgaaagtggataaagcaacattttatggtttggcagctatggacctcggcctgaggagtatgagtttcctcacttccagttgaggaggcttcccaaagggcatggctggcccgaaggcacgttaccacaaaaagtccttttttcaccgacgatgacaagcaagaccacctcagctggggagtggaacctgttcgattaagaaggagtggacagaatgaattgcatccacccctttccccaccctttgccacctgggaaggaatttttttcagggcgtgtttcagcaccctgttccctcctccctgttccacagctggggttccctctttcaacatttgccacatttcccttaattggatgcattcttttccccaccctgtcacttcaacgtgggtccccctagaacaagaggcttaaaaccggggctttcacccgaacctgctcccctctgatccctccatcagggcccagatcttcccacgtctcccatcctcagtacacaatcatttaatatttcccctgtcttaccccctattcaaggcaactaggagggccaggaaaatggggcaaattattcactaacagggtctttggactcagggttccagtaggtttcattctaatgcctaggattcttttgtggttgttgctgggcccaatgagtccctagtcacatcccctgccagaggggagtttttcttttgctcacaccccctgtaaacgatcaaaaagaacaagaataaaacaataactgtgaanaataatagagggggtcgtttctctctgtttatcgaatgcttatccgatccgcc

SEQ ID NO: 151936 - DNA, 444 bp, Homo sapiens; identical to SEQ ID NO: 146343

SEQ ID NO: 151937 - DNA, 374 bp, Homo sapiens; identical to SEQ ID NO: 146344

SEQ ID NO: 151938 - DNA, 916 bp, Homo sapiens; identical to SEQ ID NO: 146345
  misc_feature (1)...(916): n = a,t,c or g

SEQ ID NO: 151939 - DNA, 2756 bp, Homo sapiens; identical to SEQ ID NO: 146346

SEQ ID NO: 151940 - DNA, 600 bp, Homo sapiens; identical to SEQ ID NO: 133875
  misc_feature (1)...(600): n = a,t,c or g

SEQ ID NO: 151941 - DNA, 973 bp, Homo sapiens; identical to SEQ ID NO: 146348
  misc_feature (1)...(973): n = a,t,c or g

SEQ ID NO: 151942 - DNA, 2048 bp, Homo sapiens; identical to SEQ ID NO: 146349
  misc_feature (1)...(2048): n = a,t,c or g

SEQ ID NO: 151943 - DNA, 486 bp, Homo sapiens; identical to SEQ ID NO: 146350
  misc_feature (1)...(486): n = a,t,c or g

SEQ ID NO: 151944 - DNA, 875 bp, Homo sapiens; identical to SEQ ID NO: 146351

SEQ ID NO: 151945 - DNA, 2202 bp, Homo sapiens
atggcacagttttccattgtggggatgtgccttggtttatttaaccagtctcctacagatggaagtggtgtccaactttttgttattatgaatcaggtcatggcagctaaccttgctgaaacccatgcagctctctgccccaccctgtcctctggaacctctgcgagatttagaggaaagaaccagttttcaggcggattgcctcagatcacactatctccacttgcccagccctgtggaagattagcggccatgtattccaatgtgataggaactgtaacctctggaaaaagcctgccttccacatctcccttggtgccgctgcttctctccggctttgcacctctgttcttgaaagggctgcagaactggactcagaccacgcaagaaggcaagtccccctcagctgccccagcttccagccagccccaggcttgcccaacggaccacgtccgtgaatctgcactgggtgcctgtctttctctcccaggagaagatgggaagatccagaaggtttatcttttgtccttgctgctcattggcttctgggactgcgtgacctgtcacgggagccctgtggacatctgcacagccaagccgcgggacattcccatgaatcccatgtgcatttaccgctccccggagaagaaggcaactgaggatgagggctcagaacagaagatcccggaggccaccaaccggcgtgtctgggaactgtccaaggccaattcccgctttgctaccactttctatcagcacctggcagattccaagaatgacaatgataacattttcctgtcacccctgagtatctccacggcttttgctatgaccaagctgggtgcctgtaatgacaccctccagcaactgatggaggtatttaagtttgacaccatatctgagaaaacatctgatcagatccacttcttctttgccaaactgaactgccgactctatcgaaaagccaacaaatcctccaagttagtatcagccaatcgcctttttggagacaaatcccttaccttcaatgagacctaccaggacatcagtgagttggtatatggagccaagctccagcccctggacttcaaggaaaatgcagagcaatccagagcggccatcaacaaatgggtgtccaataagaccgaaggccgaatcaccgatgtcattccctcggaagccatcaatgagctcactgttctggtgctggttaacaccatttacttcaaggtactcagaatggccctggagagaccccagggacttcctcttgctcttcagcttaccccctttttttttaaatggcgagaccgaagccctgagagggcaaatggactgccgaaagctacacagggcctgtggaagtcaaagttcagccctgagaacacaaggaaggaactgttctacaaggctgatggagagtcgtgttcagcatctatgatgtaccaggaaggcaagttccgttatcggcgcgtggctgaaggcacccaggtgcttgagttgcccttcaaaggtgatgacatcaccatggtcctcatcttgcccaagcctgagaagagcctggccaaggtagagaaggaactcaccccagaggtgctgcaagagtggctggatgaattggaggagatgatgctggtggtccacatgccccgcttccgcattgaggacggcttcagtttgaaggagcagctgcaagacatgggccttgtcgatctgttcagccctgaaaagtccaaactcccaggtattgttgcagaaggccgagatgacctctatgtctcagatgcattccataaggcatttcttgaggtaaatgaagaaggcagtgaagcagctgcaagtaccgctgttgtgattgctggccgttcgctaaaccccaacagggtgactttcaaggccaacaggcctttcctggtttttataagagaagttcctctgaacactattatcttcatgggcagagtagccaacccttgtgttaacctttcagaggccttagctgtcctcgtagtaaatctgactaccttgatgaagagaacacatggagagtccttagacttcatggagagaaagaggagacctgctgagtccatccttctagtctccccaccaaagtgtcagagaactaaaacagggcaaggacttacagtaagaatgaatattgatagatttgaagaacttgctggttatgggggtgattaa

SEQ ID NO: 151946 - DNA, 1712 bp, Homo sapiens
acgcctgaccagctctctgccccaccctgtcctctggaacctctgcgagatttagaggaaagaaccagttttcaggcggattgcctcagatcacactatctccacttgcccagccctgtggaagattagcggccatgtattccaatgtgataggaactgtaacctctggaaaaaggaaggtttatcttttgtccttgctgctcgatagcttcggggactgcgtgacctgtcacggcgagccctgtggacatctgcacagccaagccgcgggacattcccatgaatcccatgtggcatttaccgctccccggagaagaaggcaactgaggatgagggctcagtaacagaagatcccggaggccaccaacaaccgggcgtgtctggggaactgtccaaggccaatttcccgcttttgcttaccactttcttattcagcacctgggcagaattccaaggattgacattgattaacatttttctgttcacccctgagtattttccaagggtttttgctatggaccaaggtttggtgcctgtaatgacacccttcagcaactgatggaggtatttaagttttgacaccatatctggagaaaacattctgatcaagatcccacttcttctttgccacaactgaactggccgactctaatcgaaaagccaacaaatcctccaagttagtatcagccaatcgcctttttggagacaaatcccttaccttcaatgagacctaccagggacatcagtgagttggtatatggagccaagctcaggcccctgggacttcaagggaaaatgcagagcaattccagaggcggccatcaacaaatggggtgtccaataagaccgaaggccgaattcaccgatgttcatttccctcgggaaggccattcaatgagctcactgttctgggtggtgggtttaacaccatttactttcaaggggcctgttggaaggtcaaagttcagccctgagaacacaaggaaggaactgttctacaaggctgatgggagagtcgtgtttcagcatctatggatgttaccagggaaggcaagttccgttattcgggcgcgtggcttgaaggcacccggtgcttgtagtttgccctttcaaaggtgatgacatcacccatggtcctcatcttgcccaagccctgagaaggagcctgggccaaggtggagaagggaactcaccccagaggtgcttgccaagagtggctgggattgattttggagggagatgatgctggtggtccacatgccccgctttccgcatttgaggacggccttcaagtttgaagggagcagctggcaaagacatgggcccttgtcggatctgttcagcccctgaaaaagtcccaaactcccccaggtattgttgcagaaggccgagatgacctctatgtctcagatgcattcccataaggcatttcttgaggtaaatgaagaaggcagtgaagcagctgcaagtaccgcgtgttgtgattgctggccgttcgctaaaccccaacagggtgacttttcaaggccaacagctttttcctgggtttttattaagagaagttcctcttgaacactatttatcttcatggggcagagttagccaacccttgtgtttaagttaaaatgttcttattcttttgcacctcttcctatttttggtttgtgaacaagaagtaaaaataaatacaaactacttccatctcacattaa

SEQ ID NO: 151947 - DNA, 593 bp, Homo sapiens
tgaacttgacacactatgtgacttgtatgaaccctgaccatcacccagcatcatcttcatcaacacccggaggaaggtgactggctcaccgagaagatgcatgctcgagatttcactgtatccgccatgcatggagatatggaccaaaaggaacgagacgtgattatgagggagtttcgttctggctctagcagagttttgattaccactgacctgctgaatcggtcgaggtggacggtttggccgtaaaggtgtggctattaacatggtgacagaagaagacaagaggactcttcgagacattgagaccttctacaacacctccattgaggaaatgcccctcaatgttgctgacctcatctgaggggctgtcctgccacccagccccagccagggctcaatctctgggggctgaggagcagcaggaggggggagggaagggagccaagggatggacatcttgtcattttttttctttgaataaatgtcactttttgaggcaaaagaaggaaccgtgaacattttagacacccttttctttggggtaggctcttgccccaggcgccggctcttctcccaaaaaaaaaaaaaaa

SEQ ID NO: 151948 - DNA, 807 bp, Homo sapiens
gcgtggatctgttttcttggccgcgataaggtctagagacgaacgcgatatagcagttcagtaggctcagcaactcggatatcattccgtgcgggagtaagggcatgatagccagacagaggttgatcctagggattccctttcccgaggacatcagggctttcagtaacgagtgcttggcaaagcatcgggcagcctagggcccctgtggacatgggagggtatttcctctgccttccttggctgcccacatggatgcctaaggtcttcttctccgggatagagtgtcctccgtgcacatgctgaagaggttgtcattcttgacgtaggccagaggcattgatgtgcagcaggtttctttagtcatcaactatgaccttcccaccaacagggaaaactatatccacaggtaagcgtagatctggaacactcccctaccccttcacacctggccctccctgggcttaaagctcctgatattcctcatccccttccttgttttccagaatcggtcgaggtggacggtttggccgtaaaggtgtggctattaacatggtgacagaagaagacaagaggactcttcgagacattgagaccttctacaacacctccattgaggaaatgcccctcaatgttgctgacctcatctgaggggctgtcctgccacccagccccagccagggctcaatctctgggggctgaggagcagcaggaggggggagggaagggagccaagggatggacatcttgtcattttttttctttgaataaatgtcactttttgaggcaaaagaaggaaccgtgaaa

SEQ ID NO: 151949 - DNA, 2277 bp, Homo sapiens
  misc_feature (1)...(2277): n = a,t,c or g
cggttannancctggagtccttgagagcggtcccggnnnncaantnccgggtcgacgatttcgtctgcgagccaggattcccgatccagagacaatggccttgatgggattgagcccgaaggcgtcatcgagagtaactggaatgagattgttgacagctttgatgacatgaacctctcggagtcccttctccgtggcatctacgcctatggttttgagaagccctctgccatccagcagcgagccattctaccttgtatcaagggtgagacctctcagtcccagaagacattgtggactgtccctgacctgggtagagtggcatctggttggtgatgcccatctcatatcagccagggacaaagcaacctccttgttcatcccagcttggcttttgatccgtgcccatgcctggttcatgccttggacacataggtttcctttaaagaggtggtattgtagccagcttatatttgcatctatagccatgtttctagtccagcttggtgtgcaatactagatgagttaataactggtccttgtttctgatctggttcccattgtgtaactgtgttgattgggaaggtagtttgtgagccatgaaatgcttggttcattggttgcttattgacctcattaacctaggacttgaatatcccaaagggtatgctctttaccacattcaactcctaatttatttgtttaggttatgatgtgattgctcaagcccaatctgggactgggaaaacggccacatttgccatatcgattctgcagcagatacaagaaggtggtcatggcactaggaagactacatggggcgcctcctggtcacgcctgtatccggggggcaccaacgtgcgttgctgaggtgcagaaacttgcagatggaagctccccacatccatcgtggggtaccccctggccgtgtgttttgatatgctttaccggaagataccctgtcccccaaatacatccaagatgtttgtactggatgaagctgaacgaaatgtttaagccgtggattcaaaggacagatctatggacatatccaaaaggctcaagcagcaccaccaagggtagttttgctgtcagccacaatgccctttgattgtgcttgaggtgaccaagaagttcatgaggggacccccattccggattcttgtccagaagggagagttgaccccttgagggtatccgccaggttctacatccaacgtggaaccagaggaattgcaacttggacacactatgtgacttgtatgaaaaccttgaccatcaccccaggccagtcatcttccatcaaccacccggagggaaggtggactggcctcacccgagaagaatgcatgctgcagattttcactgtattccgccatgcattggagattttggacccaaaaggaacgtagaacgtgattatgaagggagttttcgttcttggctcttagccagaatttttgatacccaacttgacctgcttggccagagggcattgatgtgccagcaggttttctttagtcattcaaacttatgaccctttcccaccaaccaggggaaaactattaatccacaggaatcgggtcgagggtggaccggtttggccgtaaaggtgtgcctattaacatgttgacagaaagaaaacaaagaggaatctcgaggacattgagaccttttaacaacacctccattgaaggaaatgcccctcaatgttgcttgacctcatctgagggggctgtcctgccaccctagccccagccagggctcaatctctgggggctgaggagcagcagggaggggggagggaagggagccaagggatggacatcttgtcattttttttctttgaataaactgtcactttttgaggcaaaagaaggaaccgtgaacattttagacacccttttctttggggtaggctccttgccccaggcgccggctcttctcccaaaaaaaaaaaaaaaaaaacactaatccatttccctaacctagtaacctccagatcccagaggctctcctcacctcagctgagctcctttgaaagtgattcaagggactatgtcactcagcctcatttgctggaccaaatttggagggagaacccctaaaacccctaagtgaggttgcccagggggttgtccccaggtggggggaagcaggggagagaaaatggtagccatttttacattgttttgtatagtatttattgattcaggaaacaaacacaaaattttgaataaaatgacttggaaactgccaaaaaaaaaaaaaaaaaac

SEQ ID NO: 151950 - DNA, 735 bp, Homo sapiens; identical to SEQ ID NO: 146356

SEQ ID NO: 151951 - DNA, 489 bp, Homo sapiens
  misc_feature (1)...(489): n = a,t,c or g
tgtggaaagatgctggaagnagaaaacccctgggaaaggctccctggttgtcctaccccatggaccccagaggttctttgacagctttggcaaacctgtccctctgcctctgcccatcatgggcaacccccaaagtccaaggcacatggcaagaaggtgctgacttccttgggagatgcccataaagcaccctggatgatctcaagggcacctttgcccagctgagtgaactgcactgtgacaagctgcatgtggatcctgagaacttcaagctcctgggaaatgtgctggtgaccgttttggcaatccatttcggcaaagaattcacccctgaggtgcaggcttcctggcagaagatggtgacctgcagtggccagtgccctgtcctccagataccactgagcctcttgcccatgattcagagctttcaaggataggctttattctgcaagcaatacaaataataaatctattctgctgagagatcac

SEQ ID NO: 151952 - DNA, 523 bp, Homo sapiens
  misc_feature (1)...(523): n = a,t,c or g
gaacgtctgaggttatcaataagctcctagtccagacgccatgggtcatttcacagaggaggacaaggctactatcacaagcctgtggggcaaggtgaatgtggaagatgctggaggagaaaccctgggaaggctcctggttgtctacccatggacccagaggttctttgacagctttggcaacctgtcctctgcctctgccatcatgggcaaccccaaagtcaaggcacatggcaagaaggtgctgacttccttgggagatgccataaagcacctgggatgatctcaagggcacctttgcccagcttgagtgaacttgcacttgttgacaagcttgcatgtgggatcctgagaacttcaagctcctggggaaatgttgctggtgaccgtttttggcaatccattttcgggcaaagatttcanccctgaggttcaggctttctnggcagaagatngtgatttgaattggccagtncctgttcttccagatancatttagttaatttcccatgattcagagttt

SEQ ID NO: 151953 - DNA, 805 bp, Homo sapiens
  misc_feature (1)...(805): n = a,t,c or g
gacactcgctttttggaacgtctgaggttatcaataagctcctagtcccagacgcccatgggtcatttcacagaggaggaccaaggctactatcaacaagcctgtggggcaaaggtgaaatgtggaaaaaatgctggaaggaaaaaacccctgggaaaggctccctggttgtcctaccccatggacccccagaggttcctttgaacagctttggcaaacctgtccctctgccctctgcccatccatgggcaacccccaaagtcaaggcaccatggccaagaaggtgcttgacttcccttggggagatgcccataaaagcacctgggattgatcttcaagggcaccttttgcccaagcctgaagtgaacttgcacttgttgacaagcttgccatgtgggattccttgaggaactttcaaagcttcctggggaaatgttgcttggttgacccttttttggccattcctttttcggcaaaagaatttcaacccttgaggttgcaaggctttcctgggcagaaagatgggtgacttggagttggccagtgcccttgttccttccagataccactgaagcctcttggcccatgaattcagaagctttcaaggataaggctttattcttgcaagcaattacaaataataaatctatttctgctaagagatcaccaaannnnnatnntnnnnnnncccccggattttttatttagcgggccgcacctttttccccttttagggggggtaaatttatattgggccttgggccggggttttcaaaagcggggggannnnnnnnnnaaagagccc

SEQ ID NO: 151954 - DNA, 463 bp, Homo sapiens; identical to SEQ ID NO: 146362
  misc_feature (1)...(463): n = a,t,c or g

SEQ ID NO: 151955 - DNA, 764 bp, Homo sapiens; identical to SEQ ID NO: 146363
  misc_feature (1)...(764): n = a,t,c or g

SEQ ID NO: 151956 - DNA, 468 bp, Homo sapiens; identical to SEQ ID NO: 146364

SEQ ID NO: 151957 - DNA, 1115 bp, Homo sapiens; identical to SEQ ID NO: 146365
  misc_feature (1)...(1115): n = a,t,c or g

SEQ ID NO: 151958 - DNA, 1839 bp, Homo sapiens; identical to SEQ ID NO: 133086

SEQ ID NO: 151959 - DNA, 1947 bp, Homo sapiens
cccacgcgtccgcaccagggaacatctcggggagcctgtttggaagctgcaggcttagtctgtcggctgcgggtctctgactgccctgtggggagggtcttgccttaacatcccttgcatttggctgcaaagaaatctgcttggaagaaggggttacgctgtttggccgggcagaaactccgctgagcagaacttgccgccagaatgctcctcctgttgctgagtatcatcgtcctccacgtcgcggcgctggtgctgctgttcgtctccacgatcgtcagccaatggatcgtgggcaatggacacgcaactgatctctggcagaactgtagcacctcttcctcaggaaattgtccaccactgtttctcatcatcaccaaacgaatgggctgcagtcttgttccaggggcaccatggatcctgtcgattcatctttcagcattctgtctctgttcctgttcttctgccaactcttcaccctcaccaagggggggcaggttttacatcactggaatcttccaaattcttgctggtctgtgcgtgatcgagtgctgcggccatctacacggtgaggcacccggagtgggaatctcaactccggatacttcctaacggttcgcctaaattcctggcctgggtggccttccccctcggcccttctcagcggtgtcatctatgtgatcttgcggaaacgcgaatgaggcgcccagacggtctgtctgaggctctgagcgtacatagggaagggaggaagggaaaccagaaagcagacaaaagaaaaaagagctagccccaaaatcccaacactcaaaccaaaccaaacagaaagcagtggaggtgggggttgctgttgattgaagatgtatataatatctccggtttataaaacctatttataacactttttacatatatgtacatagtattggtttgctttttatgttgaccatcagcctcgtgttgagccttaaagaagtagctaaggaactttacatcctaaccagtataatcccagctcagtatttttgttttgttttttgtttgtttgttttgttttacccaggaaataaggataactccatctcgccccttccctttcatctgaaagaaggatacctccctcccaagtccacctcatttagggaaaaccaaagtgtggggtaggaaacccccaaatgtcccaaaagccctttttctgggtgggggtgacccagtggcatcccaacaggaaacaggccggtggcccggaacctctggtgtgaagcttttacgcgccacacgggacaaaatgcccaaaactgggagccctttgcaaaaacacgggtttttgggcattgggcatacttggccctttacaggtgggagtatttttcgtcaccaccatctaaaatggggaatccagtgaccaacaagtcttttggaaatgggtggtatgggattttaccatttccttattatcacttaatcatcttaaccaacttcactgggaaatcccaattaaccaattttaccaacataagatagaattggagacctggaataaattctgtgtaaatataaatggtttaataactgctttttgtaccttagctaagctgctattattactataatgaagtaaatcataaagccttcatcacctttcccacattttttccttacggtcggaggcatcagaacaagcggtctagactccttggggaccgtgagttcctagaagcttggctgggtccttaggctgttcctgtgcctccgaaggactgtctgggcaatggacttgtattgggccaccaactggtagatgtatatatgggtgcccttctggatgctaaagactccaggaccttttggtttttggctttgcattttctgattttaataccaactggtgtgggactaaggatgcattaaaaataaacatcagagtaactcaaaaaaaaaaaaaaa

SEQ ID NO: 151960 - DNA, 644 bp, Homo sapiens
  misc_feature (1)...(644): n = a,t,c or g
cctccaaagctgtacaataaggtcgagcctttaaggaaaaaggcccgtgcccctgaggcccagtttgagatgccttatgtggtacggctgcacaactccacccagctctntgcacccaagccntgtttcaccttcagccatcccaacagagatcctatgattgacaacaaccgctattgcaccttggaatttcctgtggaggtgaacacagtactacatggctttgccggctactttgagactgtgctttatcaggacatcactctgagtatccgtccagagactcactctcctgggatgttctcatggtttcccatcctcttccctattaagcagcccataacggccgctcatataccattggcctctagccctgcgtgccaagtgtccagagccttggaagcagcttcaggttctgctcctgtagtacagaagggctcaagccaccaatctatgaagacctcaggccagggggtgaggaattagtgctggatttgaagctacgcactcagcctcaagaactccctggaatatccctgagaacatggggtttgaacggattttcagcctttttctgttcttgttttgatggttttgtgtaagaggaaatacaaataaagttatagccctttactgcaaaaaaa

SEQ ID NO: 151961 - DNA, 459 bp, Homo sapiens
cagcgcgaggagaaagatggcggcgatggcggtcgggggtgctggtgggagccgcgtgtccagcgggagggacctgaattgcgtccccgaaatagctgacacactaggggctgtggccaagcaggggtttgatttcctctgcatgcctgtcttccatccgcgtttcaagagggagttcattcaggaacctgctaagaatcggcccggtccccagacacgatcagacctactgctgtcaggaagggctttcctgctgccccttaatcaggaagataacaccaacctggccagagttttgaccaaccacatccacactggccatcactcttccatgttctggatgcgggtacccttggtggcaccagaggacctgagagatgatataattgagaatgcaccaactacacacacagaggagtacagtggggaggagaaaacgtggatgtggtggcacaactt

SEQ ID NO: 151962 - DNA, 2784 bp, Homo sapiens
atggcggcgatggcggtcgggggtgctggtgggagccgcgtgtccagcgggagggacctgaattgcgtccccgaaatagctgacacactaggggctgtggccaagcaggggtttgatttcctctgcatgcctgtcttccatccgcgtttcaagagggagttcattcaggaacctgctaagaatcggcccggtccccagacacgatcagacctactgctgtcaggaagggctcttgaaattggggctgacctcccatctaatcatgtcattgatcgctggcttggggagcccatcaaagcagccattctccccactagcattttcctgaccaataagaagggatttcctgttctttctaagatgcaccagaggctcatcttccggctcctcaagttggaggtgcagttcatcatcacaggcaccaaccaccactcagagaaggagttctgctcctacctccaatacctggaatacttaagccagaaccgtcctccacctaatgcctatgaactctttgccaagggctatgaagactatctgcagtccccgcttcagccactgatggacaatctggaatctcagacatatgaagtgtttgaaaaggaccccatcaaatactctcagtaccagcaggccatctataaatgtctgctagaccgagtaccagaagaggagaaggataccaatgtccaggtactgatggtgctgggagcaggacggggacccctggtgaacgcttccctgcgggcagccaagcaggccgaccggcggataaagctgtatgctgtggagaaaaacccaaatgccgtggtgacgctagagaactggcagtttgaagaatggggaagccaagtgaccgtagtctcatcagacatgagggaatgggtggctccagagaaagcagacatcattgtcagtgagcttctgggctcatttgctgacaatgaattgtcgcctgagtgcctggatggagcccagcacttcctaaaagatgatggtgtgagcatccccggggagtacacttcctttctggctcccatctcttcctccaagctgtacaatgaggtccgagcctgtagggagaaggaccgtgaccctgaggcccagtttgagatgccttatgtggtacggctgcacaacttccaccagctctctgcaccccagccctgtttcaccttcagccatcccaacagagatcctatgattgacaacaaccgctattgcaccttggaatttcctgtggaggtgaacacagtactacatggctttgccggctactttgagactgtgctttatcaggacatcactctgaactctaggaactatccgagctccactccccacaacatactcaaaggaacggagagaaccgggaccccctgcggggacccggaactggatgagcaacaaaggaaagaagttaaaaaggattatcctagcaataccaccagcagcaccagcaacagtggcaatgagaccagtggaagcagcaccatcggggagacaagcaatcgtagtcgagatcgggatcggtatagacggagaaatagtcggagccgaagtccaggtcggcagtgtcgtcaccgtagccgtagctgggatcgtcgacatggtagtgagtcgcgaagtcgggaccatcgtcgtgaggatcgtgtgcattacaggagtcctccacttgccactggggagccagttgataatctgagtcctgaggagcgtgatgcccgcacagttttctgtatgcagttagctgcccgaattcggcctcgagatctggaggactttttctctgctgtaggcaaggttcgcgatgtacgtatcatctcagatcggaactcacgtcgttctaagggcattgcctacgtggaattctgtgaaatccagtctgtgccactggccattgggctgactgggcagcggttgctgggagtgcctatcattgtacaggcttcacaggcagagaaaaaccgactggcagccatggccaacaacctgcaaaagggcaatggtggaccaatgcgcctctatgtgggttccctgcacttcaatatcactgaagacatgctccggggcatctttgagccctttggtaaaattgataatattgtcctgatgaaggactcagatacaggccgctctaaaggttatggtttcatcacgttctctgattctgagtgtgcccggcgggccctggaacagttgaatgggtttgagcttgctggtcgacctatgagggttggccatgtgactgagcgactggatggtggcacagacatcacttttcctgatggggaccaggagctggatctgggatcagcaggtggacgttttcagctcatggcaaaactggcagaaggcgctggaatccaactgccaagcactgctgctgctgctgctgccgccgccgcccaggctgctgccttgcaactgaatggagcagttcccttgggggccctgaatccagcagctctgactggtaaatcagtggcacagtatactgcctccttgtgcctctggatcctgccacttcacatctactcttccatggccccatttctccattttgtggaccaagccatcctgagggcatggacattgtctctgaggaaattggggccacccttaagataccaagaaaagctcctgcccatggtcccactggaaatggactctgctgagcaaagccaccagttgaagagaacagaatccacacctgcattgaatacctgtttctccatgtgtatcgtctctgagattaccttcttgccctttccaacaccttag

SEQ ID NO: 151963 - DNA, 607 bp, Homo sapiens
attcggcccaagggatttcctctgcatgcctgtcttccatccgcgtttcaagagggagttcattcaggaacctgctaagaatcggcccggtccccagacacgatcagacctactgctgtcaggaagggactggaatacgctaattgtgggaaagctttctccatggattcgtccagactcaaaagtggagaagattcgcaggaactccgaggcgttggaggtgcagttcatcatcacaggcaccaaccaccactcagagaaggagttctgctcctacctccaatacctggaatacttaagccagaaccgtcctccacctaatgcctatgaactctttgccaagggctatgaagactatctgcagtccccgcttcagccactgatggacaatctggaatctcagacatatgaagtgtttgaaaaggaccccatcaaatactctcagtaccagcaggccatctataaatgtctgctagaccgagtaccagaagaggagaaggataccaatgtccaggtactgatggtgctgggagcaggacggggacccctggtgaacgcttccctgcgggcagccaagcaggccgaccggcggataaagctgtatgct

SEQ ID NO: 151964 - DNA, 480 bp, Homo sapiens
ccagagactcactctccgggaatgttctcatggtttcccatcctctccgctattaagcagcccataacggtacgtgaaggccaaaccatctgtgtgcgtttctggcgatgcagcaattccaagaaggtgtggtatgagtgggctgtgacagcaccagtctgttctgctattcataaccccacaggccgctcatataccattggcctctagccctgcgtgccaagtgtccagagccttggaagcagcttcaggttctgctcctgtagtacagaagggctcaagccaccaatctatgaagacctcaggccagggggtgaggaattagtgctggatttgaagtacgcactcagcctcaagaactccctggaatatccctgagaacatggggtttgaacggattttcagcctttttctgttcttgttttggtggttttgtgtaagaggaaatacaaataaagttatagccctttactgcaaaaa

SEQ ID NO: 151965 - DNA, 911 bp, Homo sapiens
ttttttgggttctttcagttttaatctgtgtgactctgtaaattaacctagtagtggaatcctccatgacagtagttggaagcaggctggcttagtaatgtgacaacatgcatttgtctctttcttccatgcccatgccaacgttggttggttttgacatgggaggtttgatccttctgatccttcagttagtacagacataccatttccctccctctggaactaatttgactctcctgctgtgcagatgatggtgtgagcatccccggggagtacacttcctttctggctcccaattttttctccaaagctgtacaataaggtccgagcctgtaggaaaaaggcccgtgaccttaaggcccagtttgagatgcctattgtggtacgcttgcacaactccaaccagctctctgcaccccagccctgttccaccttcagccatcccaacagagatcctatgattgacaacaacccgctattgcaccttggaatttcctgtggaggtgaacactagtactacaatgctttgccggctactttgagactgtgctttatcaggacatcactctgagtatccgtccagagactcactctcctgggatgttctcatggtttcccatcctcttccctattaagcagcccataacggtacgtgaaggccaaaccatctgtgtgcgtttctggcgatgcagcaattccaagaagggctcaagccaccaatctatgaagacctcaggccagggggtgaggaattagtgctggatttgaacgtacgcactcagcctcaagaactccctggaatatccctgagaacatggggtttgaacggattttcagcctttttctgttcttgttttgatggttttgtgtaagaggaaatacaaataaagttatagccctttactgcaaaa

SEQ ID NO: 151966 - DNA, 2503 bp, Homo sapiens
gcgactcgtcccgccttctggggcactagtttgactttgtgattggctactagtatcaaggaatcccggcgtggacagcgcgaggagaaagatggcggcgatggcggtcgggggtgctggtgggagccgcgtgtccagcgggagggacctgaattgcgtccccgaaatagctgacacactaggggctgtggccaagcaggggtttgatttcctctgcatgcctgttttccatccgcgtttcaagagggagttcattcaggaacctgctaagaatcggcccggtccccagacacgatcagacctactgctgtcaggaagggactggaaatacgctaattgtggggaaagctttctccatgggatttcgttccagacttcaaaagtgggagaagattcgcaggaactccgagggcgggccatgtttacaggagctgaattttgggtgcatatttgggtcttccagctttcctgctgccccttaatcaggaagataacaccaacctggccagagttttgaccaactcaaattcacactggccatgacttttacatgttctggagagcggatacacttgaagaaaccagaggacctgcagagatgatataattgagaatgcaccaactacacacacagaggagtacagtggggaggagaaaacgtggatgtggtggcacaacttccggactttgtgtgactatagtaagaggattgcagtggctcttgaaattggggctgacctcccatctaatcatgtcattgatccgctggcttggggagcccattcaaagcagccattctccccactagcattttcctgaccaataagaagggatttcctgttctttctaagatgcaccagaggctcatcttccggctcctcaagttggaggtgcagttcatcatcacaggcaccaaccaccactcagagaaggagttctgctcctacctccaatacctggaatacttaagccagaacccgtcctccacctaatgcctatgaactctttgccaagggctatgaagactatctgcagtccccgcttcagccactgatggacaatctggaatctcagacatatgaagtgtttgaaaaggaccccatcaaatactctcagtaccagcaggccatctataaatgtctgctagaccgagtaccagaagaggagaaggataccaatgtccaggtactgatggtgctgggagcaggacggggacccctggtgaacgcttccctgcgggcagccaagcaggccgaccgggggataaagctgtatgctgtggagaaaaacccaaatgccgtggtgacgctagagaactggcagtttgaagaatgggggaagccaagttgaccgtagtctcatcagacatgagggaatgggtggctccagagaaagcagacatcattgtcagttgagcttcttgggctcatttgctgaccaattgaattgtcgccttgagttccttggattggagcccagcactttccttaaaagatgattggtgttaagcatcccccggggagttacacttcctttctggctcccatctcttcctccaagctgtacaatgaggtccgagcctgtagggagaaggaccgtgaccctgaggcccagtttgagatgccttatgtggtacggctgcacaacttccgccagctctctgcaccccagccctgtttcaccttcagcccatcgcaacagagattcctatggattgacaacaaccgctatttgcacccttgggatttcctgtggaggtgaacacagtactacatggctttgccggctactttgagactgtgctttatcaggacatcactctgagtatccgtccagagactcactctcctgggatgttctcatgggtttcccattcctcttccctattaaggcagcccattaacggtacgtgaaagggccaaaccattctgtgtggcgtttctgggcgatgcaggcaatttccaaggaaggtgtgggtatggagtgggggctgttgacaggcaccagtctgttcctgcctaatccaaaaaccccccaaaggcccgcctcaatatacccattggcccctcctaagcccctgccgtgccccaagtgtcccagaagcccttggaaagccagccttcaggttcctgcctccctgtagtaacagcaaggtgccagtaacatcctatggggctgtgattcccccttggcccattcagaggagggagcattttcaatcgtgctttccctgcccttacatccaaggtgggccaagggattataattaattgccagggctcaagcccacccaatcctatgaagacctcaggcccagggggtgaggaattagtgctggatttgaaactacgcactcagcctcaagaactccctcggaatatccctggagaacatggggtttgaacggattttcaagcctttttctgttcttgttttgatggttttgtgtaagaggaaatacaaataaagttatagccctttactgcaaaaaaaaaaaaaaaaa

SEQ ID NO: 151967 - DNA, 398 bp, Homo sapiens; identical to SEQ ID NO: 146416

SEQ ID NO: 151968 - DNA, 563 bp, Homo sapiens; identical to SEQ ID NO: 146417

SEQ ID NO: 151969 - DNA, 489 bp, Homo sapiens; identical to SEQ ID NO: 146421
  misc_feature (1)...(489): n = a,t,c or g

SEQ ID NO: 151970 - DNA, 1676 bp, Homo sapiens; identical to SEQ ID NO: 146422
  misc_feature (1)...(1676): n = a,t,c or g

SEQ ID NO: 151971 - DNA, 3399 bp, Homo sapiens; identical to SEQ ID NO: 121454

SEQ ID NO: 151972 - DNA, 3129 bp, Homo sapiens; identical to SEQ ID NO: 121455

SEQ ID NO: 151973 - DNA, 426 bp, Homo sapiens
cagtgcggtggaattcgattaggtcccctgtcctcctttgagtaacaataaaagaaaaaaaccttgtaaaaatgacctcttgacttgtggaactgttattttcataggtagtaggagtttaaccttgctctggtctcaccttctcatccccagataaaagctgaggatgaccagcccctcccgggagtcctcttatccctgagcggtggcctgtttcgttccaacctcttgacccaggacaacggcattctgacattctcaaacctggtaacgtgttctgcaatttaccacctgcctgtcttccctgagagagagccaggatgcagcatgcgagacttacgtgttgcttgacaacgtgagaagagaaagccaatgtggagtggtttcagtttcttgggggcccacggtcattagagtattgctctt

SEQ ID NO: 151974 - DNA, 553 bp, Homo sapiens
tttcatttcaccccactgttcagagatggcgagacatatgttgtgatctggactccacactccccaggtcccagtatgcttacatcttgcctcaagtttctttcaccgcagtgggctaccataaacacatcaccttgatttttaatcccgcgaggaagctgcctgaacaggacatcgcacaaggatcctacattgccctgccattgacgctgctggttctgctggccggttacaaccatgacaagctcattcctttgctgctgcagttgacaagccggctacagggagtcggcgcgctcggccaggcagcctctgacaatagcggcccagaagatgcaaagagacaagccaagaaacagaagacaaggcggacccttcgtttgcaagaagagttccagttgatgtggtgtttggttccatggcggggtaccctagggattcatctgttttcttcacttccctttgcatctgagatcctgctggaaaccacggcaacctgtatccactattaggaggtaaaaatcaataaaatggcccattcaaaaaaaaaaaa

SEQ ID NO: 151975 - DNA, 891 bp, Homo sapiens; identical to SEQ ID NO: 132547

SEQ ID NO: 151976 - DNA, 4713 bp, Homo sapiens; identical to SEQ ID NO: 134616

SEQ ID NO: 151977 - DNA, 4533 bp, Homo sapiens
tgaggggcgggacccggctgccggcggtgggtctagctggggttaggtttgtccatgctggtgggccagggcgcggggccgctggggcccgcggtggtcaccgccgcggtggtgctgctgctgagcggcgtggggccggcgcacggctcggaggacatcgtggtgggctgcggtggcttcgtcaagtcggacgtggagatcaactactctctcatcgagataaagctgtacaccaagcatgggactttgaaataccagacagactgtgcccctaataatgggtactttatgatccctttgtatgataagggggatttcattctgaagattgagcctcccctagggtggagttttgagccgacgaccgtggagctccatgtggatggagtcagtgacatctgcacaaagggtggggacatcaactttgtcttcactgggttctctgtgaatggcaaggtcctcagcaaagggcagcccctgggtcctgcgggagttcaggtgtctctgagaaacactgggaccgaagcaaagatccaggccacagctacacagcgctggcggaaagtttgcattttttaaagttctgcctggagattatgaaatcctcgcaactcatccaacctgggcgttgaaagaggcaagcaccacagtgagtgtaaccaactccaatgccaatgcggccagtcccctcatagttgctggctacaatgtgtctggctctgtccgaagtgatggggagcccatgaaaggcgtgaagtttcttctcttttcttctttagtaactaaagaggatgaccctgggctgcaatgtctcaccagtgccctgggttccagcccccaatacgagaagtctggtgtaatttgtgctacacggtctccagagaagatggctcgttctctttctattccttgccaagtgggggctacactgtgattccgttctatcgaggggagaggattacctttgatgtggcgccttccagacttgacttcacagtggagcatgacagcttgaaaatcgagcccgtgttccacgtcatgggattctccgtcaccgggagggtcttgaacggacccgaaggagattggtgttccagaagcagtaagtcaccctgaataaccaaatcaaagttaaaacaaaagcttgatgggctcattcccgccttgagaacataaccacagggacatacaccatccatgctcagaaagagcacctctacttttgaaacggtcaccatcaaaattgcaccgaacacacctcagctggctgacattgttgcaacagggttcagtgtctgtggtcggatatcaatcattcgcttcccggacaccgtcaagcagatgaataaatacaaagttgtcctgtcatctcaagacaaggacaagtctttggtcaccgtggagacagatgctcatggatcattttgttttaaagcaaaaccagggacttacaaagtgcaggtgatggttcctgaggcagaaaccagagcagggctgacgttgaaaccccagacatttcctcttactgtgaccaacaggcccatgatggatgtggcctttgtacagttcttggcatcagtttctgggaaagtctcttgtttggacacctgtggtgacttgctggtgactctacagtccctgagccgccagggtgaagaagcggagcctccagctctccggcaaggtcaacgccatgactttcacctttgacaacgtgctccctggaaaatacaaaataagcatcatgcatgaggattggtgctggaagaacaagagcctggaggtggaagtgctggaggatgacatgtctgcagttgagttcaggcagacgggctacatgctgagatgttccctgtctcacgccatcactctggaattttatcaggatggaaatgggcgtgagaatgtggggatttataacctctccaaaggagtcaaccgattctgcctgtccaagcctggtgtgtacaaagtgacccctcgctcctgccaccggtttgagcaagcgttctacacctatgacacgtcttcacctagtatcttgacattgacagccattcgccaccatgtccttggaactatcaccaccgacaaaatgatggatgtcactgtgactatcaagtcttccatcgacagtgaacccgccttggtcttaggccctctgaagtctgtgcaggagctgcggagggagcagcagctggctgagatcgaggcccgcaggcaggagatgtgtttattacggcaaagaggaaggcgaagaaagaatgaccaagcctcccgtgcaggagatggtagatgagttacaaggccccttctcgtatgatttctcttactgggcgcggtctggagagaaaatcactgttacaccgttcatctaaagagcttgcttcttttatccccctttcaatgggaagccgttgttcagtgggagaaagcttgcccggggaagctgattcgagatccatgggaaggcaggcctgtttttagaaggccagatccaccccgagttggaaggagtcgagattgtcatcaagtgaaaagggggcaagttcaccgcttgattcacagtctttactgatgacaaaggtggcctacagtgtttgggccccttgcacagtgaccgggagtacacggtgacctcacagaaggaggggctatgtcctgacttgcggtggaaggaaccatgggagactttcaaggcctatgcccttggcaggcgtaagctttgagataaaagctgaggatgaccagcccctcccggggagtcctttttatccctgaaccggtggcctggtttcgttccaacctcttgacccagggacaacgggcattcttgacattctcaaacctgaagcccctggccagtatttactttaaacccatgaatgaaaggagttccggtttgagccatcctcacagatgatcgaggtgcaggaaggccagaacctggaagatcaccatcacggggtaccgacccgcttacagttgcttatggcacagtgtccttccttaaaccgagagcccgaacaaggggttggccatgggaagcggtgggccaagaacgactgcaagcattttacggagaagacaccggtgacagacgaagaggggcaagttcagattaccgtggattgctgccggggatgtgtgtaccacggttcagctcaaggccagaaggcaacggaccacattgagcgggcgctcccccaccatagggtgattgacggttgggaataatgacatcagatgatgtaaacatcataagttttccggcagattaatcaatttgatttaagtgggaaatgtgattcacttcctctggaataccttccctacattatggggttcaagcttttacaaaagcgaaaaacctcgacaatccaatccagacagtttcccttggccaagtccctgttcttccatttccccccactgctcagagatgggcgagaactatgtttgtgcttctgggactccacacttcccagatcccagtattgactaccatcttgcctcaagttttcttttcaccgcagttggggctaaccattaaacacatcaccttggatttttatttcccacggagggaagctgcctggaacagggacattcgcacaaaggatccttacattgccttggccattgaccgctgctggttctgctgggccggttacaacccatgacaagctcattccttttgctgctggaagtttgacaaagccggcttacaggggagtcggcgcgctcgggccaggcaagccctcttgacaatagcgggccagaaagatgccaaagagacaagccaagaaacagaagacaaggcggactttaaggaaggaaggggacagttgcagtctcacttgggaacagtccacagccagggggttccggccactacccggccctgtggattaaaagccaaaaagcatgcgtcagctaactttcagcctgtgctgctgggcccggcaccccatgtcccttgttcactgtggcatcctgcaccccatcctcaccccttccgtagaagcccctcgttgcaattgcaattgaaatggaccctcctgtcactctggcttgaacagaatttaatttttcttgagtcaaattattaatttaataattaatttttggtcaaaagaagtattttaagctgtgctgtggtgtgagaatgtcattcttgatcttcagccttcgtttgcaaggagagttccagttgacgtggtgtttggttccatggcggggtaccctggggattcatctgttttcttcacttccctttgcatctgagatcctgttggaaaccacagcaacctgtattcattattaggaaataaaaatcgaaaaaaaggttcattcttttgtgttgtagctcacccaacacctaagaaagacaaccatactcaaatacacactgccccgctccccccctcttacagctggtgtacccctcttcttgtgccccccctcttttttccctgttctagaacccaaccaacttgcgcgtgtcgtccgctaattacctcatccctggtg

SEQ ID NO: 151978 - DNA, 477 bp, Homo sapiens
atggataatctgtcatcagaagaaattcaacagagagctcaccagattactgatgagtctctggaaagtacgaggagaatcctgggtttagccattgagtctcaggatgcaggaatcaagaccatcactatgctggatgaacaaaaggaacaactaaaccgcatagaagaaggcttggaccaaataaataaggacatgagagagacagagaagactttaacagaactcaacaaatgctgtggcctttgtgtctgcccatgtaatagcataactaatgatgccagagaagatgaaatggaagagaacctgactcaagtgggcagtatcctgggaaatctaaaagacatggccctgaacataggcaatgagattgatgctcaaaatccacaaataaaacgaatcacagacaaggctgacaccaacagagatcgtattgatattgccaatgccagagcaaagaaactcattgacagctaa

SEQ ID NO: 151979 - DNA, 1557 bp, Homo sapiens
atgctatcctgctataaacagaagtttcctcttgctgcggatgcattggttaccatggacgtagacttctatcaagccaaagagaatgctgaacttaaaaatgccattaaccagccccatcacctggcccaagttgtgacaatcaagcaactccagacattgccagattcctggggtcaaatctgtaataagaaccagagtttatctgtgtcattgacctctcaggatgcaggaatcaagaccatcactatgctggatgaacaaaaggaacaactaaaccgcatagaagaaggcttggaccaaataaataaggacatgagagagacagagaagactttaacagaactcaacaaatgctgtggcctttgtgtctgcccatgtaatagaacaaagaactttgagtctggcaaggcttataagacaacatggggagatggtggagaaaactcaccttgcaatgtagtatctaaacagccaggcccggtgacaaatggtcagcttcagcaaccaacaacgggagcagccagtggtggatacattaaacgcataactaatgatgccagagaagatgaaatggaagagaacctgactcaagtgggcagtatcctgggaaatctaaaagacatggccctgaacataggcaatgagattgatgctcaaaatccacaaataaaacgaatcacagacaagtctcacctcggtcagccctcggtccttaagctgaaagacaccagttttctgcgccgtttccacatgagcgcggagcgcactgtttcccatcctagcgccgcggctcaggtccctgcgggaaggaagcgctgctgtcaccgcccagtccacccggtcggcctcccggctggggctcctgccccagctctcaactcccgccgatccctggctcctggggcccgacccaagagcgacaaggaagaatcggaagaacacacagcccgaccaccaagccctgccgcctttgcagctctgcggaggccaggcgcctctgggagcctacggaagatcagggagccccggactcgcctcccaccgctcagctgccgtaaggctccgcaggagatgttaaacatgtctaagaaaacagtttcttgttttgtgaacttcaccagactacagcagatcacaaatattcaagctgaaatctaccagaaaaacctggaaattgaactcctgaaactagaaaaagatacagcagatgttgttcatcctttctttttggggaagaatcccactgatgcataccttgatgccacgatgaatgaggcaccagggcccattaatttcactatgtttggtgagaagttaaatggcacagatcctgaagatgtcatcagaaatgcttctgcttgctttgatgaagaagcaacaggcaccattcaggaagattacctgagagagctgatgacaaccatgggggatcagtttacagatgaggaagtggatgagctgcacagagaagcacctattgacaaaaagggaaatttcaattacatcgagttcacaagcatcctgaaacatggagtaaaagacaaagatgactga

SEQ ID NO: 151980 - DNA, 2449 bp, Homo sapiens
  misc_feature (1)...(2449): n = a,t,c or g
ctcgaggccacgaaggccgccaggtccggtgttggggtgtccgagttgccgccggagaggagtggcctcgcccgcttgagttttgattcatcatggataatctgtcatcagaagaaattcaacagagagctcaccagattactgatgagtctctggaaagtacgaggagaatccctgggtttagccattgagtctcaggatgcaggaatcaagaccatcactatgctggatgaacaaaaggaacagactaaaccgcataggaagaagcctgggcccaaataattaaggacatgagacgagacagagaagactttaacagaactcaacaaattgctgtggcctttgtgtctgcccatgtaatagaacaaaagaacttttgagtctggggcaaggctttattaagacaacatgggggagatggtgggagaaaacttcaccttggcaatgttagtattctaaacagccagggcccggtggacaaatggtcagcttcagcaaccaacaacgggagcagccagtggtggatacattaaacgcataactaatgatgccagagaagatgaaatggaagagaacctgactcaagtgggcagtatcctgggaaatctaaaagacatggccctgaacataggcaatgagattgatgctcaaaatccacaaataaaacgaatcacagacaaggctgacaccaacaggagattcgtattggattattgcccaatgccagagcaaaaggnaactcatttgacagctaaagcttactgctgttcttctttatcatttattcacttccgtagctccttcttggaaaagttattaccttttcagagtttaagttttcggttccacgctcttctaattgggagataatatggaagaagggccagagcagttacagccctccttcttttttgttttctgttgagggccgactgctgctctgccttccttctagtattttctttctcaattcatacgcttagattggttttcatatgtcatgtttagtgttttcatcctcctcatatacttcagcaggttcttttgctttcaagatttggaagcattgccaaagacagccatgaagaaggaagctgtagaggtgttttttgttgttggttattttcgctctttggggtgaggcgaaggacaggagataagaggttggttacctcagtaaaaacctttttgccacatatttttaaagttgcatagccacaacgaagatctagttgggatatagtttttgatttaagttgcagttatagccaatttaggctaatgcttgggtttttggagcttttaaacacaaacgtttttgttagggcatcacagttttggcaacctctggctccaaaagaggaaaaatagaatgagttttctttctttttttttttttttgggagtccagagtctcgctctcttgtccagggctgggagttgcaatagcgcgatctggggctcactgcaacctccgcctccctgggttcaagcaattctcctgccttgcctcctgagtagctggggattacaggcgtgtgtcacccacgcttcggcctaatttttgtatttttagttagagacaggggtttcacccatgtcaagctgggtcttgggactccctgacgtcgtgatccacccgccttggcctcccaaagtactggggattacagggcgtgagccactgtgcctggctgagttttcttaaagtgagcttaatttctgaactcttagtgattcatatatgtacataaatctgtgatcccatttcttattgcaccattcaggaacactttatataaatgagtgggctttttatttcatattattagtagtatcatgggttccattacaggcctattaacatcatacattgtcattagtctttggaaggaaaaaatatgtaaataatatatgtgtaacatgagaatttctctctaaagcaggggcttaaaatttttttgggaaaagtttgacaaaggcataccacatggaattcaggatttacctcaaatgctaaggaattatgtttagttagggaaaaagggaaaggtcattttgacctcaggtaggaaaaataggattgctttggagttttatgtaggctttaggacttttaaaacgttaggaatttattctgtaacttaaaaattatttgaaaaaattatgccctctgggtttaattattgggtgattacacactctttctccttaccccttgtgtattgaactatgtcccataatcaagttgatgtggatcctgaaaagtgttatgaacatctgattggtatttgtcacatttattttaaaattagcatctgaacacttcaaagctgtcagtgtgtaattggtttcaccaataacccactgcttgatccttacaattaaattttttaactaaaaaaaaaaaaaaaaagtcgacgcggccgcgaatttagtagtagtaggc

SEQ ID NO: 151981 - DNA, 456 bp, Homo sapiens; identical to SEQ ID NO: 146382

SEQ ID NO: 151982 - DNA, 528 bp, Homo sapiens; identical to SEQ ID NO: 146384

SEQ ID NO: 151983 - DNA, 689 bp, Homo sapiens; identical to SEQ ID NO: 146383

SEQ ID NO: 151984 - DNA, 1185 bp, Homo sapiens
  misc_feature (1)...(1185): n = a,t,c or g
gaattcggcacgaggtgggacttcagcatggcggtgtttgcagatttggacctgcgagcgggttctgacctgaaggctctgcgcggacttgtggagactagccgctcaccttggctattcagttgttgctatcaatcatatcgttgactttaaggaaaagaaacaggaaattgaaaaaccagtagctgtttctgaactcttcacaactttgccaattgtacagggaaaatcaagaccaattaaaattttaactagattacaaattatgttgtcggatcatctccnccgcaaaggttttgaaaaacactctcaaaagaggggccgggctttaagatggttggtgcaggttttccaaaagcagaaaaggcttttttcatattgctttgcacacatttaagatgtggatttaggtctgcataactgtaacagagaaactaccattttacttcaaaagacctcctattaatgtggcgattgaccgaggcctggcttttgaccttgccctaatacccctgctatccaaagactccacaatgagaaggtatacaatttccccagtgcccctccaattttgatgcaaatcttgcaaaggaaagaatgtaattatatcctagtgcctgcaagaaaaggcccttttagaaaataagagggcccatattgacgtgggcaaatcctaggcttgcctgtttgggggttctctgaaagtgaacgccaagggttcgggtgtccacccaactgccgagcagcgccttctccatggagaaactagaaaaactgcttttggaattatctctacagtgaagaaacctcggccatcagaaggagatgaagattgtcttccagcttccaagaaagccaagtgtgagggctgaaaagaatgccccagtctctgtcagcactccctttttcccttttataggttccatcagcccacaacaaaaataaaaccctttgtgtgatttacctgttttcatttggagctagaaatcaatagtctataaaaacagttttacttgcaatccattaaaacaacaaacgaaacctagtgaagcatctttttaaaaggctgccagcttaatgaatttagatgtactttaagagagaaagactggttatttctcctttgtgtaagtgataaacaacagcaaatatacttgaataaaatgtttcaggtaaaaaaaaaaa

SEQ ID NO: 151985 - DNA, 713 bp, Homo sapiens
gacactcgctttctggaacgtctgaggttatcaataagctcctagtccagacgcccatgggtcatttcacagaggaggacaaggctactatcgacaagcctctggtgcaaggtgaatgtggaaagatgctggaggagaaaccctgggaaggctcctggttgtctacccatggacccagaggtttctttgacagctttggcaacctgtcctctgcctctgccatccatgggcaaaccccaaaagtcaaggcacatggcaagaaggtgctgactttccttggggagatgccattaaagcacctgggatgatcttcaaggggcaccttttgcccaagcctgaagtgaacttgcacttgttgacaagcctgcaatgtgggatccttgaggaacttcaaagcttcctggggaaattttgctggtgacccgttttgggcaatccctttttcggcaaaagaatttcacccctggaggtgcaagggtttcctggggcagaaagatgggtgacttggagttggccagtgcccttgttccttccagattaccactgagctcactggcccatgaatgcagagcttttcaaggataaggcttttattcttgcaagcaattacaaataataaatctatttctgctaagagatcacacatgattttcttcagctcttttttttacatctttttaaatatatgagccacaaagggtttatattgagaa

SEQ ID NO: 151986 - DNA, 4157 bp, Homo sapiens
  misc_feature (1)...(4157): n = a,t,c or g
tttttttttttttttttttattagtgaaagtgcatacacctttattatgtacattgttggaaagggaggccacctggagaaacttctgcactggcaactgtgttcctagagctcccttctatgcgtcccttccccnaagtgatttaatttcaagctggattggactacggaattcacaaggcagaaaagtcaaggtcatttggttttatctttggagacaggagaactcaaggaaccaaaagtacttgttactctaagtctcagaaaaggttttcagtcaggatatgggaggctcctgggtcctcaaggggtgaaccactttcacacaacaggataaaaccatcatttttaaaattcaaaaatgttaaggtgcaacttggagtttaaagttggcactggctgccattacctctaaattaaactccaggctagggagcccagggattacatgggttagtttcaaggggcttccctaaaaattaagccttggaaaattggggggtacagggggaaggggacatccattggctgggatggacagagtgggttgagcctaaagagagcctataaagggctccgtgctggggaaaagaaagctgttatgacttggaacttctctaaggtgaaactcagagtctccaaagagggaaatgttaacaaatgtcacaccgccagctttctgggcccagtaagcagaatgccccaggttgcctcagatccaccggacatttggcaaaacagaagatgtctccctaatattataggacctaaggaatttgttgtcccaggaggagctgacccagttccctctttccagcatccaatataccatggataggaagaatggactaggtaaatgtaaaaagacctacatctatatagatattgtaagtttgacagtatctggcccaagatcattggacactatatagtcaatatactgtgaattccttatactatgtaatgaatgggtttgtaatcaacatatttcacagtgtaccacagttaacagcatgcagatagtaaaatataatggtttcctgaagttatctcttaaaaaagtatttctagtccttcagctattcaaatagatatataacaattgcatatagaacgtagagaaaaattttattaaaaaattaaaactatttaaaacctgatatatgaaaataggccaaccagtgagaaaaaagtgcacttttgtgaccaaatatttagctggtttgaaagaccagaacaaggaggaatcatttactcataaaagaaaggctcaaaataagttaaaacatggatgtatttttaaaatgaccactctagtagtgaattttaaaagtctttttaagggttagagtaatcttttcaattagtcttggctatttcctctagttctgacaagtacaggcaagaaaatggctactctcaagtaaggattattctgaaacacggtctggatttagaaaataaatgaacattagggaaatttcaattccttaagactctccaaaacccagttgtgtgctcattgcctgtatccccacacttttgggaggcagaggtgggtggatcacctgaggttaggagttcgtgactagcctggccaacatggtgaaaccccgtctctactaaaaaacaataataataatacaaaaattagctgggcatggtggcatgagcctgttaatcccagctactgggggaggctgaggcaggagaatctcttgaacccagggaggcggaggttgcagtgaagccgagatcatgctattgcactccagcctggggcaacaagagtgaaactccatcttcagaaaaaaaaaaaaaaaaagacttctctgggagggtaagggcacatattgacctggggggaagctggttgtgggtgttaaggtcattcacttttcttgcaaagcattttaggccagttcaggcggtgttcaggtggcagttacagcccaggttcttgcctgtggcctgggtgcttagggggttcagaatgagtcagtggaagtcaaaacaagagggatctaacctactacataataatctaaaaatacaaacttttaactattttaagactaacagattaccttatataaatcaccaatctctcagtatttacaagctaacaattctttcacctatttttataactgctatacattctgggaacaccacaattgacatatggaaaaagaaaagccctaccctctctttatgagttaaaggctaatttggtccccgacttcatgcttggaaggctagcgctcatctctacactagcctagatggctgtgttttgcccctatgattccttgcagcatatctatgggcagagggaagacaattgttgagtttttctcagcagcaatggtggtcagtgtctgcaggtatcggagctgaagggctgcaggagattcagtgatgaccatggaggcttctttcagagccctggatgcattcatttctccttcggctgcaataaccttggcgcgggcctcgcgggacgcttctgcttctgcagccatagctctctggagctgcacaggtagtttcacatccttaatttccacacgctccacctttattccccaggcatcagtggcatcatccagagtagactgcatgttgtgtgcaatttcttctctgtcagagaggatctgagaaagattcttggtgcccagaacattcctcagagtagtttgtgccaaaagacgggttgctgagtcagcgttggtgatatttgccacagccagggttgcattctgaacgcggtaatagaccacaccatccacgctaattgtcactgaatcctttgtgaggatagcattcttctgtccttcccccttcatgatgttttcaggttttctgtatgcaacggttattaagtctcctaaggacatggttcccaggatggccatcactttttcgggggctncctgaggaggaatatcaaatgaaatagttctcatgtccactttgatgaagctgtcagtgcatggcagaataaaaaacaaaccaggtcctttggctcctccttgtaaaatgcgacccaatctaaagatgatggctctttcatactcttttataatcttttgggatctgggcactatggagaaaatatcaactaacaatctgcttggggactctatctccttgaaggagtcggggagccgctgggcttcggagtcccgtgtgtgccgcttctcggccatgctgcccgagacgcagtcgcactcccccgtcctcgttgccaaacccggagccgccgggaatgccctttctttatattgactattctctgcatctatgcatttgttcacgtggatgtacccaagtccctggtcagaccaggagcacctcagtggctcgttgcccaggtccaggatgaagcagtcgccattgttgaagctctcccaggacacaggtacctggaagagtctctgcaccaccacctcgttgggtaccacgtgcttgaatcctgatgccacacctcctttcttgtacttcaggccagacttgaagtagcctaggaaggtggccgactcgaagccctggacctcacggtgctgcacggcccggccgttcaggtagtcatccagctgcacggtaaagatggcggccgccccgctctcatcctggctgcactcattgcccagccagtagtggaggtcatactgcagatttccgttcctcagctgcactgtcttcaggatgacgtaggcgtcgcccgtgaagaagtctccataaaggttggtgggcacgggcaccagatcgaacttctccacacgccagatctgcaggccaggctccttcccacccacaaatttcatttcttggaagaggagaagaggatgcaccagggtctgcaggaggctgttggagatgaagtggttaaaaatggggaggctattacacatgcactggggctggggccggggagggtgcaggagggttaggctggagtcgaggacaaaaatcagcaggtgcaggtcacctctggccggagaagagatccgcgcctcgggcacccgcccctggggcgcccccgcctgggacgccccccgcgacgcagtggccgcgcggacgggcagcgacagcgcgcacagcgccagggacagcgcgcaaagcagcgcgggcgcggggcggtgcggagccat

SEQ ID NO: 151987 - DNA, 510 bp, Homo sapiens; identical to SEQ ID NO: 123420

SEQ ID NO: 151988 - DNA, 447 bp, Homo sapiens; identical to SEQ ID NO: 123421

SEQ ID NO: 151989 - DNA, 800 bp, Homo sapiens
aggatccttaataaattaatccccccccccccgctttcctttcgctgctgcggccgcagccatgcagtatgctcaggcttcagaagatggctcgcctctaggtgtcctccggctgtggcaagaagaaggtctggttagaccccaatgagaccaatgaaatcgccaatgccaactcccgtcagcagatcccggaagctcatcaaagatgggcctgatcatccgcaagcctgtttgacgggtccattcccgggctcgatgccggaaaaacacccttggcccgccggaagggcacggcacactgggcataggtaagcgggaagggtacagcccaatgccccgaatgcccagagaaaggtcacatggatgaaggagaatgaaggattttggcgccggcttgcttcagaaagataccggtgaaatctaaagaagattcgattcgccacattgttatcacaagccttgtaccctgaagggtgaagggggaatgttgtttcaaaaacaaggcgggtttttcatgggaacacattccacaagcttgaaggcagacaaaggccccgcaagaaagctccctggcttgaccaggcttgaggccccgcaggtcttaagaccaaggaaagcacggaaagcgccagtgaagagcggcttccagggcaaaggaaggaggagatcaatcaaagactttattccaaggaggaagagaccaagaaataaaacctcccactttgtctgtacatactgggcctctgtgattacatagatcagccattaaaataaaacaagccttaaaaaaaaaaaaaacc

SEQ ID NO: 151990 - DNA, 2423 bp, Homo sapiens
  misc_feature (1)...(2423): n = a,t,c or g
ctcatcattactccaagcttggcacgagggtctcattcatgcccagatgaaggccaatgccacgcagcctaaaggggttgtctctggtctcctacctatacccacctttcagtgtgtctgcctagaaggaaatgagtaatgacctctcacagtccctcaggttaccctcactgtctacaccttactcctcttctgtatgcttaacaccatctcaccaaaccagggcctactttatgttcctagcagtagctcacaggggtatggtgtgtttgtgtaacttttcagcaccttctctttttcctttcaatgatgcagggcaattctgcacagacttacaaactgtgcatgtaaaagtgtaaaagcatgtatcctcttattgtagtcttaaaaagctcgtggaatctagggacacagaagattctgtggcacagatttaggtacagagcaaaatactcactggaaaaatcaagtattggctagctaccacggggatttgatcctagctggcaaacgtggaactccgcaaatacttggagccattaattatgtatacttgttttattcataatttgtcatgttctgggataccaaaagtaataatggctgaacttaacaaaatttgtaacctcatcttaatatccactgatccatctcattcaatggtaacagtcaatgttttctaaaaggaacataaaaaccaacatgcacacaattgcacagttttcataaaggtctatttcattattggtgggtagcggcatttaaccagttaaatacatttaaataatgtataggtgactgcaggactgcagcaattggtatactagataaccaactagaaaccagctaacaaagaactggtctaaatacttaaaatacagctcttggttgagatcatcctttggttttggatcaaccttcctgggggggaaaaaagcctgctggctgggtcacaatgggaaatattattaagggccaaatcttctgatatcccattcccaaaaggtttcctttcagctgggattaagcctccaacttccaggggggagccaacccttgtgggcctccagcattaaatgctcttcccatctaccagaggcagaggagtgtaagttttcacaccagggcctcaggagttttgagtattagcctacttccaattaaggctagaaagtgttgacttttgcagaaaatggaagccagtgggatccaacttgatattttaggcgcaatgcccaaaacgagtgccagttgggtaccctgatgtcccaagcaaaggtttacttgaagtgtccaagatcttcacaaactttctggataaattgatccctccaaattctgtcccatcattgacatttgtggtgtagctggaaagtccccagtcctgtaagcccactgcaaagttattccttgtcagctttgatttggcactgtcaaaggtcatctggtagccagcaagccagccctcataaccaaagacagctgaaccatggattgcaggtccagcaaaatcaaagtcaacatcacaaccaatggtttatacactccctcttgtaagaagacttgaattttaccacttttctttcctgtgtttgggtgagaaaggtagtatccaatgtccagtttcaaacccttgaacaaatctggtccttcaaattgccgatttcctgttccccagaatgttaatccagtgttcccactttttctgtgaaaagtcagaccatactcaacaccacttgtaatttggtctcccaaggtccccagtaactttaccaagtgtcttgtattagatgaaccggacggttgaaaattccacgccactgcaagactttgttttcacatccagtttcaccaacccaaaaccaaatcctttgttgaaaatatctctggcagctttgccaaggtcagcatatgatggaggaatacacattggacgcgcgcaagtctgtccgtgggtcgccatggcgaggccgcgggcggaacggtgtctccttcacttcgccctccagctgctgcagctgcagcccgaccgcgagcgtgccaagcggcttcagcagctagcggagcggtggcggcggcccccctcaggacaccaccagattcccctcttcccgcggcctcgccatggcgacccacggacagacttgcgcgcgtccaatgtgtattcctccatcatatgctgaccttggcaaagctgccagagatattttcaacaaaggatttggttttggcgtggtgaaanctgatgtgaaaacaaagtcttgcagtggcgtggaattttcaacgtccgggtcatctaatacagacacttggtaagctactgggaccttggagaccatatacctgaggtgcgagcattggcagactttcacagacttgggcaacactgattgcactttgggaaatgatgtggaattggagac

SEQ ID NO: 151991 - DNA, 419 bp, Homo sapiens
gatggcatcaggcagggcacgctgcacctcaaatctccggaactgggtggtggagcaagtggagagtgggcagtttcccggagtgtgctgggatgatacagctaagaccatgttccggattccctggaaacatgcaggcctgggcaatatttaagggaaagtataaggagggggacacaggaggtccagctgtctggaagactcgcctgcgctgtgcactcaacaagagttctgaatttaaggaggttcctgagaggggccgcatggatgttgctgagccctacaaggtgtatcagttgctgccaccaggaatcgtctctggccagccagggactcaaaaagtaccatcaaagcgacagcacagttctgtgttctctgagaggaaagaggaagaggatgccattgcaaactgcacactt

SEQ ID NO: 151992 - DNA, 431 bp, Homo sapiens
cagccaggagttaagctgaggtcgactgagccctgcgacagcctggacagcaactcaggcctgggcaatatttaagggaaagtataaggagggggacacaggaggtccagctgtctggaagactcgcctgcgctgtgcactcaacaagagttctgaatttaaggaggttcctgagaggggccgcatggatgttgctgagccctacaaggtgtatcagttgctgccaccaggaatcgtctctggccagccagggactcagaatgtaccatcaaagcgacagcacagttctgtgtcctctgagaggaaggaggaagaggatgccatgcagaactgcacactcagtccctctgtgctccaggactccctcaataatgaggaggagggggccagtgggggagcagtccattcagacattgggagcagcagcagca

SEQ ID NO: 151993 - DNA, 400 bp, Homo sapiens
ccagtgtggtggaattcgtcgggctgtgctgtgatctgctacttctaagcacttatatgaggcaggggcaccctttcctatttgcacatgggtgagtagcacttagttccaagtacttctgaccttgcagctcctgctctggcaagaccccctcctacctctctccatcatgggttcctcactattgcctccctgcctgtggccctctctcttctttttgttcttcgaacccttgaccctttctctttcagacttggtcaggtactttcagggcctgggccccccaccgaagttccaggtaacactgaatttctgggaagagagccatggctccagccatactccacagaatcttatcacagtgaagatggagcaggcctttgcccgatacttgctggag

SEQ ID NO: 151994 - DNA, 457 bp, Homo sapiens
agcgacctcggctggcccagcctcccatcttggtggtggattcccgagatgctggcatttgcctgcaaccccttcagcagggggatgctttgctggcctctgcccaaagtcaagtctggtactgtattcactgtaccttctgcaactcgagccctggctgggtgtgtgttatgtgcaaccggactagtagccccattccagcacaacatgccccccggcacctatgctagttttttgaaaaagggaccccccaagcctgggcccccacgacgccttagtgcccccctgcccagttcctgtggagatcctgagaagcagcgccaagacaagatgcgggaagaaggcctccagctagtgagcatgatccgggaaggggaagccgcaggtgcctgtccagaggagatcttctcggctctgcagtactcgggcactgaggtgcctctgcagtgggtgcgct

SEQ ID NO: 151995 - DNA, 693 bp, Homo sapiens
ggaagggtggggggtgccattggctttgagaggcacaggctattgaagagtggccccggggaagagaagaggtcaacgggatgtaaagcacaactctctgtccccttaccctttgcttgctcctccaatgactccatctcccctcacccttacacccctcacgcaggggttcctgagaggccaggaccccaacaagatccaacttcctctctcccatctgggtttctgccagaaatgtccagagcctaactgcagggtgaaaaagtccctgcacggccaccaccctcgagactgactcttctacctagcggactggactgctctccggcttcagaagctgctacaggtcagaggtggccaggagagaagaagacagggcccagggtgggcaagaatggaaaaggctccgtgctaggaattgcaacagggacttggcatcaaggggaatgtaacacccatctgtctctcctcctcaggacaataacgtcatgtttaatacagagcctccagctggggcccgggcagtccctggaggcggctgccgagtgatagagcagaaggaggttcccaatgggctcagggacgaagcttgtggcaaggaaactccagctggctatgccggcctgtgccaggcacactacaaagagtatcttgtgagcctcatcaatgcccactcgctggacccagccacct

SEQ ID NO: 151996 - DNA, 4434 bp, Homo sapiens
  misc_feature (1)...(4434): n = a,t,c or g
atgccgggggaggaagaggagcgggccttcctggtggcccgcgaggagctggcgagcgccctgaggagggattccgggcaggcgttttccctggagcagctccggccgctactagccagctctctgccgctagccgcccgctacctgcagctggacgccgcacgccttgtccgctgcaacgctcatggggagccccgaaactacctcaacaccctgtccacggctctgaacatcctggagaaatacggccgcaaccttctcagccctcagcggcctcggtactggcgtggtgtcaagtttaataaccctgtctttcgcagcacggtggatgctgtgcaggggggccgagatgtgctgcgattatatggctacacagaggagcaaccagatgggttgagcttccccgaagggcaggaggagccagatgagcaccaggttgctacagtcacactggaagtactgctgcttcggacagagctcagcctgctattgcagaatactcatccaagacagcaggcactggagcagctgttggaagacaaggttgaagatgatatgctgcagctttcagaatttgaccccctattgagagagattgctcctggccccctcaccacaccctctgtcccaggtattattggtcctaaattggggaccagctctttggaaaagggaccccccaagcctgggcccccacgacgccttagtgcccccctgcccagttcctgtggagatcctgagaagcagcgccaagacaagatgcgggaagaaggcctccagctagtgagcatgatccgggaaggggaagccgcaggtgcctgtccagaggagatcttctcggctctgcagtactcgggcactgaggtgcctctgcagtggttgcgctcagaactgccctacgtcctggagatggtggctgagctggctggacagcaggaccctgggctgggtgccttttcctgtcaggaggcccggagagcctggctggatcgtcatggcaaccttgatgaagctgtggaggagtgtgtgaggaccaggcgaaggaaggtgcaggagctccagtctctaggctttgggcctgaggaggggtctctccaggcattgttccagcacggaggtgatgtgtcacgggccctgactgagctacagcgccaacgcctagagcccttccgccagcgcctctgggacagtggccctgagcccaccccttcctgggatgggccagacaagcagagcctggtcaggcggcttttggcagtctacgcactccccagctggggccgggcagagctggcactgtcactgctgcaggagacacccaggaactatgagttgggggatgtggtagaagctgtgaggcacagccagggaccgggccttcctgcgccgcttgcttgcccagggagtgtgccgtgtgtggctggggcccttgcccaacaaaccggatgcaggccctgacttcctgttgagtgcaccatctgtcgtgactgcttccgccagcacttcaccatcgccttgaaggagaagcacatcacagacatggtgtgccctgcctgtggccgccccgacctcaccgatgacacacagttgctcagctacttctctacccttgacatccagcttcgcgagagcctagagccagatgcctatgcgttgttccataagaagctgaccgagggtgtgctgatgcgggaccccaagttcttgtggtgtgcccagtggctcctttggcttcatatatgagcgtgagcagctggaggcaacttgtccccaagtgtcacccagaccttcctgttgttgctgcaagcgccagtgggaggagcagcaccgaggtcggagctgtgaggacttccagaactggaaacgcatgaacgacccagaataccaggcccagggcctagcaatgtatcttcaggaaaacggcattgactgccccaaatgcaagttctcgtacgccctggcccgaggaggctgcatgcacctttcactgtacccagtgccgccaccagttctgcagcggctgctacaatgccttttacgccaagaaataaattgtccagaagcctaacttgcagggttgaaaaagtccctgcacggccacccaccctcgagacttggcctcttctacctgcgggactggactgctctccggcttcagaagctgctacattacaataacgtcatgtttaatacagagcctccagctggggcccgggcagtccctggaggcggctgccgagtgatagagcagaaaggaggttccccaatggggtcaagggcgaaagcttgtggcaaggaaactcccagctggctatgccggcctgtgcccagggcacacttacaaagagtatcttgttgagcctcattcaattgcccactcggttggacccagccaccttgtatgaggtggaagagctggagacgggccactgagcgctacctgcacgtacgcccccagcctttggctggacgagggatccccctgcttaccaggcccgcttgttacagaagctgacagaagaggtacccttgggacagagtatcccccgcaggcggaagtagctgagggcaagggtcccgatgagggtcccatggcctgctccctcaggaacagctccagcaccaataaagaggcatcttaccacccaggcttcttggtggtccttcttcctgaatttgactggtatttgaagtcacccaatatgtatcaggtgggcactgtgggggaatgcagatgcacaggtgtacacagcagtccagaggtcccaggcctgactccaggaaactggcctccctggggaagccacggtgtcacccagaggatggcatcaggtatgggctcgctgcacccgaaaactccggaactgggtggtggagcaagtggagagtgggcagtttcccggagtgtgctgggatgatacagctaagaccatgttccggattccctggaaacatgcaggcaagcaggacttccgggaggaccaggatgctgccttcttcaaggcctgggcaatatttaagggaaagtataaggagggggacacaggaggtccagctgtttggaaaacttgccttgtgctgtgcactcaacaagagttttgattttaaggaggttcctgagaggggccgcatggatgttgctgagccctacaaggtgtatcagttgctgccaccaggaatacttctctggccattccagggactcagaaagtaccatcaaagcgacagcacagttctgtgtcctctgagaaggaaggaaggagaaggatgccatgcagaactgcacactcagtccctctgtgctccaaggactccctcaataatgaagaaggaggggggcagtgggggagcagtccatttcagacatttgggagcagcagcagcagcagcagccctgagaccacaaggaagattacagacacaactgaaggccccctttcaaggggatcagaaggtccctggagtttctgccttcctccagagccagactaatcactgctgctcaccttcatactacaacgggcgcgtggtgggcgaggcccaggtgcaaagcctggattgccgccttgtggctgagccctcaggctctgagagcagcatggagcaggtgctgttccccaagcctggcccactggagcccacgcagcgcctgctgagccaggcttagaaggggcatcctagtggccagcaccccccagggcctctttcgttgcagcgccttttgccccatccccatcttctggggaattgcaccccagggntccacctggggccaggcccgcatctgctgcccagcaacgagtgcgtggagctcttcagaaccgcctacttctgcagagacttggtcaggtactttcagggcctgggccccccaccgaagtttccaggtaacactgaatttctgggaagagagccatggctccagccatactccacagaatcttatcacagtgaagatggagcaggcctttgcccgatacttgctggagcagactccagagcagcaggcagccattctgtccctggtgtagagcctgggggacccatcttccacctcacctctttgttcttcctgtctcctttgaagtagactcattcttcacacgattgacctgtcctctttgtgataattctcagtagttgtccggtgataatcgtgtcctgaaaatcctcgcacacactgggctggtggagaactcaaggctaattttttatccttttttttttttttaattttgagatatacgccctctttcaactgtaaaggggcctgggaatttcaaatggtgttaacccagggggcctttccctcttccctgacctcccaactctaaagccaagcactttatattttcctcttagatattcactaaggacttaaaataaaattttattgaaagaggaaaaaaaaaaaaaaaaaaaaaaaaaaaaaaa

SEQ ID NO: 151997 - DNA, 598 bp, Homo sapiens; identical to SEQ ID NO: 141666
  misc_feature (1)...(598): n = a,t,c or g

SEQ ID NO: 151998 - DNA, 408 bp, Homo sapiens
  misc_feature (1)...(408): n = a,t,c or g
ttaaaaacccagatttccagttttcttccaaactttcaacgagcgctttgccggtttaaatttccatgttcccacaacaaaaaaacccccctccctcctggttttttcagggttggttttttaaggggccagaggggcatttttatgccttcttagggattttaaatgccctttgttgggggttaaccccaaatcccccctttggtttttttggggaggggcctccccctaaaatccccttggggtcccttttgggctcagggttccaaaggcaaaggccccccannnnnnnnnnnnnnnnnnnnnnnaaaccttccttaaagattctttgatgctttgctctatccctgtagacctggtctttttccccccagtttttttcttttttacattctgggttgctatttt

SEQ ID NO: 151999 - DNA, 1581 bp, Homo sapiens
  misc_feature (1)...(1581): n = a,t,c or g
gggtggaattcttctcgagccagagagctgagctctacgcgacgcctctgacgcccgcgcctgggcctaacgggggaattcccgggtggaccctttggttggccctgccaaggccggggaacctaagaaaggggcccggccccttgagcctgcaagaagtggacgagcagccgcagcacccgctgcatgtcacctacgccggggcggcggtcgcgacgagctgggcaaagtgctgacgcccacccaggttaagaatagacccaccaagcatttcgtgggatggtcttgattcaagggaaagctctacaccttggtcctgacaagacccggatgctcccaagcaaggaaaggatccccaaatacagagaattggcatcatttccttggttggtcaacattgaaagggcaaatgacatcagcaantggcacagtcctctccggattatgttgggctcgggggcctcccaaagggcacaggcctccaccgcctatgtctggctggttttacgagcagggacaggccgctaaaagtgtgacgagccccatccttcagcaacccgatcttggagaccaccgtggcaaaattcaaaggtgggcgtcccttcccgttaaaaagtaatgaagctccagggcccccggtggctgggcaccgtgttacccccagcccgaagtggggatgaaccaatgtgcccccaaactgtaacgaagcagctgtcctggggaaagtagggggttaagcttgggggaccctgaactggcccctggaggcccccaagcccatgttcccccagtttcagttgtttgcatgtataatagatttctccctcttcctgccccccttggcatgggtgagaccctgaccagtcagatggtaagttgagggtgacttttccctgctggcctggccctttataattttactcactcactctgatttatgttttgatcgaaatttgaacttcattttggggggtatttttggtactgtgatggggtcatcaaattattaatctgaaaatagcaacccagaatgtaaaaaaagaaaaaaactgggggggaaaaaaagacccaggtctacagtgattagagcaaaagcatcaaaagaatcttttaaggaaggtttaaaaaaaaaaaaaaaaaaaaaaagattggttgcctctgcctttgtgatcctgagtcccagaatggtacacaatgtgattttatgggtgatgtcactcacctaggacaaccagaggctgggcattgaggctaacctccaacacagtgcatctcagatgcctcagtaggcatcaggtatgtcactctggtccctttaaagagcaatcctgggaagaagcaggagggagggtggctttgctgttgttggggacattggcaatcttagaccggcagcagcgcctcgcttgacagcttggggaggaaaccctgagatcctgtgtttttttaaatttgatcgttccttccatgggggggtaagaaaagcctgggtctggagttgcctgaatgttgcattaattgtgctgtttgcttgtagttgaataaaaatagaaacctgaatgaaaaaaaaaaaaaaaagat

SEQ ID NO: 152000 - DNA, 2648 bp, Homo sapiens; identical to SEQ ID NO: 133665

SEQ ID NO: 152001 - DNA, 3411 bp, Homo sapiens
atgaaactcatggaaacacttaaccagtgcataaacgctggtcatgaaatgacgaaggctatcgccattgcacagtttaatgatgacagcccggaagcgaggaaaataacccggcgctggagaataggtgaagcagcggatttagttggggtttcttctcaggctatcagagatgccgagaaagcagggcgactaccgcacccggatatggaaattcgaggacgggttgagcaacgtgttggttatacaattgaacaaattaatcatatgcgtgatgtgtttggtacgcgattgcgacgtgctgaagacgtatttccaccggtgatcggggttgctgcccataaaggtggcgtttacaaaacctcagtttctgttcatcttgctcaggatctggctctgaaggggctacgtgttttgctcgtggaaggtaacgacccccagggaacagcctcaatgtatcacggatgggtaccagatcttcatattcatgcagaagacactctcctgcctttctatcttggggaaaaggacgatgtcacttatgcaataaagcccacttgctggccggggcttgacattattccttcctgtctggctctgcaccgtattgaaactgagttaatgggcaaatttgatgaaggtaaactgcccaccgatccacacctgatgctccgactggccattgaaactgttgctcatgactatgatgtcatagttattgacagcgcgcctaacctgggtatcggcacgattaatgtcgtatgtgctgctgatgtgctgattgttcccacgcctgctgagttgtttgactacacctccgcactgcagtttttcgatatgcttcgtgatctgctcaagaacgttgatcttaaagggttcgagcctgatagtgcccacgaccctccggctgtccacctcagcaatggcccaggacaagagcctatcgctgtcatgacctttgacctcaccaagatcacaaaaacctcctcctcctttgaggttcgaacctgggacccagagggagtgattttttatggggataccaaccctaaggatgactggtttatgctgggacttcgagacggcaggcctgagatccaactgcacaatcactgggcccagcttacggtgggtgctggaccacggctggatgatgggagatggcaccaggtggaagtcaagatggagggggactctgtgctgctggaggtggatggggaggaggtgctgcgcctgagacaggtctctgggcccctgaccagcaaacgccatcccatcatgaggattgcgcttggggggctgctcttccccgcttccaaccttcggttgccgctggttcctgccctggatggctgcctgcgccgggattcctggctggacaaacaggccgagatctcagcatctgcccccactagcctcagaagctgtgatgtagaatcaaatcccgggatatttctccctccagggactcaggcagaattcaatctccgaggctcttcaggatccaagtccgtaggccctttaaggggtctagttgccgtttgcgaggccctgggactttggtcccagacagcggggatccggatggcttccgtgcggatccgagaggccaaggagggagactgtggagatatcctgaggctgattcgggagctagccgaattcgaaaaactctcggatcaggtgaagatcagtgaagaagggccctgcgtggtgggctatgggatatactatttcatctacagtacatggaagggacgcaccatttatctggaggatatctatgtgatgccagaatatcggggtcaagggattggttccaaaataatcaaaaaggtggctgaggtggccttggataagggctgctcccaattccgcctggccgtcctggactggaaccagagggccatggacttgtacaaggccctaggagcccaagatctgacggaagctgagggctggcacttcttctgctttcaaggagaggcaacgagaaagttggcaggaaactggcagagtgagagacaaattccttttggggatgtccggctaccacctccagctgactataataaggagatcacagaaggggatgaagtggaggtttattctcgagccaatgaacaggaaccttgtggctggtggctggcccgggtgcggatgatgaagggagataaagttgctcaggtcatccacaacttctccttttttaccatgtgccagttctatgtcattgaatatgctgcctgtgatgccacctacaatgaaattgttaccctggagcgacttcggccagttaatcccaatccccttgcaaccaaaggcagcttcttcaaggttaccatggctgtgcccgaggatctgagagaagcctgctccaatgaaaacgtccataaagagttcaagaaagccctgggagccaactgcatctttctcaacatcacaaacagtgagctcttcattctgtcaaccacagaagcccctgtgaagcgagcatctctgctgggtgatatgcatttccgaagcctgcgcaccaaactgctacttatgtcccgcaatgaagaagctaccaagcacctagagaattgtattcgtgtgcgtaatattgaaacaaaactcgtcactggaaaagtaggtactcaaaacacacaactgcttggtaatacgcttactggaagcactgccgccaaaggcgttggcgtactcattgaaggtttagcaaccagtaaaaatccgctaatgacattaaaacctaatgatacgaattctgtttatatagattatgaaaccgaagatgacacctccgatggggtttaccctaatcaaggtaacgtcacatcacagcctcttcatttccaggcaacattaaagcaagacgggaatattgctatcgaacccggcgaatttaaagccaccagtactttccaggcagaggccaagctgccctcgaaacatccaatctgctccaagttcagaggcagcctccagcgcatgggaagaggctattggattcagctgttcttcagcccacccgttcatcctgactatgggaaacaagaagctaaagcagacttatctttcagttttgtggcaaatgaggtactgagtgaaaggagagaagccttcatctccatagattcagaagagggagcattgctagaagacaatggcatgctcttggctcactggatcatctacgtctcggagatatgcgattattgtaacttacgcttccagggatctagcgttacaggaatgatcagcatggacggttcttattgctttgacattcatgtttcatctagtgaacttttctcatctgtcacggagcatttgctgaggaccttttcatctcatatcatccctcgtttagagtgccgttcagatgctactacctcagagaaagattga

SEQ ID NO: 152002 - DNA, 1212 bp, Homo sapiens
tatgcccggacagaggatcgcctcgctggcctactctctcctcccgtacggcgccggaatcccagctccacttaccaggccgcggctaccccgccgtcccccccgactcccgccaccccgctctctcaggctcttcaggatccaagtccgtaggccctttaaggggtctagttgccgtttgcgaggccctgggactttggtcccagacagcggggatccggatggcttccgtgcggatccgagaggccaaggagggagactgtggagatatcctgaggctgattcgggtgaaaactgcaggccggtaacccgggggtcagagtggcgcggccagagcggggtcctaagaggcgggggcagggggaggggctcgccttgggaacctgctcggggagcagcggggcccttctgctctaatctagcttccggacccacgccttaagagctagccgaattcgaaaaactctcggatcaggtgaagatcagtgaagaagccctgagagcagatggctttggagacaatcctttctatcactgtttggtagcagagattcttccagcgcccgggaagctactgggtaagagcacctggcccttagaagtccacctctccagccggcctcagaggtctccccacaggcttccagaagccttactccccttttctctctctcagggccctgcgtggtgggctatgggatatactatttcatctacagtacatggaagggacgcaccatttatctggaggatatctatgtgatgccggaatatcggggtactgggcagaagctgaggctggggtgggagcaaagcaccccacagaccccactgttatcccctgtccccagagcccagccggtgtcattttctgatccccttcagctcaaacaatagctattttttgcctctttctctccacaacaggtcaagggattggttccaaaataatcaaaaaggtggctgaggtggccttggataagggctgctcccaattccgcctggccgtcctggactggaaccagagggccatggacttgtacaaggccctaggagcccaagatctgacggaagctgagggctggcacttcttctgctttcaaggagaggcaacgagaaagttggcaggaaagtgacgccatccctaggaggatctctgtcttgagtttctccttccccatcagctgaagcactcttcagagactacgtcca

SEQ ID NO: 152003 - DNA, 1046 bp, Homo sapiens; identical to SEQ ID NO: 135480

SEQ ID NO: 152004 - DNA, 443 bp, Homo sapiens; identical to SEQ ID NO: 146456
  misc_feature (1)...(443): n = a,t,c or g

SEQ ID NO: 152005 - DNA, 429 bp, Homo sapiens; identical to SEQ ID NO: 146457
  misc_feature (1)...(429): n = a,t,c or g

SEQ ID NO: 152006 - DNA, 670 bp, Homo sapiens; identical to SEQ ID NO: 146458

SEQ ID NO: 152007 - DNA, 711 bp, Homo sapiens; identical to SEQ ID NO: 146459

SEQ ID NO: 152008 - DNA, 1369 bp, Homo sapiens
tcagaagtctttgtggtctgctgccaagacatgtccaaagatgacctcagacacatcttccggagccacagtggccctcttcaagacttctttgatgacagtggagcccaggtcctggacaggaacagcagctaaggcaccattgaaggaacctacaatagaaaggcggagagcgtggacatcacaagcctgcgggtaatacgggaaccacgagcaggggagcctcatgaccctgtttggcaaggccacgcgaggaggcagtgccctctcctcccacacgttcctacacctgctggtctgagcaaaggtcaaggtgggtgccacaactcgcagcagccgagggctggacaggcgacctccagaacggcctatggacgccgctgtagcccttctatttgcccaaatccgaaggacggcttcctccacatacgcccctctcctacacaagtccggccctcggcgctcctgccgaagcagcaggcgcctcggactctgcgcggctcccgccggccactcacctatgatggtccgcgccgccgagacgatgaccacaggatctgagcctgcattcatcttgcttctcctgccgccgactgccctgcgctgcctgcaagctaggcaaagctcctcctcgcagcccacaggcctgccgcgggcgggacctgagctcaggactggaatcccacgggcgagaatctcgagtgcgagcccggcccgcagcgggtctcagcacagcttctgatggggtccttttgctctcggcggcttcgggaggtcctatgcgtttctcctggcgccagtcattcgctcgcgtgaggggcttgctaggagcgtctcggtgcgagccccctgccttctaagatcaactctggctgtgaacgggtgaggacgccgggagcgtcttagcgtcacaaaagttcctttggttgacgtttggacagtgaaaggagcatgtaacaagtggggtcagttttgtttaaaaccctttctgacttcccagcctcttactgggcaaagttcataatttttctgagctttctagggtttccaggcaagcttatgaggggccaccgttacagcaacttgttgggaacacctggatagtggaacaagaaagctttgtcacaaagtcatgaaggggaaaactgttgacggacctggagaatcttcctgaagaactttaaagttgattgaaagaatcattaaatcctggaaacctacattaagactttgcagagatatgcggatgggtcatataaatcagagaaggtaaagagtgtaggccccagaggtggggcaatagagaaggaaaaaaattgcctaacagtgccttttcaggagaaatctttagggtctggaatagtggtga

SEQ ID NO: 152009 - DNA, 3444 bp, Homo sapiens
acgtgtatcgctgccgtcaagatggaggggcctttgtccgtgttcggtgaccgcagcactggggaaacgatccgctcccaaaacgttatggctgcagcttcgattgccaatattgtaaaaagttctcttggtccagttggcttggataaaatgttggtggatgatattggtgatgtaaccattactaacgatggtgcaaccatcctgaagttactggaggtagaacatcctgcagctaaagttctttgtgagctggctgatctgcaagacaaagaagttggagatggaactacttcagtggttattattgcagcagaactcctaaaaaatgcagatgaattagtcaaacagaaaattcatcccacatcagttattagtggctatcgacttgcttgcaaggaagcagtgcgttatatcaatgaaaacctaattgttaacacagatgaactgggaagagattgcctgattaatgctgctaagacatccatgtcttccaaaatcattgggataaatggtgatttctttgctaacatggtagtagatgctgtacttgctattaaatacacagacataagaggccagccacgctatccagtcaactctgttaatattttgaaagcccatgggagaagtcaaatggagagtatgctcatcagtggctatgcactcaactgtgtggtgggatcccagggcatgcccaagagaatcgtaaatgcaaaaattgcttgccttgacttcagcctgcaaaaaacaaaaatgaagcttggtgtacaggtggtcattacagaccctgaaaaactggaccaaattagacagagagaatcagatatcaccaaggagagaattcagaagatcctggcaactggtgccaatgttattctaaccactggtggaattgatgatatgtgtctgaagtattttgtggaggctggtgctatggcagttagaagagttttaaaaagggaccttaaacgcattgccaaagcttctggagcaactattctgtcaaccctggccaatgtggaaggttaagaacgttttgaaggtgcaatgtgggaccaggcagaagaagtggtacaggagagaatttgtgatgatgagctgatcttaatcaaaagtactaaggcttcgtacgtctgcatcgatcatctcacgtgtgccaattgattccatgtgtgatgagatggagcgctctttaccatgatgcactttgctgtagtgaagagcagttctggagtcaaaaatctgtggttccccgttgggggtgctgtagaagcagccctttccatatacccttgaaaactatgccaaccagcatggggtctcgggaacagcttgcgattgccagagtttgcaagatcactctctggttattccccaataccactagcagttaatgctgcccaggactccacagatctggttggcaaaaattaaagagccttttccataatgaggcccccgggttaaccccagaaccgtaaaaatcctaaaatggattggtcttgatttgagcaatggtaaaccctcgagacaacaaacaagcaggggtgtttgaacccaacccatagttaaagttaagagtttgaaatttgcaacagaagctgcaatcacccattcttcgaattgatgatcttattaaattacatccgagaaagtaaagatgataaacatggaagttatgaagatgctgttcactctggagcccttaatgattgatctgatgtttcccttttatttataacaatgttaaatgcaattgtcttgtaccttggagtggagtattacacattaaagtaaagtaccaagcttgtaaacttggggtttttgtgatgtaggaaatgggtttccaatcttgtacttttggtcctctgatttcacatattgcaacctagtacttttattagtttaaaaaagaaattgaggttgttcaaagtttaaagcaattcattctctctgaacacacattgtcattctctctgaacacacattgctattcccaatcccaccccccaaatgcacagggctgcaaacaccacgacttctgcccattctctccagtggtgtgtaacagggtcacaaagaattcgacagccagatgctccaagaggggtgggcccaagggcttatagccccctcctttcaatattgaccttctctggggggtaatcccaaaggtctttaactattggcagcagaggacagctgcaaaggcttcattgatttcaaatatggtcaacatcttccaggtggaccaacctgcttttgttaacagcttgctttatgggctgggaattgggtcctatttcccataatgggaaggctccacacccacttggggaccagggggaactatccgtggctaaagggtgtaaggcccacggtttatcaggtttctggactttcttcataagaacgaacagctggaagcaccattcatttattcctgaagcaattggctggggtgactgtttcccgttccatcagtaagaaagtaaggctttagcttggacatggcttcctatgttgctcccatggcgaggaaactcatctgttttaacttcaataagacctcttctaagttgacaccaaaactggtacaatctctttgtcaaaatggccagctttctgtgcattctctgtcctgttctgggacagaactgcaaccttgtcctgatcttctctactcacttgccattttttggctacattttcagctgtaatacccatatgacagttgtgaaatgcatctgtaagaccatcacagagtatactgtcagtcaagtggcatctcacctatctttactcctgttctcaagtaagccaagtgaggagccttgctcatattttccatggcctccggcaaccacaatgctgggagtctccctatccctattgactggaactgcaaaggcacacagcttttaggcctgaccccacagatcatctggcagctcccatgctggaacagagtagagaattcctgcacccacactggcttgtctaacaggattctggccacagcctgctgccaagacatgtccatagatgacctcagacacatcttccggagccacagtggccctcttcaagacttctttgatgacagtggagcccaggtcctggacaggaacagcagctaaggcaccattgaaggaacctgctggtctgagcaaaggtcaaggtgggtgccacaactcgcagcagccgagggctggacaggcgacctccagaacggcctagggacgccgctgtagcccttctatttccccaaatccgaaggactggatgcgaccccatgcttcccaaacaaaaggaaccggcgggtcaagggcgttgaaaaaccatgcggcacgaaggagacgaagtcacgacttctagccattgtgtgacagcccgaccccagcccaaagccgggctcagaccacctagcagttccgcccc

SEQ ID NO: 152010 - DNA, 513 bp, Homo sapiens; identical to SEQ ID NO: 146472

SEQ ID NO: 152011 - DNA, 1413 bp, Homo sapiens; identical to SEQ ID NO: 146473

SEQ ID NO: 152012 - DNA, 433 bp, Homo sapiens; identical to SEQ ID NO: 146474
  misc_feature (1)...(433): n = a,t,c or g

SEQ ID NO: 152013 - DNA, 828 bp, Homo sapiens; identical to SEQ ID NO: 146475
  misc_feature (1)...(828): n = a,t,c or g

SEQ ID NO: 152014 - DNA, 2722 bp, Homo sapiens; identical to SEQ ID NO: 146476

SEQ ID NO: 152015 - DNA, 1239 bp, Homo sapiens; identical to SEQ ID NO: 135179

SEQ ID NO: 152016 - DNA, 408 bp, Homo sapiens; identical to SEQ ID NO: 135180
  misc_feature (1)...(408): n = a,t,c or g

SEQ ID NO: 152017 - DNA, 422 bp, Homo sapiens; identical to SEQ ID NO: 135181
  misc_feature (1)...(422): n = a,t,c or g

SEQ ID NO: 152018 - DNA, 492 bp, Homo sapiens; identical to SEQ ID NO: 135182
  misc_feature (1)...(492): n = a,t,c or g

SEQ ID NO: 152019 - DNA, 1286 bp, Homo sapiens; identical to SEQ ID NO: 135183

SEQ ID NO: 152020 - DNA, 6994 bp, Homo sapiens
  misc_feature (1)...(6994): n = a,t,c or g
gacagcctgggcataccatatatctcctgccaactgtggtaatctgcaacttgctaccctgtgaacttgatttttatgttaaaggaatgccaattaatgggacgctgaaacctggcaaggaggcagctctccatacagctgatacatcccagaacattgagctgggggtatcactggagaatttccccctctgtaaagaattgctcattccacctggaacccaaaactatatggtgagaatgcgactctatgacgtcaaccgtcggcagctgaacctcaccatccggattgtgtgtcgagcagaaggatccttaaagatcttcatttctgctccatattggctgattaacaaaacagggttgccactgatcttcagacaggacaatgccaagacagatgctgcaggccagtttgaggagcatgagctggcccgtagcctgagtcctctcttattctgctatgctgacaaagagcagccaaacctctgcacgatgagaatcggaagggggattcatccagaaggcatgccgggctggtgtcagggcttctccctggatggtggtagtggtgtccgagctttgaaagtcatccagcaaggaaaccgcccagggctgatctataacattggtattgatgtcaagaaaggccgaggtcgatacattgatacctgcatggtcatctttgccccccgttacctgttagataataaatcatctcacaagcttgcatttgcacagagggaatttgccaggggacagggaacagccaatcccgaaggttacatttccacccttcctggttccagtgtggtgttccactggcctcggaatgactatgatcagctattgtgtgtcagactgatggacgttcccaattgtatttggtctggaggctttgaagtcaacaagaataattccttccatatcaacatgagggattctcttgggaaaatgcttcttcctacgagtggaaattactctccgaggagctacgtataggatctcatttagtgacacagatcagttacctcctcctttccgaattgacaacttttctaaagtcccggttgtctttactcagcatggcgtagctgaacccaggctccggactgaagtgaagcccatgacttcattggattatgcctgggacgaacccaccttgccaccttttatcactctgactgttaaaggggcagggtcctctgagatcaactgcaacatgaatgatttccaggataatcggcagctttattatgaaaatttcatttacattgctgctacatatacattctctggcttgcaggagggaacaggcaggcctgtggcttccaacaaggccattacctgtgcggagctcgttttggatgtctcacccaagacacaaagagtcattttaaaaaagaaggaaccaggaaagcgttctcagctgtggaggatgacaggaacaggaatgctggcccatgagggctcctcagttcctcacaatcccaataagccctcagccgcccgctccaccgaggggtctgccatcttagatattgctggtctcgctgcagtgactgacaacagatacgagccactgatgctgagaaagcctgaccgcaggcgaagcacaactcagacgtggagtttccgagaaggaaaactgacctgtgggttacatgggttggtcgtccaggccaaaggaggactttctggtttgtttgatggagctgaagttgttcttggtcctgacacttccatggagcttttggggccagttccacctgaacaacaatttattaatcaaaaaatgagacctggttctggaatgttatccatcagagtcatcccagatggaccaactagagcactccagataacagatttctgccaccggaaaagcagccgttcatatgaagtggatgaacttcctgtcaccgaacaagagctgcagaaattaaagaatccagatacagagcaggaattggaagtgcttgtgaggttagaaggtggaattgggttgtccttaattaataaagtcccagaagaactggtctttgcaagtcttacaggaatcaatgtgcactatacacagctggcaaccagtcacatgcttgaactcagcatacaggatgtacaggtggacaatcagctcattggtaccacgcagcccttcatgctctatgtgactcccctgagcaatgagaatgaggtcatcgagaccggcccagctgtgcaagtcaacgcagtgaagttccccagtaagagtgcactgaccaacatctacaagcatctgatgatcacagctcagagattcacagtgcaaattgaggagaaactgctcctcaagctgctaagtttctttggctacgatcaagcagaatcagaggtggaaaaatatgatgaaaacctccatgaaaagacagctgaccaaggtggaacaccaattcgatactactttgaaaatctcaaaatcagcattcctcagatcaagctaagtgtgttcacctccaacaagctcccattggatcttaaggccctaaaaagcaccttggggtttcctttgatacggtttgaagacgctgtgattaatctagatccattcactcgggtacatccctatgagaccaaggagttcatcatcaatgatatcctcaaacatttccaggaggaactcctcagccaggcagctcgaatcctgggatcagtggattttcttggcaatcctatggggcttttgaatgatgtttctgaaggggttactggactgataaaatatggaaatgtcgggggcctcatcagaaatgttacacacggagtatcaaactctgctgccaagtttgctggaacattatcagatggcttagggaagacgatggacaatcggcatcagtcagagcgggagtacatcaggtaccatgcagccacaagtggtgaacaccttgtagccggcatccatgggcctgggctcatgggtatcattgggtgggcttgaccagtgttataacttcgaccagtggaagggtgtgaaaacagaaagggggtgtcagcggtttcatatctggccttggaaaagggcttgttggcactgtaaccaagccagtggcaggcgccctggattttgcatcagaaacagcccaggcggtgagagacacagccacactcagcggccccaggactcaagcacagagggttcggaaaccgcgttgctgcacggggccccaggggctgcttccccgatattctgagagccaggcggaaggacaggagcagctcttcaaactcacagacaacatacaggacgaattcttcatcgctgtggagaacattgacagctactgcgtggcttcatctcctccaaagctgtttacttcctgaaaagtgggagactacgtgggatcgagaagccattttcctaggaagttcaaatacgatgacctctaccactgccttgtctccaaagaccatgggaaggtgtatgtgcaggtgaccaagaaagccgtgagcacgagcagtggagtgtccatccccggcccctcccaccagaagcccatggtccatgtgaaatctgaggtccttgctgtcaagttgtcacaagaaataaactacgcaaagagcctctactatgaaccagcagcttatgttaagactcagcgaaaaccgagagccgctggagctggactcctgaagccccgctgctgagatgggcgctcccgacacagcgcagacccaccaggaggaaagaaggcccagctctcagctgacgatggaggcagaaccggagtcgggtttggggaagttgtcaaggaatgagggaaagtaaatcctcatgaggaaaaagtacaaatggaaatcgtattaatttgtgaggcagggagttattttagattatgggaaataatttttaaaggtattggttaaataacgtttaaaaacatgtactgagatgaatctaatttttagattgccctgtattttgttaacatgtatatatgtacaacagtgtgtttgtaaatatataggaacgtttctgaacagggtctgtgctatgtgtaaaggtttgttaactgtaaagtaatataaagttatattggatcttctattgcactaattctagatgtctaattcaggatactgtctatagaaaggcattcttaaaagttaaagaatagctacgtcttatttttggagactatagtaatcacagtaaagcggcttgtagtgagggctgcggccctgacagggacacctttgacatcgaggatgttcacttgttctgccagctgtgcttcccaggactggcgctggcccttcagaaggatctaggagagggggcttgggagcccacttttaatttctcacccccattttacaaagagtgcttagattcttacaaattatgatgtaagttatccatttggctttttcctaactagtcttaccaaacttagggggaaacctgtgctccattaccacatgggtgcaagtcagcattgtaagttttctcaggttattattattagagaggttggaaacattggtaaactctgttgattgagaaggaaaaaaaaaagtccccattgaactgttgcaacaaattcagaaatccaccataaaagtgctctccctgcctgggcagcaacaacccaagaacaaagccccgggactgttttctttttaataataccacaggcagggcatcgtagctccacagcccgaggggacacaggatgggaaaccccagggntgagaagggagcaggggagagttcccagaaagggggatgaaatagggagtttttaaaaagcctgccgttggtaagtttttcatggaaccaagatttgacaaaggcatctcttatccttggttttaaattcctgctgggagcaaggcctggtatgagcgccctgggtcttgtttttggtgtttcgcttttctgtaaggattaagcagatagggagaagggaaaaggggcctcactttagaatgaatgagtcaccttgtgatttttaaatttttattttaataaagctaatcaatttctacaaccttgtcacatgtagctgagtctgggatgactcagtggatcagtggatgcgtggaaggttttggtgtttataactcatgacccaaatccttccaagacacaaatgaagctaatcttcttcccctccctttcctctcccacttcccctctgtgtctgtgtctgtgtgtgtgtgtgtgtgtgtgtgtgtgcgcgcgcgcgcgtgcatgcagagaggaaggaagggagctttagcacaagtagctacatagtgttcaaggatcagctttcttgaactccgaggcttggttgcctttgctgaactccaagttagtggattgcagaatggaaacttggcttttgcggcactgggtgagttttagtttgtgtgtgtcttgctggggggtggtgatgattgtctcagcactcacgcactgcacaagatggcagcaggatacagcactgcacaagatggcagctcctctgcagcttcctcctcagcctccctcgcttgcacccccacaggtttggcttgtggtttttgtcatcagtaacctactgcctgagatcatgatctcttaaaagatgagactctcggaagggttgattgtatgcgtcagtgagccttctatcaccttctggaacaaagtcacttgaaatctcttgatgagattaaggagtttagtgttactaagaccatctgctttgggccgcagcagtgctgggtgttctcagacctgactgaggaagttagctgcgggctgccctgtgggctggtgcttcaggaggaatccagagaagtgttcagatgccccccttgggctcctttctaattttaatcagctctttaaatagctgcccatctcctgtgattgcacaaccaagcactttgacatttgcaccttaggagaggcagatgttaaaatggaatccaaagaccacctagggcggggctgggtgggagatgggagggccaactgcgagctgctccacttctcagctctcccctgccctgcagccctgggccagacaaggccagaaggtttcaggggcatttgacatcccctcctggttctcaccaggaaaacatccaaagctttggaggaaacaggccctgcccctggctccttaaatgccccgtctctttgtaaactgatattcagccagcaatgcctaagactttgttaagatcatttctactgcttttctttctgcttcaaacacacagttcgtctctgaggaaagtaaaataaatggaataagagtaaatttgggtaaggagatatccaaaagctacccaagtcccttgaccccagcacaagttggccgacccgtgtcaactcccctgggctgtcgctgcttctctgtgctcacttgaagggtgaagccaggccagtgcttcccccaggccctgggcgctggtcactacacagtggaaaacagacaagcggccccttccccaaatcccaaaagtgttcttgctgcttggtgggtgctcatcgcaatgttctgaagggtggcagggccactttgtttgtaggtatgatctgggcctcaaaataccatagtagctgcttgataaaattctaaaaatatctggttctctattatgtaaacacttattacagtcaccaagtgtgtgaagactcttgagtctggttctcatatcagagtcatcatttttcttcctgtggagataaaatgccttaatggacttcccacnnnnnnnnnnnnnnnnnngggggggcgcttttaaggttcccttgggggggccaaactttacgcgggcttggcaaggaaatagttttttccttatggggggcggaattaaaacctacttgggaatttttggaaagaacctttctttttggggggggacttattgggccaaccttccctacaaaatttaaaggctttagggnnnnnnnnnnnttttaaggggaaaagggggtaaaacaacctccaaatccttgctgttgaaaaagtggg

SEQ ID NO: 152021 - DNA, 820 bp, Homo sapiens
  misc_feature (1)...(820): n = a,t,c or g
tttttttttaaaggtatcaaaggcctttattgatttaattttcctttcaacttatcaatgctatcacaaattctaaggaaacaggacttgggcaaaatttttttattatgaagatacagatctaagaacagaaggataattatgtgctagcttatatatagttccttgtaaaaataatgatacatgaaaaattagtagaaaatgaaaatctgcagttatctgatatctgaaaatgttaagcaatttcccctgcatcttagttctaatcacttttgcagaataatcaagcatatttgggtgaagagagtatttaatgattccatttttattaatagtgtagtgtgcccttcagagcttggcgtagtctttaagaatcatctgaagtttctggctcagcatgatgttccctctggccttcagcctgccactaaagaatgccttccacatctcagtttgtagagtttgtcctggatatactggttttgcaaaacgagccttaactgccttgaatcttgacacatcattatctgcaaactgctgtaacacaccgcctgcagaanatccaaatgtacataatccatgttatatgggcttgtcaaaacctgctagactnagcaagttaggatcaatgtgtaagggatccagtcntcactgaggcngtacaaagcancctgattaagagaggtgtatctgtagtacagcatcaggaggtctattaggtatgctacagctactttgactttgtctgatgtccgtttccaccaaagcctncaagagcaaccagaaagaagagagactgattggtgcatataagtcctct

SEQ ID NO: 152022 - DNA, 933 bp, Homo sapiens
atggcgatggatgcgctggcatacacacagatgtttttgttgttgatgaatggcggggactgggttattgcgctggcaaatctcaacacgctgattaaccactcattacagctggtaagtcaggatgcaaacagccgggagatccagttacgctttaccgccaacgacacattaccggaaattcaggccgacccggacaggctgactcagtggggagtagtggagggacagataatcaagaaatacatatgtaaaaatataataggtgtaggtgctgtggagaaaaaaatgagtgaatggaacagaaaatgctttaaggagagactgcaggaagtgaaggagtgcgccttgaggagatctgctgtcgcggcatccctggcagaagaagcagctgaagccaggttactgaggctgcagcaggcatgtacctccctgagtcaatttccaaacagcattgcaggggtacgctgggagcggactcttggagctattgtaagacaaaagaatcacccaatgactcctgaggcagtcaaggctaactggaagaagatctgtgactttgagaatgccagcaagcctcagagtatccaagtctattcttattctgagaaggaacttatatgccacaatcagttctctctctttcttgttggctctggaggctttggtggaaaacggacatcagacaaagtcaaggatcacaggtcctcaccagcaatagaacaaagctggacaaagaatgactttgacaagctgacagaagtaggcttcagaaggttggtaataacaaacttctctgagctaaaggagcatgttcgaacctatcgcaaggaagctaaaaaccttgaaaaaaggttagacgaatggctaactagaataaacagtgtagagaagaccttaaatgacctgatggagccgaaaaccatggcatga

SEQ ID NO: 152023 - DNA, 455 bp, Homo sapiens
tcccgcgtcgacgatttcgtgtcgttgcaggccttattcatgggctcaccgctgaggttcgacgggcgggtggtactggtcaccggcgcggtggcaggtgagcatgcgaaggttggaggccgcgccccttgctgaggcgcagctggctgctcttttcgggccggcatacgcgcgcagccgcagctgaggtcaccccgctgaggtggtggggaggggaatggttattcttgaggcaccgcatctcttgaggaggaaagagccggaaacacctggcctctcaagcaggtacagcccgcttctccccagcaccccggtgtgggcttcccaaggtcctgcctgagaggagaggccaggctgggctgctgattgcaaaactgggtgaaagttctccctgacccttatctgtgggcatcgattgttactcttcctgcaattaactctcttagatctttgcc

SEQ ID NO: 152024 - DNA, 2741 bp, Homo sapiens
cccacgcgtccgtctgtcccgcagttggcgtccagcggctctgcttgttcccgtgtgtgtcattgcaggccttattcatgggctcaccgctgaggttcgacgggcggtttttttctggtcaccggcgcgggggcaggattgggccgagcctatgccctggcttttgcagaaagaggagcgttagttgttgtgaatgatttgggaggggacttcaaaggagttggtaaaggctccttagctgctgataaggttgttgaagaaataagaaggagaggtggaaaagcagtggccaactatgattcagtggaagaaggagataaggttgtgaagacagccctggatgcttttggaagaatagatgttgtggtcaacaatgctggaattctgagggaatcaattcctttgctaggataagtgatgaagactgggatataatccacagagttcatattgcggggttcattccaagtgacaccagcagcatgggaacacatgaagaaacagaagtatggaaggagtattatgacttcatcagcttcaggaatatatggcaactttggccaggccaattatagtgctgcaaagttgggtcttctgggccttgcaaattctcttgcaattgaaggcaggaaaagcaacattcattggaacaccattgctcctaatgcgggatcacggatgactcaaacagttatgcctgaagatcttgtggaagccctgaagccaaagtatgtggcacctcttgtcctttggctttgtcaccagagttgtgaggagaatggtggcttgtttgaggttggagcaggaaggattggaaaattacgctgggagcggactcttggagctattgtaagacaaaagaatcacccaatgactcctgaggcagtcaaggctaactggaagaagatctgtgactttgagaatgccagcaagcctcagagtatccaagaatcaactggcagtataattgaagttctgagtaaaacagattcagaaggaggagtttcagcaaattatactagtcgtgcaacgtctacagcaacatcaggatttgctggagctattggccagaaactccctccattttcttatgcttatacggaactggaagctattatgtatgcccttggagtgggagcgtcaatcaaggatccaaaagatttgaaatttatttatgaaggaagttctgatttctcctgtttgcccaccttcggagttatcataggtcagaaatctatgatgggtggaggattagcagaaattcctggactttcaatcaactttgcaaaggttcttcatggagagcagtacttagagttatataaaccacttcccagagcaggaaaattaaaatgtgaagcagttgttgctgatgtcctagataaaggatccggtgtagtgattattatggatgtctattcttattctgagaaggaacttatatgccacaatcagttctctctctttcttgttggctctggaggctttggtggaaaacggacatcagacaaagtcaaggtagctgtagccatacctaatagacctcctgatgctgtacttacagataccacctctcttaatcaggctgctttgtaccgcctcagtggagactggaatcccttacacattgatcctaactttgctagtctagcaggttttgacaaagcccatattacatgggattatgtacatttgggattttctgccagggcgtgttgttacagcagttttgcagataaatggatgttgttcaaggtttcaagggcaattaaagggctcgttttggcaaaaccagtatatccgggggcaaacttctaccaaacctgagaatgttggaaggaacggaaaccggaattcatttttcaaacccaaggtccaaggaaacttggagacattggtcatttccaaatggcatatgtgggatcttggcacccaacattctgggtacttcagcttaaggacaccctctgaggggccgggaagcttcagagtacctttggtatttgaggaaaataggacgccgcctaaaggatattggggcctgaggtggtgaaagaaagtaaatgctgtatttggagtggcatattaccaaaggcggaaatatttggggctaagtggactattgacctgaaaaagtggttcctgggaaaagttgtaccaagggccttccaaaaaggtgctgctgataccaccattcattactttcagatgaagattttcatgggaggtggtcctggggcaagcttgaccctccaggaaggcattctttagtgggccaggctgaaggccccaggggggaacatccatggcttgagcccaggaaactttcagatggattccttaaagactacgccaagcttctgaagggcacacctacactattaataaaaatggaatccattaaaatacctcctcctcacccccaaatatgccttgattattctgccaaaagttgattaagaactaaagatgcaggggaaattgcttaacattttcgagatatcagaaaactgccgaatttccattttccactaatttttcatggtatcattatttttacaaagggaactatatataagctagcacataattatccttctgttcttagatctgtatcttcataataaaaaaattttgcccaagtcctgtttccttagaatttgtgatagcattgataagtatgaaaggaaaattaaatcaataaaggcctaatgatacctttaaaaaaaaaaaaaaaaaaa

SEQ ID NO: 152025 - DNA, 414 bp, Homo sapiens; identical to SEQ ID NO: 146502

SEQ ID NO: 152026 - DNA, 397 bp, Homo sapiens; identical to SEQ ID NO: 146503
  misc_feature (1)...(397): n = a,t,c or g

SEQ ID NO: 152027 - DNA, 410 bp, Homo sapiens; identical to SEQ ID NO: 146504

SEQ ID NO: 152028 - DNA, 1330 bp, Homo sapiens; identical to SEQ ID NO: 146505

SEQ ID NO: 152029 - DNA, 528 bp, Homo sapiens
cgctgtgggtctcagcagctcgggcggcgggaggagtggcagcggcaaggcagcccggtttcgcgaaggctgtcggcgcgccgcggcccgcaggcacccggcacgcgccttccccgcaggcacccggcacgcgccttccccgccgccacgatgcccaagaggaaggtcagctccgccgaaggcgccgccaaggaagagcccaagaggagatcggcgcggttgtcagctaaacctcctgcaaaagtggaagcgaagccgaaaaaggcagcagcgaagtgtaggtagaagtttagcactgcagtcatcagaagaggcaagattaatttccttgacattgaggagttgttggataattactaaatttgtccttgttaaataaagaaagttctgtttttgtgatccttttaaaaataaagcttcacggaaggtatgagaatagtatttttcaactttaaatttctcattaccagaagaccatgtggtaattctctgtatacagttagaacagcacggaaacttgaaggccta

SEQ ID NO: 152030 - DNA, 1341 bp, Homo sapiens
gaattcgggtctcagcagctcgggcggcgggaggagtggcagcggcaaggcagcccagtttcgcgaaggctgtcggcgcgccgcggcccgcaggcacccggcacgcgccttccccgcaggcacccggcacgcgccttccccgccgccacgatgcccaagaggaaggtcagctccgccgaaggcgccgcctagctagagcccaatagtagatcggcgcggttgtcagctaaacctcctgcaaaaggggaagcgaagccgaaaaaggcagcagcgaaggataaatcttcagacaaaaaaagtgcaaacaaaagggaaaaggggagcaaaagggaagcagggccgaagtggctaaccaagaaactaaagaagacttacctgcggaaaacggggaaacgaagactgaggagagtccaagcctctgatgaagcaggagagaaagaagccaagtctgattaataaccatataccatgtcttatcagtggtccctgtctcccttcttgtacaatccagaggaaatatttttatcaactattttgtaaatgcaaggtttttagtagctctagaaacatttttaagaaggagggaatccccccctcatccccatttttttaaagtgtaaatgctttttttttaagaaggtgaaatcatttgcctggttgtttattttttggtacaaccagaaaaatagtgtggggatatttgaatttatggggaggctctgactgtctccgggtgtccagcttaaccattcccacagatgggggggttagttttttatatccctataaatccaaagcatatttaaatgggccactctggagtccagtccctgccatttaatgtccttgaaccattttaaattacttcctattacccatgttggttttttaggtaggaattggttcccctaaagggaaaccccactctttggatccatggcctctctcttgcccagcaattggtgtgcactccggtaacatcctttggttgtggtagatcctgttttcctaataacgtttgttacctgtgctgtgaaaggattacaggatttggaccatgtagtgtacgtgctatctgcagttgtgacttggtggggccgtaatgtaacagctgatcaacatgtgaagatactggtacttgatagcctcttaaggaaaaatttgcttcccaaattttaagctggaacgtcactggaataactttaaaaaagaattacaatacatggctttttagaatttcgctacgctcatgttaagatttgtgtacaaaattgaaaagtctctactgatcctcaacacaataaaatctcgagtttatgaaaatattttgcacgcacatgg

SEQ ID NO: 152031 - DNA, 1601 bp, Homo sapiens
agcggagagagtgaggaggctgcgtctggctcccggtctcacaggcattgcagtacattgagctccatagagacagcgccggggcaacgtgagagccggacgggcacatgggcgactctgtgcctcgctgaggaaaaataactaaacatggggcaaaggagatcctaagaagccgagaggcaaaatgtcatcatatgcattttttgtgcaaacttgtcggggaggagcataagaagaagcacccagatgcttcagtcaacttctcaagagtttttctaagaagtgctcagagaggtggaagaccatgtctgcttaaagaggaaaggaaaatttgaagatatggcaaaagcgggacaaggcccgttattgaaagagaaatgaaaacctatatccctccccaaaggggaagacaaaaaagaaagttcaaggattcccaattgcacccaagagggcctccttcgggccttctttcctcttcttgctctgagtatcgcccaaaaatcaaaaggagaacatccttggcctgttccattggtgatgttgcgaagaaactggggagagatgtgggaattaacactgctgcagatggacaagcagccttatgaaaagaagggctgcgaagctgaaggaaaaatacgaaaaggatattgctgcatatcgagctaaaggaaagcctgatgcagcaaaaaaagggagttgtcaaggctgaaaaaagcaagaaaaagaaggaagaggaggaagatgaggaagaaggaagatgaagaggatgaggaggaggaggaagatgaagaagatgaagaagatgaagaagaagatgagagatgagataagagaagatgtatgatgataagttcgttctagcgcagttttttttttttcttgtctataaagcatttaaccccccctgtacacaaactcaactccttttaaagaaaaaaaattgaaatgtaaggctgtgtaagatttgtttttaaactgtacagtgtctttttttgtatagttaacacactaccgaattgtgtctttaggatagccctgtcctggtggtattttcaatagccactaacctttgcctggtacagtatgggggttgtaaattggcatggaaatttaaagcaggttcttgttggtgcccagcccaaattagttatatatggggatggtagtttttttcatcttcagttgtctctgatgcagcttatacgaaataattgttgttctgttaactgaataccactctgtaattgcaaaaaaaaaaaaaaaaaagaaaagaaaaagttgcagcgtgttttgttgacattctgaatgcttctaagtaaatacaattttttttattagtattgttgtccttttcataggtctgaaatttttcttcttgaggggaagctagttttttgttttggccctttttgattcacaggatttattacggggttttccttttcttatagtgggcaaaaaaaaagcttttgtttaccccccctgcttataatacggggggaaaggtaatttggaaaaagttttcttccatatgggaacatcaaaaatttgagtgagtaaaaaaatttcacttggcccctttacttttacaaactgaaaag

SEQ ID NO: 152032 - DNA, 442 bp, Homo sapiens
  misc_feature (1)...(442): n = a,t,c or g
ccgatacgtacatcccgggtcgacccacgcgtgcgtgttgctaccagagacaactgctgcatcttagatgaaagattcggtagttattgtccaactacctgtggcattgcagatttcctgtctacttatcaaaccaaagtagacaaggatctacagtctttggaagacatcttacatcaagttgaaaacaaaacatcagaagccaaacaggctggagacgtttaaaagaccgtttcaaaagagatttacttttttaaaggactttatctgaacagagagatataatatttttcctattggacaatggacttgcaaagcttcacttcattttaagagcaaaagaccccatgttgaaaactccataacagttttatgctgatgataatttatctacatgcatttcaataaaccttttgtttcctaagactnnnnnnnnnnnnnn

SEQ ID NO: 152033 - DNA, 660 bp, Homo sapiens
  misc_feature (1)...(660): n = a,t,c or g
tttgccgatgatctagtgacaagttttcacatccaataatggcatgcagttcagtactgggnacaatgacaatgataagtttgaaggcaactgtgctgaacaggatggatctggttggtggatgaacaagtgtcacgctggccatctcaatggagtttattaccaaggtggcacttactcaaaagcatctactcctaatggttatgataatggcattatttgggccacttggaaaacccggtggtattccatgaagaaaaccactatgaagataatcccattcaacagactcacaattggagaaggacagcaacaccacctggggggagccaaacaggtcagaccagagcaccctgcggaaacagaatatgactcactttaccctgaggatgatttgtagaaaattaactgctaacttctattgacccacaaagtttcagaaattctctgaaagtttcttccttttttatcttactatatttattgatttcaagtcttctattaaggacatttagccttcaatggaaattaaaactcatttaggactgtatttccaaattactgatatcagagttatttaaaaattgtttatttgaggagataacatttcaactttgttcctaaatatataataataaaatgattgactttatttgcaaa

SEQ ID NO: 152034 - DNA, 548 bp, Homo sapiens
tttttttttgatgatgaaatattttaattaaggtttatttcaatagcaaaaatgacttcaagatttttcatgaattattttttaaacaaaactatatgaaaaatatgtacaaatcagtcatcaatgtcattgacatttttatgaacaagtttcaaatgaaaaatatcccatcataacaaagggtccttaaataaataaatgctgacaatactggccctaaagtctaacacaactgttagactaatcagggataccgctttctactacgtgagggagcacataatcaatgtttccagcaaaagggcaaggtactgggtttgtgtagggtttatttaggccagttgttgacagcccccattattttgaggtgttggctacttgtttctcttccatagtgtttgaaatggcacagtgcaaggcatttgggcacccagaagcatgagcataggcagagccatttccaccatgctgacggcaggcaagaagaagacaaaaatgaacccctttcatgcttgtttaaaaatgtgacggctaggcccattgctccc

SEQ ID NO: 152035 - DNA, 1868 bp, Homo sapiens
ttttttttttttttttgatgatgaaatattttaattaaggtttatttcaatagcaaaaatgacttcaagattttgcgtgaattattttttaaacaaaactatatgaaaaatatgtacaaatcagtcatcaatgtcattgacatttttatgaacaagtttcaaatgaaaaatatcccatcataacaaaggtacataaataaataaatgctgacactacaaggctcggagctccgggcactcagacatcatgagttggtccttgcacggcccggaatttaattctctacttctatgctcttttatttctctcttcaacatgtgtagcatatgttgctaccagagacaactgctgcgatcttatatgaacgattcggctgttattgtgccaactacctgtggcattgcagatttcctgtctacttatcaaaccagagtagactaggatctacagtctttgggaagacatcttacatcaagttgaaaacaaaacatcaggaagtcaaacagctgataaaagcaatccaacttcacttataatcctgatggaatcatcaaaaccaaatatgatagacgctgctactttgaagtccaggaaaatgttagaagaaattatgaaatatgaagcatccgattttaacacatgactcaagtattcgatatttgcaggaaattatataattccaaataatccaaaagattgttaacctggaaagagaagggtagcccagcttgaagcacagtgccaggaaccttgcaaagacacggtgcaaatccatgatatcactgggaaagattgtcaagacagttgccaataagggagctaaacagagcgggctttactttattaaacctctgaaagctaaccagcaattcttagtctacctgtgaaatcgatgggtctgggaaatggatggactgtgtttcagaagagacttgatggcagtgtagatttcaagaaaaaactggattccatataaagaaggatttggacatctgtctcctactggcacaacagaatttttggctggggaaatgaggaagattcattttgattaaggcacacagtcttgccatcccatatggcatttaaggagtgggaactgggaagacttgggaatgggccaggaaccagtactgcagatctatgccattgttcaaggttgtacatgaagttgacagagtaccgctttacatatgcatacttcgctggtggggatgctgaagatgcctttgatggctatgattttgggcgatgatcctagtgacaagttttttcacatcccaataatggcaatgcagttcacgtacctggggacaatggacaatgataaagtttgaaaggccaactgtgcctgaaacagggatgggatcctggttggtgggatggaaacaagtgtccacgctgggccattcttcaatgggagttttatttacccaaggttgggcactttacttccaaaaggcatcctacctccctaatgggttatggataatgggcattatttgggcccacttggaaaaacccggtgggtattccgatgaagaaaacccactatgaagataatccccattcaacagactcacaattggagaaggacagcaacacccaccttgggggaagccaaacagggttggagacgttttaaaagacccgtttcaaaagagatttactttttttaaaggactttatctgaacgagagagatataatatttttcctattggacaatggaacttgcaaagctttcacttcattttaagagcaaaagacccccatgttggaaaactccataacaagttttatgctgattgataatttatctacatgcatttcaataaaaccttttgtttcctaagactaaaaaaaaa

SEQ ID NO: 152036 - DNA, 529 bp, Homo sapiens; identical to SEQ ID NO: 146516

SEQ ID NO: 152037 - DNA, 1209 bp, Homo sapiens; identical to SEQ ID NO: 146517
  misc_feature (1)...(1209): n = a,t,c or g

SEQ ID NO: 152038 - DNA, 327 bp, Homo sapiens
  misc_feature (1)...(327): n = a,t,c or g
ggtcctttgatctgggaatggccagccagcccggagcccccccctttaccctggggaaaaccacgaatgcaggcggctaatacggttaaaccccttagatccccaaaatccggttcccaaaaaagcccttccctcctttcccccaagctttggaaccacaacaaaaaggccccaattgagcccacccctaggagcccaccccagcaaaaaaatattcgccccaacgggttcaaaaggttccaaaaannnnnnnnnnnnnnnnnnnnnnnnnnnnnnnnnnnggcagtttagggtatttatcacaccaaaaatggttcccctcgtgcc

SEQ ID NO: 152039 - DNA, 3363 bp, Homo sapiens
cgctaccttgaaagaagaaaaggttcgtgttcagagcagggcatttagtcccaagccaggctagtcccacaagcaagagaccaaagccattctctctgattcccaacccctaccttctctcctaattcccacttttaatagaaaagttggttataactttttaagaaaagtttccaccacgagggaaagtcctaacctcgctctcgcggcctaccctttacccgcccgcctgctcggcgaccaagaacaccttccaccatgacccacctcagccaagtttcccacttaaaataagaggcatccaagcagggtgtacatgtccctgcctcaggggtgagaaagtccaggccatgtatatctggatcgatggtactggagaaggactgcgctgcaagacccggaccctggacagtgagcccaagtgtgtggaagagttgcctgagtggaatttcgatggctccagtactttacagtctgaagggttccaaacagtgaacatgtatctcgtgcctgctgccatgtttcgggaccccttccgtaagggaccctaacaagctggtgttatgtggaagttttcaggtacaattcgaaggcctggcagagaccaatttgaggcacacctgtaaacgggataatgggacatggtgagcaaccagcacccctggtttggcatggagcagggagtataccctcatggggacagatgggcacccctttggttggccttccaagggtcttcccagggccccaaggtcaatatttactgggtgtggggaggagacagaagccttggaagggacattcggggaggcccattaccgggcctgcttttatgtctgggacaagaattccgggaactaaagccggagtcagtcctctccaggtgggaatttcagattggaccttgtgaaggaatcaagcagggaggactatcttctgggtggcccgtttcatcttgcattcgtgtgtgtgaagacttggggagtgatagcaacctttgatccttagccccactcttggggaactggaatggtgccaggctgccataccaacttcagcaccaaggccatgcggaaggagaatggtcttaagtacatcgagaaggccatttagaaacttaccaaccggccacaagtcccacatccgtgcttatgatcccaagagaggcctggacaatgcccgacgtctaactggattccatgaaacctccaacatcaacgacttttctgttggtgtagccaatcgtagcgccagcatacgcattccccggactgttggccaggagaagaagggttactttgaagaatcgtcgcccctcttgccaactgcgaccccttttcggtgacagaagccctcatcccgcacgtgtcttctcaatgaaaccggcgatgagcccttccagtacaaaaattaagtggactagacctccagctgttgagcccctcctagttcttcatccctgactccaactcttccccctctcccaagttgtcccgattgtaactcaaagggtggaatatcaaggtccgtttttttcattccatgttgcccagttaatcttgctttcttttgtttggctgggatagaggggtcaagttattaatttcttcacacctaccctcctttttttccctatcactgaaagcttttttagtgccattagtggggaggagggttggggagaccataaccactgcttccatttaatggggtgcacctgtccaataaggggtactattccggacagagcacgttttcagaaaggggaatctttcttccaaggtagctgaaaggggaagacctgacgtactctggttaggttaggacttgccctcgaggtggaaacttttcttaaaaagttataaccaacttttctattaaaagtgggaattgggagagaaggtaggggttgggaatcatagataatggctttggactcatgcttgtggaactagcctggctagagactaaatgccctgctctgaacacgaagcttattataaactgatggatatccctaccttgaatgagtaaatggttccttactgcttggtccttgatttatcacacaaagcagaatagtatttttatatttaaatgtaaagacagaaaaactatatgtatggttttgtggattatgtgtgttttggctaaaggaaaaaaccatccaggtcacggggcaccaaatttgagacaaatagtcggattagaaataaagcatctcattttgagtagagagcaaggggaagttggtcctcagattgttaatctggaatcaggcccccaaggaccctttttgggttttctgccctgccccacccctcctggaagaagggtggggcactgggattagtttaacagaccaacaccgttacttacaagtcacttgatctcccgtggctttgggtttaaaagacacactttgtccacataggtttagagataagaatttggcggtcaaacttggagcatgttacttgacagagggggtattgggggttattttctgggtaggaatagcatggtcactaaaagcaggcccttttgatattaaattttttaaaaaagccaaattattggaaagtttagcattttaatcaaatttgatgggtttctaggtaattttttaccagaattgcttgtttgcttccaactgtctcctacctctgcctcttggaggaagatgggggacagaggctggaagtcaaaaacaccttgtaattttgtattcttgaatgttctttggttaagactgctgaagaattatttttttttcttttataataagggaataaacccccacctttattccttcattttattcacccttttttgggtttttgggttggctgtggcaggccagctgtggttttcttttgccatgacaacttctaattgccatgtacagtatgttcaaagtcaaataactcctcattgtaaacaaactgtgtaactgcccaaagcagcacttataaatcagcctaacataagatctctctgatgtgtttgtgattctttcaaatccctatgtgccattatatttctttatttcccaaaacaggcaaaataagctcaagtttatgttactctgaattttttaaaaacactggagtgatgttgctgaccagccgtttcctgtacctctctaagttgggtatttgggacttaagggattaagtttttcacctagacttagttacacacaatcttggcatttcctagcctagaggtttgtagcagggtacaagccccactcctcccccttcctttgctcccctgagtttggttttggcttaccataacattgttttgaccattcctagcctaatacaatagcctaacataatgtaagattaactggct

SEQ ID NO: 152040 - DNA, 518 bp, Homo sapiens
tgacactgctgaggtctaaacaaggaggcagaagtagtcttcagttcacgatcttctagttgcagcgatgagtgccacgagtgagattcaagatcccagaggaagaggagatggtccaggaggcctccccgatgtggttgccattccgtggcctccccggtgaatcctcagccaagaggaacccacccaactgacaatcaggatattgaaccctggacaagagagagaaggaacacctccgatcgaagaacgtaaagtagaaggtgattgcccaggaaatggatctgggaaaagactcggagtgagcgtgggagatggctctgatgtaaaagagaagactcccacctaaatccttaagcatgctaagactaaagaagcaggagatgggcagccataagttaaaaagaagaccaactgaagctacacacatggctgatgtcacattgaaaatgtgacttgaaaattttgaaaattctctccaataaagtttgagttttctctgaagaaaaaaaaaaaaa

SEQ ID NO: 152041 - DNA, 1474 bp, Homo sapiens
atcccggacttcccagagcctgcctggagcgcgtactcagcggctctcgggtcccagcgtcccagccgcggcccgcgctcctccgccccgctcctcctcctcctcttcctcctcctcctcctctctaggcacccccgtcccctccttccagcggctgcagcccccagccccaactctccgcgcttactcctgggacgcgcgtcctcgccccatcctttgcttccttccttccttccttcttccttcctcccctggctcccgccctccctctccaggtcgccctcccggggcccgattgtctcggttccccgctgccggcccgcgccctgccccgtctctcccttgcacttcctgagtcgcccgccgccgccgtcgcagactcgccgcgggagccccagcccaacccgagcccgacagccactgccccggctccagctccagccccacagcccgcggcgcccgcccgagggagccccggcgcccggggaaggctccagtgggctagcgcgccctcgcccagccccgcgccccagccctgcccggcccggcgaggaaggaccgggaagatgaacaacggcggcaaagccgagaaggagaacaccccgagcgaggccaaccttcaggaggaggaggtccggaccctatttgtcagtggccttcctctggatatcaaacctcgggagctctatctgcttttcagaccatttaagggctatgagggttctcttataaagctcacatctaaacagcctgtaggttttgtcagttttgacagtcgctcagaagcagaggctgcaaagaatgctttgaatggcatccgcttcgatcctgaaattccgcaaacactacgactagagtttgctaaggcaaacacgaagatggccaagaacaaactcgtagggactccaaaccccagtactcctctgcccaacactgtacctcagttcattgccagagagccatatgagctcacagtgcctgcactttaccccagtagccctgaagtgtgggccccgtaccctctgtacccagcggagttagcgcctgctctacctcctcctgctttcacctatcccgcttcactgcatgcccagctctgtgaaggtcagactgtgaggagaagccaccccttgagcgctccgtctcctgatagtgccagcctggcctggtttcctgtttgatgcgctggctccctccctccgaggctacttctcagggctggaagtcccgtcagttctgctgaatactatgtcccaggtgtgtgatggcggctgcaatctgtcttgtgggtattaatgcaatcttcagtggtggctactgttctctagctgttctacaaaactggagcatgctggcttgaaaaacccttgcccagtttggatcccttcaagactttgtcacagcctctatcacacatctgtttttctcgaagaaaaaaatataattaataaaaatgttttactcttttacactg

SEQ ID NO: 152042 - DNA, 634 bp, Homo sapiens
ttcggcacgaggagttttgacagtcgctcagaagcagaggctgcaaagaatgctttgaatggcatccgcttcgatcctgaaattccgcaaacactacgactagagtttgctaaggcaaacacgaagatggccaagaacaaactcgtagggactccaaaccccagtactcctctgcccaacactgtacctcagttcattgccagagagccatatgagctcacagtgcctgcactttaccccagtagccctgaagtgtgggccccgtaccctctgtacccagcggagttagcgcctgctctacctcctcctgctttcacctatccccgcttcactgcatgcccaggaaaccctgtagaaaaggagatacaagatagtgtctaagatggaattacaggtcaagtgtttctctcctgaggcaaagcccaacacacctgtcttttgtccacttttccagcaaattagatttgtctctgggaatgtgtttgtaacataccaacctactgcagaccagcagagggagctcccatgttgaatttgtttgttagctattttcccccctttcacaaaaactatttcttgacgacctttgagagatttcaataaaaattttaatcagagcaaaaataaaaaaaaa

SEQ ID NO: 152043 - DNA, 1608 bp, Homo sapiens
atcccggacttcccagagcctgcctggagcgcgtactcagcggctctcgggtcccagcgtcccagccgcggcccgcgctcctccgccccgctcctcctcctcctcttcctcctcctcctcctctctaggcacccccgtcccctccttccagcggctgcagcccccagccccaactctccgcgcttactcctgggacgcgcgtcctcgccccatcctttgcttccttccttccttccttcttccttcctcccctggctcccgccctccctctccaggtcgccctcccggggcccgattgtctcggttccccgctgccggcccgcgccctgccccgtctctcccttgcacttcctgagtcgcccgccgccgccgtcgcagactcgccgcgggagccccagcccaacccgagcccgacagccactgccccggctccagctccagccccacagcccgcggcgcccgcccgagggagccccggcgcccggggaaggctccagtgggctagcgcgccctcgcccagccccgcgccccagccctgcccggcccggcgaggaaggaccgggaagatgaacaacggcggcaaagccgagaaggagaacaccccgagcgaggccaaccttcaggaggaggaggtccggaccctatttgtcagtggccttcctctggatatcaaacctcgggagctctatctgcttttcagaccatttaagggctatgagggttctcttataaagctcacatctaaacagcctgtaggttttgtcagttttgacagtcgctcagaagcagaggctgcaaagaatgctttgaatggcatccgcttcgatcctgaaattccgcaaacactacgactagagtttgctaaggcaaacacgaagatggccaagaacaaactcgtagggactccaaaccccagtactcctctgcccaacactgtacctcagtttcattgccagagagccatatgagcttcacagtgcctgcactttaccccagtaggccctgaagtgtggggccccgtaccctctgttacccaggcgggagttaggcgcctgcttttaccttcctcctggcttttcacctatcccgcttcactggcatggcccagatgcgctggctccctccctccgaggctacttctcagggctggaagtcccgtcagttctgctgaatactatacccttcagcaatggctactagaaggacgaacaattgccctcctttggaagtacggctaatagaagccctagatccgaataagatccgaataagaatatgtaatggaccaggcgcagtgcctcacgcctgtcatcccagcactttgggaggctgaggcaggcggatcacttgatgacagaagtgtgagaccagcccagccaacatggtcccaggtgtgtgatggcggctgcaatctgtcttgtgggtattaatgcaatcttcagtggtggctactgttctctagctgttctacaaaactggagcatgctggcttgaaaaacccttgcccagtttggatcccttcaagactttgtcacagcctctatcacacatctgtttttctcgaagaaaaaaatataattaataaaaatgttttactcttttacactg

SEQ ID NO: 152044 - DNA, 2302 bp, Homo sapiens
atcccggacttcccagagcctgcctggagcgcgtactcagcggctctcgggtcccagcgtcccagccgcggcccgcgctcctccgccccgctcctcctcctcctcttcctcctcctcctcctctctaggcacccccgtcccctccttccagcggctgcagcccccagccccaactctccgcgcttactcctgggacgcgcgtcctcgccccatcctttgcttccttccttccttccttcttccttcctcccctggctcccgccctccctctccaggtcgccctcccggggcccgattgtctcggttccccgctgccggcccgcgccctgccccgtctctcccttgcacttcctgagtcgcccgccgccgccgtcgcagactcgccgcgggagccccagcccaacccgagcccgacagccactgccccggctccagctccagccccacagcccgcggcgcccgcccgagggagccccggcgcccggggaaggctccagtgggctagcgcgccctcgcccagccccgcgccccagccctgcccggcccggcgaggaaggaccgggaagatgaacaacggcggcaaagccgagaaggagaacaccccgagcgaggccaaccttcaggaggaggaggtccggaccctatttgtcagtggccttcctctggatatcaaacctcggggagctctatctgcttttcagaccatttaagggctatgagggttctctataaaagctcacatctaaacagctttaaggttttgtcagttttgacagtcgctcagaagcagaggctgcaaagaatgctttgaatggcatccgcttcgatcctgaaattccgcaaacactacgactagagtttgctaaggcaaacacgaagatggccaagaacaaactccgtagggactccaaacccccagtactcctctgcccaacactgtacctcagttcattgccagagagccatatgagctcacagtgcctgcactttaccccagtaagccctgaaagtgtgggccccgtaccctctgctacccagcggagttagggcctgcttctacctccctcctgctttcaccatatcccgcttcactgcgatgcccaggaaaccctgtagaaaaggagatacaagatagtgtctaagatggaattacaggtcaaggtagagatctctattctgaccagctttctttcttagttaaaaatagcctgatttttatgaaacaaacttcctgtttcttccgcaaagattacttgtctacatactaacacttcctctccccttggagaaaatatttttcttagcttcgcttttagtgcaagtggtagtaatcagtgtggagattcacctctggagatcaccactcattctttggcctgcaaagattgatgaccagtaacaaatagaaagtacgtacgtaggtttcatttgtctttctgcatgtgtaattcagcctttaaattttaaatttttaaaaattattaggctggacaggcagagatttcgtttgcctgttttgctcagtgtttgtttacaaggctgggtgaaataaacagcttcccagaaaacctccttctgacttaaaactcttttatgttgtacagaattccctgtcttgataaagaccacctagaagcagcccccagcgagggttcttgaaagtcatggggtcgagattgttgttggctgaacatcttttaattctgagttaccaacacgttgtgcgtgcattgatgacccggcttcctggcctgcccttggtgcctgagccccagtaatgattgccctctatgttgggagacgaagggagaaagtattacaagtagtgaagaaaaaaatgtaggtggtgttggtggttgagagtacatggcacagaaaataaaggagccaggattacctgtgcctttggcttctccttcccctgctgctttttcttcctttttccatgtcagtgcttgggaaccctcacaactggcaggtaacggggtcgggattaaaatgtaaacctgtgggtgtcttctgctgagtcattaggatctttgtagcaggctgcggataaatatgtggatgacatggggcaactaagagccccttttgcttgccacctcccacccctgctctggatggtgtctcctcttgctagactgccgggtacagatcacgtggcaattaaggcaaatgttaataaataccatgaaacagtggtttgcatagtcttctgaatagccatggctttggttagtcagcaacaaagcctttcacccttaccctggataatcaagagttgacaacagccagaaag

SEQ ID NO: 152045 - DNA, 672 bp, Homo sapiens; identical to SEQ ID NO: 135912

SEQ ID NO: 152046 - DNA, 1956 bp, Homo sapiens
aagccctgaagggtcaaaagaaatacaaaagcaaaggctattttctttttttttttctttctttcattcattccttcctctgtttctttctttcttcctttcatttttttttcttttttaagagcgagcggctctgcggtggcggtttggggtgggcgccgcgacggtgaggtcgtctcgcctcccgcgcgccggtagattggttgtttcattatggatggaggggatgatggtaaccttattatcaaaaagaggtttgtgtctgaggcagaactatgatgttcggcgcaaaaaggaggcaagaagaatgggagaaagttcgaaaacctgaagatccagaagaatgtccagaggaggtttatgaccctcgatctctatatgaaaggctacaggaacagaaggacaggaagcagcaggagttacgaggaacagtttcaaattgcaaaaacatgggtaaggggctttagatgaagatgagaccactttccttgatgaggtttctcgacagcaggaactaatagaaaagcaaccgaagagaagaagaacttgaaagaacttgaaggaatacagaaataacctcaagaaggttggaattttctcaagagaacaagaaggaagtggaaaagaaactgacttgtgaagcctatagaaaccaagaaccaagttctcccaggcgaacgtgcttgggcaggagctgtgaagcatgaagagctcagagagtggccaccagtgtgaaaagacttgaaaccggacccctgagccagattgacaagaatcaagagccctcatcctggcaaagtctctcggaaacaaccttcccttgagtggccccttccatccacttgccccctctgctgcaagtatgtatcggcatcctcccaggcctgggtggcctactctgggagcagcgactccgagtccagcttcagacagcgaaggcaccattcaatgccaccggaaagattgttctcctccatgtttccgaaccaacaccttccttcgagggccccttagttttttccgttccctacacagggaggctcctccccaagggtagatcggaccgttcatgctgcctataggccattatgtctcctcaaaaaaaaaactcctttgcctgcatcctgtgtaccaaccatgacatttttaaccaatcccaatcttaaaaaatgtggccagaatccaacctgttggccgaatcgtgttgggttccctctttcttactccaactgcagatgaccaaacctgtccccgctgccactttcctcactgatattgggaaggagggcaaggcccagccggaagttcccactaaaaatgccccaggagaataggcaccggctggcttgccaaagggtttgggttttattgctttctgttttttcttttccccgacagcacaaagaagtaagggcagttaattggacacggtgttatttaacaccattttctattgtaaatgaatgtgttgtttggttctactgcattgtgggagcatgcgggggaagagaactgacccagggtaatgaaatgggagcccttcccctggaactaaccaggtccttgatgttgtgtgactaagtaaagatgataaaccccatctgctgggggtgtcacttcacactcgggcatgcattgtgaaagctttccatacccttggccgattccctctctcctctctctccaaccccatttatgcaggaagggactgctaacaagaacgcttccatctcaaaccttttctctgcctgggaaattattttatgtttgtttttgaaataaaggatttagtttaagattctaaattttagagaaacaaacgtaggccttgtttactaatagccagacatcagaactgcaggtagggtatgttaatgaggatgactttatttctgggcagctcctggaatcctaatattgtaaatgagtgggacacacttgcatattgtgaccatt

SEQ ID NO: 152047 - DNA, 774 bp, Homo sapiens
  misc_feature (1)...(774): n = a,t,c or g
gacactcgctttttggaacgtctgaggttatcaataagctcctacgtccagacgcccatgggtcatttcacagaggaggacaaggctactatcgacaagcctctggtgcaaggtgaatgtggaaagatgctggaggagaaaccctgggaaggctcctggttgtctacccatggacccagaggttctttgacagctttggcaacctgtcctctgcctctgccatccatgggcaacccccaaagtcaaggcacatggcaagaaggtgctgacttcctttgggagactgccataaaagcacctggaatgatctcaaggggcacctttgcccaagcctgaagtgaacctgcacctgtgacaaagctgcattgttggatcctgaggaactttcaagcttcctggggaaattttgctggtgacccgttttgggcaattccattttcgggcaaagaatttcacccctgaaggttgccaggctttcctggcaagaaagatgggtgacttggagttggccagtgccctgttcctcaagattaccactgaagctcaattgcccatgaatgcagagcttttcaaggataaggcttttattcttgcaagcaattacaaataataaatctatttctgctaagagatcaccaaannnnnatnntnnnnnnncccccggattttttatttagcgggccgcacctttttccccttttagggggggtaaatttatattgggccttgggccggggttttcaaaagcggggggannnnnnnnnnaaagagccc

SEQ ID NO: 152048 - DNA, 497 bp, Homo sapiens
aaggagcagggcgtgctgtccttctggaggggcaaccttgccaacgtcattcgctacttccccactcaagccctcaacttcgccttcaaggataagtacaagcagatcttcctggggggcgtggacaagcacacgcagttctggaggtactttgcgggcaacctcctgcctgtagatggccggggaaggctctagaaaaggggcgcattgcgatccaaccatcggcagccgattccgtgtcttgatcacggggtgggagggaaccgtggcgtccctgcgtggggcccatgggtgagacactccagtactgagacctagagtccagatgcttgtaggagccaagtcgtgttctaagtatttatttaaaacaaaagaatcacgttttcccatttgtacttcagcgctagcccctgttttgcacagccgagtactggcgagtatgttctatgttgggcctcctgctgcaaaacaataaacagaggacgcagaggtcaaaa

SEQ ID NO: 152049 - DNA, 1966 bp, Homo sapiens
  misc_feature (1)...(1966): n = a,t,c or g
gagggtnnnagagactgaacctccgaanccaggagctgccgacgacgaccggccggaatcccgggcgacccacgcgtgcgggcggcgggagggctgagccagcgacgccttccattcactctccgcgcccggtctccggctgggctcccgttccgctgcccgccctgccaccatgacggaacaggccatctccttcgccaaagacttcttggccggaggcatcgccgccgccatctccaagacggccgtggctccgatcgagcgggtcaagctgctgctgcagggtccagcacgccagcaagcagatcgccgccgacaagcaagtacaagggcatcgtggactgcattgtccgcatccccaagggagcagggggcgtgctgtccttcttggaggggcaacctttgccaacggtcattcgctactttccccactcaagccttcaactttcggcctttcaaggataaagttacaagcagatttttcctgggggggcgtgggacaagcacacgcagtttctggaaggtaatttggcggggcaaactgggcttcgggggttgcggccggcgcggaccatccctcatgcttcgtgtacccgctggatttcgccagaaccggcctgggcaagggacggtggaaaagtcaggcacagagcgcaagtttccgaggcctggggagactgcctggtgaagattcaccaagtacagacggcatcccggggcctgtaccaggggcttccagtgtctccgttcacggccactatcatctatccggcagtcctacctacggcgtgtacgaatacggccaaagggcatgcttccccgaccccaagtaacacgctacatcctgttgagccggatgaatcgcgccagaaccgtgacggcccgtggggcggttgggtgtcctaaccctttgaaaacggtgcggcggccgcatgattgatgcaatccggggcgcaaaaggagctgacatcatgtacacggggccntggtcgactgttgaaggaaaaatctttcagaagatgagggggggcaaaggcctttcttcaaagggtgcgtggtccaaacgctcctgcggggccatggggggcgcccttcggtgctggtccctgtacgaacgagctcaagaagggtgatctaaagggccgcgggcctcctcccacacacacacacacacccagggggaaccaagagaaccacgttagaaatccttaaaccggtcggaccatcaaccttcgagaaattccagtttgtcttttttcccagcccgcatcctgcctgtagaatggccgggggaaaggctctagaaaaggggcgcattgcgatcccaaccatcggcagccgatttccgtgtcttgatcacgggttgggagggaacccgtggcgtccctgcgtggggcccatgggtgagacactccagtactgagacctagagtccagatgcttgtaggagccaagtcgtgttctaagtatttatttaaaacaaaagaatacacgtttttcccatttgtacttcaggcgctagcccctgttttgcacagccgagtactggcgagtatgttctatgttgggcctcctgctgcaaaacaataaacagaggacgcagaggtcctcctgcctggccacgcacctctcccacagggcggcctggggtctggagatgggcgctgggcccacgggacgcagatggggccacgctctgcccgtggctggcccacgttcctggtctgcagtgctgcctcctccccagcacccctggggcacagagggcagggtcacagctgggaagaggcggggggtagaaaccaaggctggcagaagtgtagccgggctccctgataaatgctggaggaccccagggcacctgcacttactgtaccctctctgagagcatttgtatgatctcatgtctcagctctggaggctggaggtcccagaaaaccaaggtatggtagattcaaaaaaaaaa

SEQ ID NO: 152050 - DNA, 338 bp, Homo sapiens
  misc_feature (1)...(338): n = a,t,c or g
tgagtgcaatggaacgattttgggtccctgcaaaatcccccccccggggtttcgccctttttctggctcagccttccgaacaacttgggcttcaaggggnnnnnnnnnnggccgggtccttttttgaaattttagtaaaaaccggggttttccgcgttaacccggatggtttccctttcccggccccgtgattcggcccccctggcccccccaaaagctggggtttcccgccttaacccccgggcccgggcgccnnnnnnnnnnnnnnnngtcttttgttttcattttttcttgctttcaggagaaaaaaaatctttggcccataaaggtgggatttt

SEQ ID NO: 152051 - DNA, 1731 bp, Homo sapiens
atggtgaccgtacagatggggtttggtggtggttgggcctttctcggcgctacgctatcccttttaacagtctcgagccctcaagcttgggctcgtgtcccctttctattgggacccataaagaccctgcatgctctggaactaaccaccacggacatccaatgtggtaaagcctttaattcttccagttccttccgatatcatgaaagaactcacactggagagaaaccttacgagtgtaagcaatgtgggaaagccttcagatctgcctcactccttcaaacacatggtaggactcacacgggagagaaaccctatgcatgtaaggaatgtggaaaaccatttagtaatttctctttctttcaaatacatgaaaggatgcacagagaagagaagccgtatgaatgtaagggttatgggaaaacattcagtttgcccagtttatttcatagacatgaaaggactcacactggaggaaaaacctatgaatgcaagcagtgtggcagatccttcaactgttcgagctcctttcgatatcatggaaggactcacactggagagaaaccctatgaatgcaagcaatgtggaaaagccttcagatctgcctcacagcttcaaattcatggaaggactcacactggagagaaaccttatgaatgtaagcagtgtgggaaagcctttggatctgcctcacaccttcaaatgcatggaaggactcacactggagagaaaccctatgaatgtaagcagtgtgggaagtcttttggatgtgcctcgcgacttcaaatgcatggaaggactcacactggagagaaaccgtataaatgtaagcaatgtgggaaagcttttggatgtccctcaaaccttcgaaggcatggaaggactcacactggagagaaaccctataaatgtaaccaatgtgggaaaaagtggaaagaccagaacattgaatatgagtaccaaaaccccaggagaaacttcaggagtctcatagaagggaatgtcaatgaaattaaagaagacagtcattgtggagaaacttttacccaggttccagatgacaggctgaacttccaggagaagaaagcttctcctgaagcaaaatcatgtgataactttgtatgtggagaagttggcataggtaactcatcttttaatatgaacatcagaggtgacattgggcacaaggcatacgagtatcaggactatgcaccaaagccatataagtgtcaacaacctaagaaagccttcagatatcacccctcctttagaacacaagaaaggaatcacaccggagagaaaccctatgcttgtaaagaatgtggaaaaacctttatttcccattcaggcattcgaagacgcatggtaatgcacagtggggatggaccttataaatcaagctttcttcgttcacatcctaaagtccctggtcacggccggcgctttgccatgaaccctactttactgaacaaggaggacgaacgcggtaacaagaatgtggtaaccagagagcacttggaccgtatgaagaatagctgcatcgtttgtaacatgggacattccaacacagagattgacgtgaatgtcgttatggggaactacgagagactggagcgggatgcccggatgacaattcgcaaaaaacggaagcgatattccgatatccgattccgaatcatggggcggtatacggttcgagtcgaggttctgacggcggtcaattccgagtag

SEQ ID NO: 152052 - DNA, 5766 bp, Homo sapiens
tcagggctggatgtctctacggcaggagccggaggagctcaggagcgcgcggggacagcagaactctgcccgcactcgggggagagttggagggtccacgtctgctccaacatcctggtctctcgactgttgcgttgggtaactcccatccatatcaccagtttcacaccaggttccagggacgaggatgtggacaccgttggggatcactattccttctgtgacacctaccctggtgatgagcagatgtaggacgtggggcagaaccgtggtgattgatgagcagatgtaggaggtggagcagaaccgtggtgattgataagcagatgtaggaggtggagcagaaccgtggtgatgagcagatgtagggggtggggcagaaccgtggtgatgagcagatgtaggaggtggagcagaatcgtggtgattgataagcagatgtaggaggtggagcagaaccgtggtgatgagcagatgtaggaggtggagcagaatcgtggtgattgataagcagatgtaggaggtggagcagaaccgtggtgatgagcagatgtaggaggtggagcagaaccgtggtgattgataagcagatgtaggaggtggagcagaaccgtggtgatgagcagatgtaggaggtggagcagaaccgtggtgattgatgagcagatgtaggaggtggagcagaaccgtggtgattgatgagcagatgtaggaggtggagcagaaccgtggtgattgatgagcagatgtaggaggtggggcagaaccgtggtgatgagcagatgtaggaggtggagcagaaccgtggtgattgatgagcagatgtaggaggtggagcagaaccgtggtgattgatgagcagatgtaggaggtggagcagaaccatggtgattgatgagcagatgtaggaggtggagcagaaccgtggtgatgagcagatgtaggaggtggagcagaaccgtggtgatgagcagatgtaggaggtggggcagaaccgtggtgatgagctgatgtaggatgtggagcagaaccgtggtgatgagcagatgtaggaggtggagcagaaccgtggtgattgatgagcagatgtaggaggtggagcagaaccgtggtgattgatgagcagatgtaggaggtggagcagaaccgtggtgattgataagcagatgtaggaggtggagcagaaccgtggtgatgagcagatgtagggggtggggcagaaccgtggtgatgagcagatgtaggacgtggagcagaatcgtggtgattgataagcagatgtaagaggtggagcagcagaaccgtggtgatgagcagatgtaggacgtggagcagaaccgtggtgatgagcagatgtaggaggtggagcagaatcgtggtgatgagcagatgtaggaggtggagcagaaccgtggtgattgatgagcagatgtaggaggtggagcagaaccgtggtgatgagcagatgtaggaggtggagcagaaccgtggtgatgagcagatgtaggaggtggggcagaaccgtggtgatgagctgatgtaggaggtggagcagaaccgtggtgattcataagcagatgtattaggtgttgctggtgctggggaggagctgtagagaggaccccggtacatctgaaagccgggaaatggtgcgtgtgctggccgggagtggtgcgatgggggaggggctgcctggaactggcgggacccgggcctccctgtgggcgactccggggtctgggaccgagtcctcctagagctgctcggccctcggtccccgcggccgctggatgtgggtgggccggcagccgggactccgggcgtcctgtcccgtccctgcccgtcgactgcggccttggccccgaagcccttttgtgcagctccgcgcccgcagcccgacgccccagcttgtgcgggggccacgggagggtcatgcgcggatttcgactcgggtgtggatttcgtccgtaggaggagcagcggtctgtggggcccacagcctccactttctcctgttaaaaattatactgagatgtttcaggacccagtggcttttaaggatgtggctgtgaacttcacccaggaggagtgggctttgctggatatttcccagaagaatctctacagggaagtgatgctggatactttctggaacctgacctctataggaaaaaagtggaaagaccagaacattgaatatgagtaccaaaaccccaggagaaacttcaggagtgtcacagaagagaaagtcaatgagattaaagaagacagtcattgtggagagacttttaccccagttccagatgacaggctgaacttccagaagaagaaagcttctcctgaagtaaaatcatgtgacagctttgtgtgtgcagaagttggcataggtaactcatcttttaatatgagcatcagaggtgacactggacacaaggcatatgagtatcaggaatatggaccaaagccatataagtgtcaacaacctaaaaataagaaagccttcaggtatcgcccatccattagaacacaagaaagggatcacactggagagaaaccctatgcttgtaaagtctgtggaaaaacctttattttccattcaagcattcgaagacacatggtaatgcacagtggggatggaacttataaatgtaaattttgtgggaaagccttccattctttcagtttatatcttatccatgaaagaactcacactggagagaaaccatatgaatgtaaacaatgtggtaaatcctttacttattctgctacccttcaaatacatgaaagaactcacactggggagaagccctatgaatgtagcaaatgtgataaagcatttcatagttctagttcctatcatagacatgaaagaagtcacatgggagagaagccttatcaatgcaaagaatgtggaaaagcatttgcatataccagttctcttcgtagacatgaaaggacccactctgggaaaaaaccgtatgaatgtaagcaatataggggaagggcatatcatatgctattaggtttgcaaccacacataaagaatgaactctggagaaagaccttataaatgtaagatatgtgggaaaggcttttattatgccaagtcatttcaaacacatgaaagaactctcactggagagagacgctataaatgcaagcaatgtggtaaagccttcaatctttccagttcctttcgatatcatgaaaggattcacgctggagagaaaccctatgagtgtaagcagtgtgggaaagccttcagatctgcctcacagcttcgagtgcacggtgggactcacactggagagaaaccctatgaatgtaaggaatgtgggaaagccttcagatctacctcacaccttcgagtgcatggtaggactcatactggagagaaaccctatgaatgtaagagaatgtgggaaagccttcagatatgtgaagccccttcaaattcatgaaaggacagaaaaacacataagaatgccctctggagaaagaccttataaatgtagtatatgtgagaaaggcttttattctgccaagtcatttcaaacacatgaaaaaaactcacactggagagaaaccctatgaatgcaaccaatgtggtaaagccttcagatgttgcaattcccttcgatatcatgaaaggactcacactggagagaaaccctatgagtgtaagcaatgtgggaaagccttcagatctgcctcacaccttcgaatgcatgaaaggactcacactggagagaaaccctatgagtgtaagcaatgtgggaaagccttcagttgtgcctcaaaccttcgaaagcatggtaggactcacactggagagaaaccctatgagtgtaagcaatgtgggaaagccttcagatctgcctcaaaccttcagatgcatgaaaggactcacactggagagaaaccctatgaatgtaaggaatgcgaaaaagcattctgtaaattctcttcttttcaaatacatgaaaggaagcacagaggagagaagccctatgaatgtaagcattgtgggaatggattcacatctgccaagattcttcaaatacatgcaagaacacacattggagagaaacactatgaatttcttttcgatatcatgaaaggactcacactggggagaaaccctatcaatatacatgaaagagctcacacgggggagaagccatatgaatgtagggagtgtggaaaagcattcaagtgtcccatttctgttcgcagacatgaaagaacccactctaggaaaaaaccctatgaatgtaaacatcgtgggaaagtattatcttatcttaccagctttcaaaaccacttgggaatgcacactggagagatatctcataaatgtaagatatgtgggaaaggcttttattctcccaggtcacttcaaagacatgaaaaaactcacactgcagagaaaccctatgaatgcaagcaatgtggtaaagccttcagtagttccagttccttttggtaccatgaaaggactcacactggagagaaaccctatgagtgtaagcaatgtgggaaagccttcagatctgcctcaatccttcaaatgcatgctgggactcaccctgaagagaagccctacgagtgtaagcaatgtgggaaagccttcagatctgccccacaccttcgaatccatggtagaactcacactggagagaaaccctatgagtgtaaggaatgtgggaaagccttcagatctgccaagaaccttcgaattcatgaaaggacacaaacacacgtaagaatgcactctgtagaaagaccttataaatgtaagatatgtgggaaaggcttttattctgccaagactcacactggagagaaaccctatgagtgtaagcaatgtggaaaaaccttcagatctacctcacaccttcgaaaacatggtaggactcacactggagagaagccctatgaatgtcaggaatgtgggaaagctttcagatctatgaagaaccttcaaagtcatgaaaggacacaaacacacgtaagaatacactctggagaaagaccttataaatgtaagctatgtgggaaaggcttttattgtcccaaatcattgcaaagacatgaaaaaactcacactggagagaaactctatgaatgcaagcaacgttcagtagttccttcagtagttccagttccttttgatatcatgaaaggactcacactggagagaagccctataaatgcgagcaatgtgggaaagccttcagagctgtgtcaatcctttgaatgcatggtaggactcaccctgaagagaaaccctatgagtctacaaggccaccagctatgcaaggccacaagttatgctatgctatagattacgtgacctatcactgtatgattacttttattttgcttctgtggcctccaattgctcagagcagctccagaaggagtgcggattccgagaagctgaagagccctggaaagcagaagacccacatgcacacacaggctcgaactatggcgcaagcctgtcccacttgtcagcatgtccctggtgttatacctgtggaaggatgcaatccacaaggcttggctccaaatgaaatttggcagatggatgttacacatatagcagcctttggatgcgaaaaagccatcgcaacttgcatgcctgcaggtctcttggagggtctaccccgccagttgatggactgcctcatccgccagctgatggcctgctggtgtgccagtgcctatcagtgtgctcttctgctggcgtgctcctcttga

SEQ ID NO: 152053 - DNA, 656 bp, Homo sapiens
cgcaccaacgccaacagggcagcgcgttgtgagagccacgcctgcgcaatcggctccagtgcgcctgcggaggcggtcctatgacgtgaataaccctataccttccaatttgaaatcagaagcaaaaaaggctgccaaaatattaagagaattcacaagaaataacttccagaaatggacctgataagatcaattcctggctcaacggtaattgcgaaggctaaaaggccttgcaaattcttgtctgttgaatcaaagcccggggtccctggtgaccttccagagggggggaccgggggttttagtggcgcgcctttccagatgggaaaatggtcttcacccttcagccattggggatagctggctttggttggaggatttgaaataggaatttgaggtattcagactttggtgataattcttgaatttatgacccgtgctgttaggaagcttttgcaaaaggcggaaatctgaccctcggagggaacttgactgtggcggttgggcccttgggaaggaacttggaaggaaacgtggccctgagaagctccgctgccgtcttcacgtactgcaagtcaaggggactctttgcaggcgtgtctttagaagggagctgtttgattgaaaggaaagaaactaatagaaaattttattgt

SEQ ID NO: 152054 - DNA, 2011 bp, Homo sapiens
  misc_feature (1)...(2011): n = a,t,c or g
gcggacgcgtgggctggaaacaacccaattgtctatcaacagtgactggaaggacaaattgtgctatgtccacacattagaataccagttggcagtcaaaaaggaagagctgatctgtgcagcaatttgagtctcagtaatttcatgtgaataaccctataccttccaatttgaaatcagaagcaaaaaaggctgccaaaatattaagagaattcacagaaataacttccagaaatggacctgataagatcattcctgctcacgtaattgcgaaggctaaaggccttgcaattctgtctgtgatcaaagccgggttcctggtgactgccagaggaggcagcgggattgtagtggcgcgccttccagatggaaaatggtctgcaccctcagccattgggatagctggccttggtggaggatttgaaataggaattgagacacatttacagctacatattccctctgagcattgccctggctgccttccataagtgtggagtgccactccagctttcttaggttgccatctgcatgacacatctttctccatccttttactgtcaatctaatggtatcagacttggtgataattctgaattatgaccgtgctgtagaagcttttgcaaaaggcggaaatctgaccctcggagggaacttgactgtggcggttgggcccttgggaaggaacttggaaggaaacgtggccctgagaagctccgctgccgtcttcacgtactgcaagtcaaggggactctttgcaggcgtgtctttagaagggagctgtttgattgaaaggaaagaaactaatagaaaattttattgtcaagatatccgagcttatgacattttatttggagatacaccgcggcctgctcaagccgaagatctttatgaaaatcttgattcctttactgaaaagtatgaaaatgaaggacaacgaatcaatgcaagaaaagcagcaagggagcagaggaagtcttctgctaaagaattacctccaaagccattgtcaagaccacagcagtcatctgcaccagtccagctgaactctggctctcaaagtaacagaaatgaatataagctctatcctggactttccagctatcatgagagagttggcaatttttatcaacccatagatttgacagcgctgtattcatttgaaggacagcagcctggggatttgaattttcaagctggagacagaatcacagttatatcaaaaacagattcacattttgattggtgggaaggaaaacttcgaggtcaaactggcatttttccagccaactacgtaaccatgaattaaagcgtatactattttcttctttgagaattacaaaaaaattatttctacactgacaggatttactagttaagcaatgtttaatataaattttaaaaaacttctgttctacaaaatttccattccgtatgtaaaagattttgtttttctatataaaaagagctgactgacatatctttaaatactttgtactaactttatccaccacttactgtgtcatagaatatcatacagtttatacgctccatagttctcttgtgaacacttcaaaccatcgctaagcatttggatctgggccatgtatatggtagctgtgttttaatttgagaatcttgagggtagagccacaaatttcaattcttaccatttcccatttngccaaagtggctagagaaaaaagaaatccagcttaaataaggtattaagtaaatgttaaagttcgtaggtatttaattagaatataaatccttagaaattgtctttataccttcaaaaattatactatgcatttatcatagaaatgtgattacaaagaagtctgactaccatgtctttaaacatatggcatctctcatctttccttcccttatgggggctacatttgttcatttccagcagtagcattaaacttacggtgacaatggtagacttgtctctaaataaaatttttaaatgtttactaaaaaaaaaaaaaaaaaagggggg

SEQ ID NO: 152055 - DNA, 401 bp, Homo sapiens
ctccaggatcttgtctacgatctctccacctcagggtctggctcagggttacccctctttgtccagcgcacagtggcccgaaccatcgttttacaagagattattggcaagggtcggtttggggaagtatggcggggccgctggaggggtggtgatgtggctgtgaaaatattctcttcccagagtcacaagtagcctctgggatctgccaacacacgtccactcccaagccactagcccactccccagttggcccttctgcccttaccccacacacagtccaactcttccacctctggggaagatggagcaggtctttgggaagctcccacacccacctctgccactcttaacactaagtgagagttggggagaaactgaagccgtgtttttggcccccc

SEQ ID NO: 152056 - DNA, 459 bp, Homo sapiens
tggggggaccgtctttacccctgctgacctcccacctatccgccctgcagcagaaccttggcggtttataggtaatgatggagcaggtctttgggaagctcccacacccacctctgccactcttaacactaagtgagagttggggagaaactgaagccgtgtttttggccccccgaggctaaccctgatccatagtgctacctgcacctctggattctggattcacagaccaagtccaagcccgttcttacgtcgccataaaggcccccgaacggcattctcggtacttctgtttgtttttgtacattttattagaaaggactgtaaaatagccacttagacactttacctcttcagtatgcaaatgtaaataaattgtaatataggaaatcttttgttttaatataagaatgagcctgtccaatttctgctgtacattattaaaagttttattcacag

SEQ ID NO: 152057 - DNA, 1995 bp, Homo sapiens
  misc_feature (1)...(1995): n = a,t,c or g
ttttttttttttttttttgtgaataaaaacttttaataatgtacagcagaaattggacaggctcattcttatattaaaacaaaagatttcctatattacaatttatttacatttgcatactgaagaggtaaagtgtctaagtggctattttacagtcctttctaataaaatcgtacaaaaacaaacagaagtaccgaggaatgccgttcgggggcctttatggcgtacgtaaggaacgggcttgggacttggtctgtgaatccagaatccagagggtgcaggtagcactatgggatcagggttagcctcggggggccaaaaacacgggctttcagtttcttcccaactttcacttaggtgttaaggagtgggcagagggtggggtgtggggagcttccccaaaggacctgctcccatcttcccccagagggtggaagagttggactgtgtgtgggggtaaggggcagaagggccaactgggggagtggggctagtgggcttggggagtggacgtgtgttggcagatcccagaggctacttgtgactctgggaagaggagtttaagttccatcattacctataaaccaccaaggttctgctggcagggcggataggtgggaggtcagcaggggtaaagacggtccccccaatgacacaatggtatttaaaccgaaatttagtggccattaaatttggccccaaaggttaggggaagatctcctttaatgcaaggaaagaagccaataatcagttcaaataaaatagaagggcccaggagcactggggagcctgagggcagggacagggctctccctcctccacaagctttggcagagaactgctgggttggaggcagagatgctctaaggctacatacacaatacaccctcccctggggacaggaagggggctcagaatgaatgcagtgatttgaggtcgtcgactggggttctaaaccccaggtctcatcacccgcccctggtctctttgtggagggggttgtgggggttcctctttcttcagtgatcttatataagaacaataattctaggctcaaaagggtcgtagaacccaattatgaaaccttctggtctcnaaaaacaggcatctacttactttgaatcagctctttttacagtgctcccaggagtaggacccaagcatgtccttgtccaccagatgtattcccagcaccctggcaccccagcaggcacttcaccccacatttgttgaataaatcccccggagagggtacaacccagctggacagtgccaagaaagggcccctagagcaaaaacccactcaaggaattgggggtggggacaaaatacggagagagactgaagcctcagggcaaagaggaactcctcactgcctgagtgggaacaggctcaggtgcaaggacaaacatttcccagtgtgattgagctatgtgcgttcaattggataatttttttttttagggatttctttaaaaacaaatagatttgagaggtaattcacagagatggttttccttttacaaaaacttaatatttaacaacattaaaaaaaagttaaaatccaaaccctcccaataaaattaaaaaaagaaatcaaaccactccagttaaaagttatggcttcaaagttattatatacctaagatatgctggccaaatcaccacccacagccgtgcttctaggcttcgttaaatactatactcaggttaaataacatgttcggctcaggctgttcccttcagtagggctcctgaagtggatgcaaacctctcaccttccctccaccctgatcagacagtccagtaaaagaagacccatgcagatgcctccctcccaccccagactccctccccactccttgcccgcccttcccttccccaccccaaacccaccaccaccaaaaatatacactgctgtttccaggatctgggagatgaaagacagatgtaacattccaatctgagtcccgagatctggcttcacattcctcg

SEQ ID NO: 152058 - DNA, 2232 bp, Homo sapiens
cccacgcgtccgggcttgggtaaaggaagccgttttgccggagccttaggtcgggaagggatggatcgctgagcccatagcgtccgctaggcttgtctgcctcggtacctgttactgctgctacttcctcgtttgacaccttcctggaatctctcttgatttttgaggaaataccctagtaacaaacatgactgagttctggcttatatctgctccctggggagaaaaccctgtcagcaaacatgggagaaattgcatgcggcaacttcaaagaacaataatcttgctgtcacttccaagttcaataattcctgactttaaaggttgggcacgttgggatgtcttggttgggcttgtcagatgaactgggctaaactgggatgcattttgtaggaagggagttggttaaaggaaagtaggctccaattacatgggcttgatgtattggaagatagcaaagacaaagttcaagagaatctgttggcttaatgggagtggacttgggttaccttatataaccaaggttcccagtggggacatggccaaatatccaatcaagcagtccctgaaaaatatttctgaaataattgccaagggagtaactcagattgataatgacctgaaatctcgagcatctgcatacaataacctgaaaggaaatcttcagaatttggaacgaaagaatgcaggaagtttgctaactagaagtctagcagaaattgtgaagaaggatgactttgttcttgattcagagtatctcgtcacattactggtagtagttcccaagttaaaccacaacgactggattaagcagtattgaaacactagccgaaatggtagttccaaggtctagcaatgttctttcagaggaccaagacagttacctgtgtaatgtcaccttgtttagggaagggcagttgatgactttcaggacacaaagccaggggaaaacaaatttcattgttcgtgacttccagtataatgaagaggaggatgaaagcagataagaaaagaaatggaccgggcttctaccggataagaaaaaacaatttggacccacttgtacggtgggctgaaagtgaattttagtgaagcatttattgcatggattcacgtgaaagcattacgggttttcgttgagtctgttttaaggtatggcttgccagtgaacttacacacacatgatatttcaccgcaataacaacccttttaagccactgagacaagtattacatgaatcgtatatacatttagacagcagtgcaagcagctattattgatgctcctatggatattccagggttaaaacctgagtcaacaagaatactacccttatgtgtactacaagattgattgcaacttgctgaaattcaagtgaaaatgggctcctcccccagacaatcctggtccttgtgtttgtgtgtgctaacagaaaataagttgcagtatgggtcgtaccttttaactccagtatccttggctggcttcttaccccccctttccctaggtgaattctcccacagtggtctgtatctcaacattttctttttaaaggaaaaaatatatatatatagtttccttttattggatccaggtctgtaaatgtgtacctaaaaaaatccagagtttatttaataaacagaataagtttatttaaaagagaaggtccccttcccttattgatatccatggtatgccattaattcccatttgttactattgtgcacaaaagccctgttcacaggggaatggtgtaaacatttatactgttttgttcactgtatttagtagacataactgttgaataggtagttgatccatgatgtaaagaatatgtgaccatcttcaggtatggggatttctgaacggtttcaaatttcaatcaatgaagcactgtcaaaacccacagggggagaataaaattacctgtgcaaaggtgtattgtggtgtgtgtaacttaagattacagttctgtttgagagttaaatgatgtcatagctcacttgctatgctgcttccaggattttgttatatgctgaggtgtaaccatttgtgttgtctgactttcgtatgatttaattgagccaaatttgggtcagaacacaaatttgaagatgacttttcagtatatgatgggtatttacatttgaacactagaattttaggtctctcaaataattaagaatagagccagttttgaataaagtctagcagaactatgaaaaaaaaaaa

SEQ ID NO: 152059 - DNA, 1050 bp, Homo sapiens; identical to SEQ ID NO: 147321

SEQ ID NO: 152060 - DNA, 595 bp, Homo sapiens
atgggcaccgacagccgcgcggccaaggcgctcctggcgcgggcccgcaccctgcacctgcagacggggaacctgctgaactggggccgcctgcggaagaagtgcccgtccacgcacagcgaggagcttcatgattgtatccaaaaaaccttgaatgaatggagttcccaaatcaacccagatttggtcagggagtttccagatgtcttggaatgcactgtatctcatgcagtagaaaagataaatcctgatgaaagagaagaaatgaaagtttctgcctgttcagtccttggagttgcacagctggattctgtgatcattgcttcacctcctattgaagatggagttaatctttccttggagcatttacagccttactgggaggaattagaaaacttagttcagagcaaaaagattgttgccataggtacctctgatctagacaaaacacagttggaacagctgtatcagtgggcacaggtaaaaccaaatagtaaccaagttaatcttgcctcctgctgtgtgatgccaccagatttgactgcatttgctaaacaatttgacatacagctgttgactcacaatgatccaaaag

SEQ ID NO: 152061 - DNA, 2808 bp, Homo sapiens
ggcacgaggctgcggccgcagtagccggagccggagccgcagccaccggtgccttcctttcccgccgccgcccagccgccgtccggcctccctcgggcccgagcgcagaccaggctccagccgcgcggcgccggcagcctcgcgctccctctcgggtctctctcgggcctcgggcaccgcgtcctgtgggcggccgcctgcctgcccgcccgcccgcagccccttgcctgccggcccctgggcggcccgtgccatgggcaccgacagccgcgcggccaaggcgctcctggcgcgggcccgcaccctgcacctgcagacggggaacctgctgaactggggccgcctgcggaagaagtgcccgtccacgcacagcgaggagcttcatgattgtatccaaaaaaccttgaatgaatggagttcccaaatcaacccagatttggtcagggagtttccagatgacctccgaatgcactgtatctcatgcagtagaaaagataaatcctgatgaaagagaagaaatgaaagtttctgcaaaactgttcattgtaggaatcaaactctttcatcatcaactaggaaggtgcagttgacatgggcctgttcagtccttgggagtttgcacagctgggattcttgtggatccattggctttcacctcctatttgaaaggatgggggtttaatctttccttgggagcatttacagccttactgggagggaatttagaaaaacttagttcagaggcaaaaaggattgttgccatagggtacctctgatctagacaaaacacagttggaacagctgtatcagtgggcacaggtaaaaccaaatagtaaccaagttaatcttgcctcctgctgtgtgatgccaccagatttgactgcatttgctaaacaatttgacatacagctgttgacttcacaatgatccaaaagaactggctttctggaaggcaagtttccaaggaaggctctttcagggaaaggcatttcctggacatttcaagcggcacggagtggggtgccgctgtgggcttactgcggtattcggtcattgtgaaaagtagaggaattatcaaatcaaaaggctacattttacaagctaaaagaaggggttcttaactgacttaggagcataacttacctgtaatttccttcaatatgagagaaaattgagatgtgtaaaaatctagttactgccctgtaaatggtgtccattgagggccagatatttctttcgtccatatttgacagtaatgttgtctgtccaagttttaaatacttatctttgcctccataatcaatcccattctccatgaacctctgtattgcctttcccttaaactaattggttttcctaattggaaattggccccataagggaaaatccctggcaatatattttcccccttatttttatggccctaatataaatccaagaaaattggtggttagatatattttggcctaggtatccagggtaatgtatatacatattttttatttccaaaaaaaaattcattaattgcttcttaactcttattataaccaagcaatttaattacaattgttaaaactgaaatactggaagaagatatttttcctgtcattgatgagatatatcagagtaactggagtagctgggatttactagtagtgtaaataaaattcactcttcaatacatgaatggaaacttaaatttttttttatgtgtccttgcttatagtttagctgtaataatttaaccttgtattcttgcgccatattctgtctttttattacttataaagacaaaccaaagtaaatctggaaaggagactagaagctttgaaattattgtttggggggttttataaaagcaactactgtcacctccctcccgattctttttaaattatttgatccctccctagtatatattgctactcattcaagaatcctcaataagtattgagtatttaccatatgttgggatactgtgggctctggagagaggagggggcaatagagctaggaattaagaatcagttgagtaaaatgtgtaatatttattccccattaataactgactaggaaggactaaaagccagaaaggggatgaaaaaaaaatcctttaattcagggccgacattatctacttaaacaacttttgagatatggtcttaattattttcaaagcagaataatataattgacagtttatagctaaaagagactatataggtcatttagtataattctttcattagtttaaggaaccacaaaattcgcaaataaataagctatgaactttgatgtacactataaatctccttaattctataaatttgtgtctgtaaccctgaaatagtttgaaaacttctttaaaaatctcttgtatttcatccgggcgcagtggctcacacctgtaatccccagcactttgggaggccgaggtgggcagatcacgaggtcaggagtttgagaccagcctgaccaacatggtaaaaccccatctctactaaaatacaaaaattggctgggcgtggtggcactcgcctgtaatctcagctacttgggaggctgaggcaggagaatcgcttgaacccgggaggcggaggttacagtgagccgagatcacatcactgcactccagcctgggcgacagagcgagactccatctcaaaaaaaaaaaaaaactcttgtatctcaatatttttaaaccacaggcctaaataaaactaattttgctcaagttttctcaacctagggaaaaagaactatggttccatattcaaaataaatattatagacccttttcctaagaaa

SEQ ID NO: 152062 - DNA, 552 bp, Homo sapiens
ggaaatttgagcccagcaccctgtacccgtacctgcgtgaggaggacctggacattctcaagtccctggagaataccgtctccacggccattagcaaagctcagaatggtgcgccctcatggggtggctaccccagcatccatgcagcctaccagctcccgggcaccgtgaagccactgccggcggccgtgcagagcgtgcaggtgcagccgtcctatgctggcggcgtgaagtcgctgtcttccgccgagcacaacgccctcctgcactccccagggagcctcacgcccccaccgcacaagagcaacgtgtctgccatggaggagctggtggagaaggtcacgggcaaggtcaacatcaagaaggaggagagaccccctgagaaggagaagagctccctggccaaggctgcgtcccccatagcaaaagagaataaagatttcccgaaaacggaggaagtcagcggcaaaccacagaagaagggccctgaggcgagacttggaaggccaaaaaggagggaccgctggacgttcaaacccaaattgcacagag

SEQ ID NO: 152063 - DNA, 3725 bp, Homo sapiens
  misc_feature (1)...(3725): n = a,t,c or g
tggagatggaggggaaggaggatgcccagaaggtgctgaagtgcatgtactgtggacactcctttgagtccttgcaggacctcagcgttcacatgatcaaaaccaagcattaccagaaagtgcctctgaaggagccagtgccagccatcaccaaactggtcccctccaccaaaaagcgggcgcttcaggacctggcgcccccctgctcccctgagccagcaggaatggccgcagaggtggccctgagtgagtcagccaaggatcagaaagcagcgaacccgtacgtcacgcccaataaccgctatggctaccagaatggcgccagctacacctggcagtttgaggcccgcaaggcgcaaatactcaagtgcatggagtgtggcagctcccacgacacgctgcaggagctcaccgcccacatgatggtcaccgggcacttcctgaaagtgaccacctcggcttctaagaagggcaagcagttggtgctggaccctgtggtggaagagaagatccagtccatcccactaccgcccaccacccacacgcggctgccggcctccagcatcaaaaagcagcccgactctcccgcggggtccacgacttctgaagaaaagaaagagccagagaaggagaagccgcctgtggctggcgacgcggagaagatcaaggaggacagtgaggacagcttggagaaatttgagcccagcaccctgtacccgtacctgcgtgaggaggacctggacgacagccccaagggagggctggacattctcaagtccctggagaataccgtctccacggtcattaacaaagctcagaatggtgcgccctcatggggtggataccccagcatccatgcagcctaccagctcccgggcaccgtgaagccactgccggcggccgtgcagagcgtgcaggtgcagacgtcctatgctggcggcgtgaagtcgctgtcttccgccgagcacaacgccctcctgcactccccagggagcctcacgcccccaccgcacaagagcaacgtgtctgccatggaggagctggtggagaaggtcacgggcaaggtcaacatcaagaaggaggagagaccccctgagaaggagaagagctccctggccaaggctgcgtcccccatagcaaaagagaataaagatttcccgaaaacggaggaagtcagcggcaaaccacagaagaagggccctgaggccgagacttgggaagccaaaaaggagggaccgctggacgttcacaccccaaatggcacagagcctctcaaagcaaaggtcaccaacggctgtaacaacctggggatcatcatggaccactcaccggagccttccttcatcaacccgctgagcgctttgcagtccatcatgaacacccacctgggcaaggtgtccaagcccgtgagtccctcgctggacccgctggcgatgctgtacaagatcagcaacagcatgctggacaagcacagtgtaccccgccacccctgtgaagcaggccgatgccatcgaccgctactattatgaaaacagcgaccagcccattgacttaaccaagtccaagaacaagccgctggtgtccagcgtggctgattcggtggcatcacctctgcgggagagcgcactcatggacatctccgacatggtgaaaaacctcacaggccgcctgacgcccaagtcctccacgccctccacagtttcagagaagtccgatgctgatggcagcagctttgaggaggcgttggacgagctgtcaccggtccacaagaggaagggccggcagtccaactggaacccgcagcaccttctcatcctgcaggcccagttcgcctcgagcttgcgnggagaccacagaaggcaagtacatcatgttcggacttgggcccacaggagagggtgcacatcttcgaagtttactgggctctccatgaccaccatcagccactggctggccaatgttgaagttaccagtttgaggaggacaggggggaacgaaattcctaaaagaacctgggacacaggggcatcctgttttctttttgcaacgattgtgcctctcagttcagaactgcttctacatacataagtcattttggagacacacttggggcttcagcctgaaggatctctccaagctgccactcaatcagattcaaagacagcaggaatgtttgaaaagtcctcaccaacaaaactctggggcccactgggggccaccgaggaagacttgggctccacattccaatgtaagctctgcaaccggacttttgcgaagcaagcacgcagtcaaactgcaccttagtaagacccacggcaagtctcccgaggaccacctgatctatgtgactgagttggagaaacagtagcgtccagggtatgcaagagaccgcgggaacaattgccacttaaacgtcgtcgagctgcactagggcctggcctgagcctctgaaaatcagtctttcctttgttgctgggccngcctctctggaccttggttttcttaccccatattttgtatatttatatgcctcctctgtcccgatcctgtgcatgttatttttcctttttcccgtgagtcaaagtctgacctttattttcaacatctgttcttggtgttaagctatcttttgtaggaaatagtggggcacactactcagagacattatttagcagtaaagaaagacacaaataacaatgataaaaagacatcctaaaatgggtgaagttgccatgacaataaaggtcataggaacctgggtaggtgtcaaatttaaccctttgagggactgttaattgccatttctgtgcctttcacttgaaaaaaaaaaaagaagaaaaaaaggcttaaaggcatttcattcagatcaaaagctgtgtcagacacaaaacttatttaataattaaaaaatgagcttttatatgcagaactggtttgtgaggaaacatgcatgcagctgttgggaagatagaaagcctgcctaggactcacggggttcggaagccacacctctacatgtctaaaacaaaaaacaacaacaacagatacccccactcgccactatgcccaaacccctctggatgctgaaaaatgccactttcggcaaaaaaaaaaatgtatgcaagctattatttaaaaatgtgtaaaaatgctatttcttttttcctgtaaaatattgcagtttatagttatttacaaatgtaagctttggtacaagctgacctttctatagcgtgctgcattggtaaatgaaaaaaaatggggcaaaccgttggagtcctttccttggaaattgcccagcatcagcttaaaaaactccctggtatggttaccatatcggtacccatttttaatctcttccaactttctttgtaccttctgggctgtatgctttctcttttaactttttatagtggtcattttatattaaatttctgtgtatataatgtaaaaccacaattttttgaataaaatttagttcctgcagcttgatttaaatagaggacttttactggcacctgcatctctccagatgcatgtactcagagggactgtcagacaaaaataaatacataaaaacaacgcaagcaatgcactattaattatacattttgatgttctatcattaatattgtacagtacattttggttcacacaattaaatccactgttttctcagatgtaaaataaacccacatgcagttcttgatttacacggaaaaaaa

SEQ ID NO: 152064 - DNA, 1116 bp, Homo sapiens
cccccatttaaaggggcgacatttacactcacctttaaaatgggaaagtctatatatgcgctacttgggcccactaatatccctgtgaaatatctacccttaaaaatgtgggagaatccttagaactcttaatataataccgtgaattataaatcccaccctgaaggccagagcatgtgttggtcaatgcctgtaatcacagcaacctttgggaacccgaggcgggttgatcaacccctgaggtcaggagttcaagacccagcctggccaacatggcaaaattccatctctactaaaaatacaaaaattagctgggcatgggtggtgcatgcctgtaatcccagctacttgggaggctgaggaaggagaattgcttgaacccccaggaggcggaggttgcagtgagccgagttcgcgccactgcactcccagcctgggcgatagcgtgagacaccatctaaaaaataaaaaaataaaaaccccccaaaatgagaaattaaatatttaaacatattcaattacaatttttactagacaaatcttataatccacatgccttctctgaggttttcatctgtttgttttttttaaaaataattatagcaaatgctttagtacaaagacttagtccaagactattattgttttccaatttaagggtgaagcattctattaataaaactcactgtaaaaacatttacaattcagtgtaaaattactacttactaacaatgcatataattcacctcctcctactgtctacaaaaaaggaaatttccactttttatgttttaaaattgattcaaacacttgtatagaggatttattaaacctgctcataaccacttcatagaaagtgtcagcaccatctcatactggtgcatcacggtaaaagaaaacattttagaaacaaaaccactaaaaccaacagtttaaatgactatttacagagcattaggtctccaagttaatatctccccactagagttttacaggcttcctcatatttctgaggcttaacaaaaataattttatagctgccactttgttccaaagacaaatttcctaataaaataaatttctatagaactggttcagtaaaataaaatctctccc

SEQ ID NO: 152065 - DNA, 5373 bp, Homo sapiens
atctgaagccatttttgttggccttcaatgctatttgtcttgtatttgctatcgtatgtgttagaaaactatttcttatagctaacatcaaggtaaacttcagtccagcggatgtgaattacagcaaaatcccagtgaatgcggtttcacagtacttccaagtggcacaaagtaatttcagaactccactaatcattaacagcgttgcaaaaaagaataggcttttctgatttgttttttgggcaatagaacactttctggcattctaggtacttcaatatgtgtccttcaatcaccctgaagtgaaagcagtcctggcaacttaatatttgcctccagatgggtctctagtcagttcatgctgaaacacagctctgccacccacaacttggagctgaccagcccccagggaacatggaagaggacaggacacacctgttctagaaaaccaggtcctcagtaaacactgctgggaatgaaagcctaaaattatacagtactccattcctgtgaacgggccaaaggatgacgggcaacacaggggaaacctgttttcacatttggtcatctcctcacatgtcgtgtgagctggaggagagccgtgtaaacacgagggccttgctttgccccctggaaagctgccccctagcatagtatctcccaggcaaagatgccatgctcactgcaaactatggaatgaggtcagaacagaatcaaagtaacgcttgatgggaaaagttggccccaagaccccagtactaagagggtcgcctgcgtctcacacacacacactcacagcaagctttgggataaaaggcaaccgggatggttgacatctgaatgcaatggaacatgaaggtcagcttcagtccctactgggaatgatttcatgagaaggtagcccagatgaaacacctcttaaagatagttgtgccaattatttattcccccaaccccccacaaaaacaaatttttttaaataaaaggaaaagaaataggatttttttttctaaacctgaataaaatgaccacttttaaaacaggtagtttaaaagggttacaaaacaagcaggcagtccaggtttcctgattaatgaagatggaggccgtgggttttcactgtctctaagtgacacacagggctttatagttctgcgtcaccctgaagcaagactgaatcttgatcatccaagagaagaatcggtgtccacaacttcagcctcttccatgacacctcccaactgctggacgacgtcgtcgtcgagggatgtccacatccttgatgggttttttgatcagactcagctggtccaggggacagcagccccggcgcccccacgggctcccgtagtcctctcaatcgtggctgccatctcagctgcaaaagccgccttctgagccttttgcctctgttgttcctcctgctgcctgtgagttttcatgtgtgcatttcggcttttgatcttgaagaagactctagccttgctgatgtaactagggatgttttcgtggtagagtttcagaaaccacttgggcagcatctctcccaggtaatactccttttcatgctcgaggcacgaacagtacccactctgggtgcccaccaggcttctgcttcccagaggggatggcacctcgggccttggtcacctggttggtgcccccgtggatgcgggcatggccattcagtgcctgtcgggagctgaacacagccccacagttgggcatttcacagatgaaggagcctgagggctggcccagggcctgcaggggcggcccctccgtgggagccaggacggggacgggtggtggctccggggacttcggcacctcactctcttcttcttttgtggatttcctatcttcttccgggtcctcctcctcctcctcctctaactcttcttcttcttcacttgtcacacaatcgtcgatgatttctgccaggcgtgtccggtgtttccgccccagccgcatgatctttttccacgtgtagtagtactccacgcactgagccaccgtcttggacttcaccatcttctgtacaaaaataaagtctttgctgtaagtggctagtgctttgttaaacagttttctttctagggaggtccacttgtccgaacctgatttctggccccaaaagcagtgttcagttcccaggcctgtcgatttctgagaagcatgtcccttcatgtttccaaattgcttgccagatgcaactccactggtgatgtaacttcctggcccatcggcatagtggtaatttgctaaaggatgacattttaacctgacaggcttccgcagtagcagcatttccagagcaaccagtgtggccttgtgtgtgtcctgggccagggcagagatatcttggagttcagggatttctgcttggaatctcaagccaatgttgatgcgtggttcaacatctacagtctgctctccaggccctggggtgaccgtcacgttgctgccatcgatgctgttggagcgacacagcagcacccgtggtgtgggcgtcaggggcgtcaggggcagctgcgggtgggcgccagggccgtggccggagatgaggacattgctgaagagccccgagccctggcgcaccgggctcagcatgggtgggggcgtgtaagggggcagctcgtgggtggggtccaggagcaggtggtccccgaggacgcgcggggagcgcagctggctctggtacagggtggcgcccgagtaggaggcagcggggttcgggttgtaggagggcggcggcgggatgaagagaggttccggccggtgccggaactttttcttctcctgcacggtcttgaggggctcctcggctttgggcacactcggctgatgcttcctggggatttcctgccccatgggctcctctgctctgggctcctctccctccagagcttcaggctctgcccccttctgtttctccctcagcttctctgccttccatggtgccatcctggcctctaggagaggagtgagcacaggcatctcgtcgtccgacatcgagctggctggcttgtctctggcggagggggcggcaacggtgctgttggtgaacccctgagagctgggcttgggcgggagaagcttgacagggacagacacgggcatgaccataggcgtgaggctttctgcctcgggagggagctgtttgaggttgggggaggccctcattcccccgtgggaccgcatgtggccattcagggcaggcaggttcttgaactccttcaggcagatggagcatgtcagcttgttcttggcatcaaactgctccccaaacgctcctttgggttggccaccttccagggtcagcctgagcccagctcctccaaaagcctccccacttagagacatttgtgcaagttcctggggcagccgccgtactgcacgcttcagcagtttatcaggtttggctaaatctttattgaccatgcccatgggatgaggaagcaagtctgtactgttcactgctgcattctcaaaacctagctctatgcttggcacacagtaggcactcaataaatactggggccacatggcactgggagacagctgctgatgctgaggccccatgttgttgaggtggatcccactgggggataggagggggcgatgggggagggtgctgctgacccgggtcagatctgagctcgctgggtctcccattcctgtgtcaggaggccccaggtccccatgggagctcagcatggcctgggcctgtctgtcactagagtaggtcttcagctgactgtcctcacgctgctggtgctgggacaggtggctctgctggtagagggggtggctgtagggctgctggggctcctggtagtagtactgggacatggagcccaggggaatcagctggacagtgtgtgcctgctctggggtatactggtgagggtccctgtgataagaaggaggctgcaggtgcatctgttgctgctgctgctcttgcaagtgctgcatcatgggttggggctgataatactgaggtatctgcattgaaccctgccgctgctgcagctgtagctgctgcggctgctgctgctgtggcggcggctgtggctgtgatgggcgaatttgttgcggctgcgtctgtatttcttgcatggagatacgctgttgcccggcttgctgctgttgctgcggtgggtaatactggtgctgctgcatctgttgcatgtgctgtgacagcatctgtggggcctgcagtggctgtcctccctgcactggcacctgagccagaggctgctggtagtcataatacaggtgcccttgggtagggtgctgcccgacctgaagagctggtttggacagcccaccagtgaaaccagggtgaggctgctggggcacctgctggtagcgggaagggatagccggtgctgggggctccatgggcttctgagacagcagctggcggagagcactgtcaggggctccatccatcactgctgactgagtgtgcagcacctgggccatattgttgacctgaattcgcaggttttggttggcaaacacctgggtgaaagagtccagcttgtgtaagacaccgctggtaagcttctgggtccggatctcgctggcctgggagtaggtgtattggtagccatcagtgggctcagcctgggctggtgccccccacatcatgtttgagttggccaggtttccacgtagctggacatggtttccaggccctgcatgacttccccaccctccctgcctcgaggtatccatttggccaaggtttttggagccaacaggcaagcccagaccatcccgtgtatcttgagggaagtggggggagattggcgaggcctgaggggcatccattccgccccctgtaactgcattcccatagttgtggttcagcccgctgtggacgccaagtggtggctgttggtagaaaaggttctcactaccatgggccacatggttggtcttgtacagttgctggtcacccatgctgtctgccttggttgtgaacgtccagccacaaaaccataaaaaaggtaaataaaacaaacccaaaaggactgaaaccctgagaagctgagagaaaagtgtcagcactactccacggctgacatgtctgtgaacgtggctggagccaggtgttcctgttggcctgtaccactcatgtgcagggcggggggtttcacatcctctccctggctgaggtatagaccacacagcactgtggtgaggagacgtcgctcacaccttgacctccgcagatggctgagttgggggcctggttctgggggcttctcctgcggtcggccaatcatgctgctttcatgctgctggacaggtgggaagaggaggcctggtcctgtggggaaaagaaaaaggaaaggtcat

SEQ ID NO: 152066 - DNA, 412 bp, Homo sapiens
ttttttttttttttttttgataaataaaaccaaacgtttatttacaccaaagaattccaacactggatctttcacatatgaaggacaaagtattatatatatacacacagcaaggggtggcggggctgtaacaagagagtttatagttttcccacaattacaggtctaccatttcagcttcaatggagatagtggctctgctcctacctctcaagatacatttacaagactgagacacacttccacaagagccactaggataaccccactgaagcgcttatggagtaaagtgatgtaagcgaccagcaagcagtccactggatggcatgtgagggaaggggacggtcggaggaaaagaaggtagaaagcttaaaatggaagtcagtgtggccacatctcccattagctctag

SEQ ID NO: 152067 - DNA, 530 bp, Homo sapiens
ccgcttccaccacagtttgaagaaaacaggtctgaaacaaggtcttacccccagctgcttctgaacacagtgactgccagatctccaaacatcaagtccagctttgtccgccaacatcatcacactggcagacattgtaaaagaccctgtgtcacgaacccccgccttggtttttgaacacgtaaacaacacagacttcaagcaattgtaccagacgttaacagactatgatattcgattttacatgtatgagattctgaaggccctggattattgtcacagcatgggaattatgcacagagatgtcaagccccataatgtcatgattgatcatgagcacagaaagctacgactaatagactggggtttggctgagttttatcatcctggccaagaatataatgtccgagttgcttcccgatacttcaaaggtcctgagctacttgtagactatcagatgtacgattatagtttggatacgtggaggatgggttgtatgctggcaagtatgatcattcagaaggagccat

SEQ ID NO: 152068 - DNA, 1836 bp, Homo sapiens
atgagaaggactcagcctgccgttactggaggggaccagattgaaagtgtgagacggggaatgcaggcagcctctagtaggaaaggccagtcccagctgacaaccagcaaggaagtgggaactcagtcctacagctgcaaggaactaaattcagccaatagcttgaatgaatgtggaagcaaattttccccagagtttccagcagggaacccacccactggataccctcatttagcccttagggtaatagccagtggagtaaagtttcacattgtgactttattttgcttatatggcgtggtaaaaaggtgtatagatgatgactatattgtaagagacagtactggaattccgatttctcttagaaatcaagatgactaccagctggttcgaaaattaggccgaggtaaatacagtgaagtatttgaagccatcaacatcacaaataatgaaaaagttgttgttaaaattctcaagccagtaaaaaagaagaaaattaagcgtgaaataaagattttggagaatttgagaggaggtcccaacatcatcacactggcagacattgtaaaagaccctgtgcaattgtaccagacgttaacagactatgatattcgattttacatgtatgagattctgaaggccctggattattgtcacagcatgggaattatgcacagagatgtcaagccccataatgtcatgattgatcatgagcacagaaagctacgactaatagactggggtttggctgagttttatcatcctggccaagaatataatgtccgagttgcttcccgatacttcaaaggtcctgagctacttgtagactatcagatgtacgattatagtttggatatgtggagtttgggttgtatgctggcaagtatgatctttcggaaggagccatttttccatggacatgacaattatgatcagttggtgaggatagccaaggttctggggacagaagatttatatgactatattgacaaatacaacattgaattagatccacgtttcaatgatatcttgggcagacactctcgaaagcgatgggaacgctttgtccacagtgaaaatcagcaccttgtcagccctgaggccttggatttcctggacaaactgctgcgatatgaccaccagtcacggcttactgcaagagaggcaatggagcacccctatttctacactgttgtgaaggaccaggctcgaatgggttcatctagcatgccagggggcagtacgcccgtcagcagcgccaatatgatgtcagggggttggtatctcgtgctcttctccagagattacaaaaatgtagcttctcaggggaggcaggaagaaaggaaggaaggaaagaaggaagggaggacccaatctataggagcagtggactgcttgctggtcgcttacatcactttactccataagcgcttcagtggggttatcctagtggctcttgtggaagtgtgtcttagttacatcaagatgttgaaaatctacccaaaatgcagacagatactaaaaacttctgttcattgtgactggtttagaagtggatacacagggagaggtcttctggaaaaggtcttctggagagctgagatcagaagacaatcaactggcttcaaatctaaggagagacaggcacaaaatggaagagatgacatgggcactggttacctggtaaacacaagtggacactggacccaacctggtaccagaaatgaaggaaatgtccctgcaggacccacagccctggatgatgcagcttcctcagacgacacaagccccagacattacctgggggatgctgaagaagacaactcaggaggctga

SEQ ID NO: 152069 - DNA, 430 bp, Homo sapiens
ggggttggtatctcgtgctcttctccagagattacaaaaatgtagcttctcaggggaggcaggaagaaaggaaggaaggaaagaaggaagggaggacccaatctataggagcagtggactgcttgctggtcgcttacatcactttactccataagcgcttcagtggggttatcctagtggctcttgtggaagtgtgtcttagttacatcaagatgttgaaaatctacccaaaatgcagacagatactaaaaacttctgttcattgtgactggtttagaagtggatacacagggagaggtcttctggaaaaggtcttctggagagctgagatcagaagacaatcaactggcttcaaatctaaggagagacaggcacaaaatggaagagatgacatgggcactggttacctggtaaacacaagtggacactg

SEQ ID NO: 152070 - DNA, 2806 bp, Homo sapiens
gcggccgccgccgctgccgcttccaccacagctctatcaaggcttgtcaagcagtgtgctcatcacatggtaaatcatagacagcgtggaacctcataaaatctgccaagaaacatcattcacccatactgactagtttcacatctctttgtttgaagaaaacagggtcctgaaacaagggtccttaccccccccagctgccttcctgaacacagtgactgcccagatctcccaaacatcaaagtcccaagctttgtcccgccaaccctgttctgaccatgtcggggaccccgtgcccaaagcagggcacagagtttaacacagatgttaatacacacagacctcgagaatactgggaatacgaagtcacatgtggtggaatggggaaatcaagatgactaccaacttggttcgaaaattaggccgaggtaaatacagtgaagtatttgaagccatcaacatcacaaataatgaaaaagttgttgttaaaattctcaagccagtaaaaaagaagaaaattaagcgtgaaaataaagattttgggaggaatttggagaggaggtcccaacatcatcacactggcagacatttgtaaaagaccctgtgtcacgaacccccgccctgggtttttgaacacgtaaacaacacagacttcaagcaattgtaccagacgttaacagactatgatattcgattttacatgtatgagattctgaaggccctggattattgtcacagcatgaggaattatgcacagagatgtcaagccccataatgtcatgattgatcatgagcacagaaagctatgactaatagactggggtttggctgagttttatcatcctggccaagaatataatgtccgagttgcttcccgatacttcaaaggtcctgagctacttgtagactatcagatgtacgattatagtttggatatgtggagtttgggttgtatgctggcaagtatgatctttcggaaggagccatttttccatggacatgacaattatgatcagttcggtgcagaatggccaaggttctggggacagaagatttatatgactatattgacaaatacaacattgaattagatccacgtttcaatggatatcttggcaagacactctcggaagccgatgggaaccgctttgtcaaacagtgaaaatcagcacccttgtcaagccctgaggccttggatttcctggacaaactgctgcgattatgacccaccaagtcacggcttacttgcaagagaggcaatggagcacccctatttcctacactgttgtgaaggaccaaggcctcgaaatgggtttcatctagcaatgccagggtgcagtacgcccgttcagcagcgcccaatatgatgtcagggatttcttcagtgccaacccccttttacccctggacctttggcaggctcaccagtgattgctgctgccaacccaccttgggatgctctgatatccagctgccgctggcgctcagcagtgaacggccctatctgtctcctgatgcctgagcagaggtgggggagtccaccctctccttgatgcagcttgcgcctggcggggaggggtgaaacacttcagaagcaccgtgtctgaaccgttgcttgtggatttatagtagttcagtcataaaaaaaaaaattataataggctgattttcttttttcatattttttgtaactcgaacttttcataactcaggggattccctgaaaaattacctgcaggtggaatatttcatggacaaattttttttttctcccctcccaaatttagttcctcatcacaaaagaacaaagataaaccagcctcaatccccggctgctgcatttaggtggagacttcttcccattcccaccattgttcctccaccgtcccacactttagggggttggtatctcgtgctcttctccagagattacaaaaatgtagcttctcaagggaagccaggattgaaagggaagaaggaaagaaggaagggaggacccaatctataggagcagtggactgctttgctggtcgcttacatcactttactccataaagcgcttcagtgggggttatcctagtgggctcttgtggaaagtgtgtcttagttacatcaagatgttgaaaatctacccaaaatgcagacagatactaaaaacttctgttcagtaagaatcatgtcttactgaatctaaccctaaatccaactcatttaatactttaatttttagttcagtttaaaatgttgataccttccctcccaggactccttaccttggcctttccctggtccatctcccgaacatgctgtgctccatagctggttagggagaggggagggccaaaatctttccttaggttttcctttggtcctggcccatttgggaattcatttaagttactgggccataccttactgctttttacaaaaggaaacaaaacattgtctgtacaggtttccatgctagagcttaatgggagatgtggccacactgacttcccattttaagcttttctaccttcttttcctccgaccggtcccctttccctcacatgccatccagtgagaagacctgctcctcaaccttgtaaatgtatcttgagaggtaggagcagagccactatctccgattgaagctgaaatggtagacctgtaattgtgggaaaactataaactctcttgttacagccccgccaccccttgctgtgtgtatatatataatactttgtccttcatatgtgaaagatccagtgttggaattctttggtgtaaataaacgtttggttttatttatcaaaaaaaaaaa

SEQ ID NO: 152071 - DNA, 1568 bp, Homo sapiens
  misc_feature (1)...(1568): n = a,t,c or g
aaaatcaaagcacagttgtccattaacacttataagttaattatgggtttatgagtctgtaatgttatatgctgcaaacatttactatgtaaacgtgaagtagccaataatatctcaatagtagtaacagtgatctttagcgacctttggaatagttaagcacaggtcattgtggaccatgaattcaggcctctgtactaaaatctatttcagggaatgttctgtctagtgatttgctcaccatttgatatataatgaattataggacaagtataagctgatctgctatagctgtccatcagagagaatacacgtggctataacatctataacaaaacgacgattcctctacaagaggctgtttctcactgctaacgttggtgtttctggcgtgggaagaaatgcacgaggcgtgcatggcgatgcacgttcagacagctgcattgtaagagttcctgtcatgcagtctgaaaagggaagaaacaggatggctttctgtagccacacctgtgaggcgtgatgaatgttgtaatattagattactgatttttctttttttgaaatacatttgaggtttaatcacatcctgtggaaagctgtaacttttaaggtagtccaatttccatgtccttgttccaaccgatggtaagccagaaactggaattgccctaatttttgccaacttggccattattggggattaatggtttaaatttttgggtaaaggaagtaatctcctttcattcattgtgacttttgttcttagggaagcagagaagactccccaagttcttataacctcattgtgcttccctaatttaaagccatgttgaggggctccattcccaattcctgggttcaaaggtgaattaaacccctatgttggagcaacttggaaaccgttatttgcaaaacattgcttgttacccatttagaaatatgtgcacttatcagcttgggtgcagtggctcacgtctgtaatcccagcacttttgggaggccgaggcaggtggatcacctgaggtcaggagttcgagaccagcctggccaacagggtgaaaccccgtctctactaaaagtacaaaaatttagctgggcgtggtggcggacgcctgtaatctcaggctacttgggaggctgaagcaggagaggtgctggaacctgggaggcggaggttgaagtgagccgagattgcgctattgcactccagctcgggcgacaactgcaagactccatctcaaaaaaataaaaataaaagaaaagaaagaaatatgtgcactacctaagttttgtctttagaaaaactatccacctataaaaaattaccttgacaaaaatagttccggtttgactaatcattttgtttctttaagtggtaagtgtatgcaaggtggatccttgatgagccaacattgcactgtggatacatatctatgtttacgcgctattagaacagaaggcgctgtatatagaaatgttgcttttngaagcaatatttgcaaaacacgcagacttctgtatctgtatttggaaaaaataaaacaggttcttgttgctatgtttcagtt

SEQ ID NO: 152072 - DNA, 569 bp, Homo sapiens; identical to SEQ ID NO: 146303

SEQ ID NO: 152073 - DNA, 746 bp, Homo sapiens
  misc_feature (1)...(746): n = a,t,c or g
aattttgccctcgaggccaagaattcggcgagggcaataagctcctagtcccagacgcccatgggtcatttcacagaggaggaccaaggcttactatcaaaaagcctgtggggcaaaggttaaatgtggaaaaaatgctgggaaggaaaaaaacccccntgggaaaaggctcccccctggttgtccctaccccaatgggaccccaagaggttcctttgaacaagctttgggaaaaccttgtcccntcctgccctcctgccccatcaatgggcaaacccccccaaaagtcaaagggcaccatggcaaagaagggtgcctgaccttcccttgggaagatgcccataaagcccccctggatgatcctcaaagggcaccctttgccccagcctgaagtgaactgcactgtgacaagctgcatgtggatccttgagaacttcaagctccttgggaaatgtgctggtgaccgtttttggcaatccatttccggcaaagaattcacccctggaggttgcagggcttcctgggcagaagatgggtgactgcaagtggccagtgccctgttcctccaggataccactgagctcactggcccatgattgcagagcttttcaaggataaggcttttattcttgcaagcaattacaaataataaatctatttctgctaagagatcacacatgattttcttcagctcttttttttacatctttttaaatatatgagccacaaagggtttatattgagaa

SEQ ID NO: 152074 - DNA, 393 bp, Homo sapiens
tttcgtgttgtgtctgagccgagtagtggaaggcggttggaaggaggtgtagcgtgagactggactgcccgcattgggtacatgcgcagtgccgctcgcgcgggccgcgccaatcctgcagcgccttcaacagtctccacgtacgtccctcaaagcgcgtcctaaaacccggataaccggagcgctccccatggaccacacggagggctcgcccgcggaggagccgcctgcgcatgctccatcgcctgggaaatttggtgagcggcctccacctaaacgacttactagggaagctatgcgaaattatttaaaagagcgaggggatcaaacagtacttattcttcatgcaaaagttgcacagaagtcatatggaaatgaaaaaaggtttttttg

SEQ ID NO: 152075 - DNA, 381 bp, Homo sapiens
  misc_feature (1)...(381): n = a,t,c or g
ggcactcccaagattgataattaggaaagttgataagcagaccgcattattggatgcagatgatcctgtgtcacaactccataaatgtgcattttaccttaaggatacagaaagaatgtatttgtgcctttctcaagaaagaataattcaatttcagttgaatgggcggtggggacgtaggcaatgcttgaacttacagggacagaatttcacttccaaatttacggagtgtgggtttgggggatgtaggaaggctggaaactatgttacaggtgtgggaggaggagtatggctcttgtgttcgtccccagacatttctggcatttccgaggaaggttgggagatggggtcccggncaaccagttccggggttcccgttaa

SEQ ID NO: 152076 - DNA, 200 bp, Homo sapiens
tatgcattgcctcaggaacaaaggtggctctgtttaatcgactacgatcccagacagttagtaccagatacttgcatgtagaaggagtggatgatgatgaatcagaaggagaagaattcacagtccgagatggctacatccattatggacaaacagtcaaacttgtgtgctcagttactggcatggcactcccaagattg

SEQ ID NO: 152077 - DNA, 637 bp, Homo sapiens
atgcgcagtgccgctcgcgggccgcgccaatcctgcagcgccttcaacaggtttcgggcggcgaattccagttctccgggttttggggctccctgcgggaggcagtgctggatctgggaatctctaggaaaggaaagagcaaaggaggggaaagatggggggctgcagtctccacgtacgtccctcaaagagcgtcctaaaacccggataaccggagcgctccccatggaccacacggagggcttgcccgcggaggagccgcctgcgcatgctccatcgcctgggaaatttggtgagcggcctccacctaaacgacttactagggaagctatgcgaaattatttaaaagagcgaggggatcaaacagtacttattcttcatgcaaaagttgcacagaagtcatatggaaatgaaaaaaggtttttttgcccacctccttgtgtatatcttatgggcagcggatggaagaaaaaaaaagaacaaatggaacgcgatggttgttctgaacaagagtctcaaccgggtgcatttattgggataggaaatagtgaccaagaaatgcagcagcttaaactttggaaggaaagaactattgcacagccaaaacattgtatatatctgactcagacaagcgaaa

SEQ ID NO: 152078 - DNA, 748 bp, Homo sapiens
gaaggcagcgagcaggatcccctactctgcgggcggcgcgaggcgtctggctcttcgcggcggcggcgaggggaaagggagcgcgggggctgggtggaatcgaggagtgaggaaaaagggaaggggcgggggagagggaccagggaaggcgtcggggggaatctcgcgagggttggagttttggcgagagtttgtggaagatggcgcctgttgtgacagggaaatttggtgagcggcctccacctaaacgacttactagggaagctatgcgaaattatttaaaagagcgaggggatcaaacagtacttattcttcatgcaaaagttgcacagaagtcatatggaaatgaaaaaaggtttttttgcccacctccttgtgtatatcttatgggcagcggatggaagaaaaaaaaaagaacaaatggaacgcgatggttgttctgaacaagagtctcaaccagtgtgcatttattgggataggaaatagtgaccaagaaatgcagcagctaaacttggaaaggaaagaactattgcacagccaaaacattgtatatatctgactcagacaagccgaaagcacttcatgttgtctgtaaagatgttctatgggccaaccagttgatgacattggtgtgttcctccagcaagcggataaaagtcatctccaaaccttccaaaaagaagcagtcattgaaaaatgctgacttatgcattgcctcaggaacaaaggtggctctgtttaatcgact

SEQ ID NO: 152079 - DNA, 716 bp, Homo sapiens
  misc_feature (1)...(716): n = a,t,c or g
atcattagcacagataggcagagtatacatttatgagggaatgggccctgtctttgcnccagtcactcctgtgcctgtggtagagagccttcagttgaatgncggtggggacgtagcaatgcttgaacttacaggacagaatttcactccaaaatttacgagtgtgtttggcgatgtagaagctgaaactatgtacaggtgtgaacaaagtatgctctgtgtcgtcccagacatttctggattccggagaaggttggagatgggtccggcaaccagtccaggttccagtaactttgggtccgaaaatgatggaatcactttattccaccagcctttacctttacctacacaccagaacccagggccgcggccacattgcagtgcagcaggagcaatccttcgagccaattcaagccaggtgccccctaacgaatcaaacacaaacagcgagggaagttacacaaacgccagcacaaattcaaccagtgtcacatcatctacagccacagtggtatcctaactaccgtctttttgctaggacttaaactgacttgagtgtggcaaaaagttaccaaaaaaggagaaaaaatgaccaatcgtttgtggtttcttgggaaaacttttcataccaggtgatactattcaaaaaccccgttgtctccctgcaagtgctgatttgaaatgcagaagccccagtaaaaaaaaaaaaaaaaaaa

SEQ ID NO: 152080 - DNA, 5721 bp, Homo sapiens
aaggcgtcggggggaatctcgcgagggttggagttttggcgagagtttgtggaagatggcgcctgttgtgacaggtcattgaaattatgagactatcattcaaatggaagcattatagttcttcggaaccattatgatctcaaaacgaaaggagaatgatacagatacactggctgaggtgttttgaggtgcatcgaaagtgttccaagctgtgacttacccttaacatgttcttgaagtaccatggcgtggattaaaaggaaatttggtgagcggcctccacctaaacgacttactagggaagctatgcgaaattatttaaaagagcgaggggatcaaacagtacttattcttcatgcaaaagttgcacagaagtcatatggaaatgaaaaaaggtttttttgccctcccccttgtgtatatcttatgggcagtggatggaagaaaataaaattacaaatgaaatgcgatggttgttctgaacaagggtctcaaccatgtgcatttattggcataggaaatagtgaccaagaaatgcagcagctaaacttggaaggaaagaactattgcacagccaaaacattgtacatatctgatttagacaagcaaaagcacttcatgttgtctgtaaaggtgttctatggcaacagtgatgacattggtgtgttcctcagcaagtcgtccaaaccttccaaaaagaagcagtcattgaaaaatgctgacttatgcattgcctcagggaaggaaaggtgggctctgtttaatcgactactatcccagacagttaggtaccagatacttgcacgtaggaaagagggtaattttcatgccagttcacagcagtggggagccttttttattcatctcttggatgatgatggatcagaaggagaagaattcacagtctgagatggctacattcattatggacaaacagtcaaacttgtgtgctcagttactggcatggcactcccaagattgataattaggaaagttgataagcagaccacattattggatgcagatgatcctgtgtcacaactccataaatgtgcatttgaccttgaggatacagaaagaaagtacttatgcctttctcaagaaagaataattcaatttcaggccactccatgcccaaaagaaccaaataaagagaagataaatgatggtgcttcctgggcaatcattagcacacataaggcgaagcatacattttaccgagagagtgggcccctgtcccttgcccctggtcatgccctcccgccctgtccgtagagagccttaagttgaatggcggtggggacgaaccaagcttgaaacttaacaggacagaatttcaactcccaaaattttacaaagtgtggtttggggatgtagaaagctgaagctatgtacaggtgtggaagaaagtatgctccgtgttgtcccagacgtttctgcattctgagaaggttggagatagttcccagcaaccaatacaggtttcagtaactttggtccgaaatgatggaatcatatattccaccagccttacctttacctacacaccagaagcagggccgcggccacattgtcagtgtagcaggcgcaatccttaaggccagttcaagccacgtgccccctaatgaattaaacacaaacagcgatggaagttacacaaatgccagcacaaattcaaccagtgtcacatcatctacaccaacagtggtatcctgaactaccgtctttttgctaagactcaaacggcttgagtgcagcaaaaagttgacaaaaaaggaaaaaaaaatgaacagtcttttgtggtttattgggaaacttttcataccaggtgatactattctaaaaccccgttgtctccctgcaagtgctgatttgaaatgcagaagccacagtaaaaaaaaaaaaaaaaaaaaaaaaaaaagaaaaaaaaatcaaaatgtataaatattggaaatcaagtttttcagctgttttgttggttggttggttggtttttgtttggttttgtttaaagggacaagaagtaaataatgtggctggaatacaagttgaacaaactagaagacacaaatctaacatagtttttatggaccaaggaacttgtatattgtataagctttagtaaaaggtacattttcaccatacctttttttatatcacggtattatagtacaccttgttaccaataggttgttctcttccccaccctcctttgagctttgctctaaaatacattctggttccaagcctgaccatccttgtttaatctatcatactcttccaggtttttttttttggtctaaggctggaacttttttctttttttttcagctgaagtcttatgactttttcatgagtcaaaattgtttggatttcacgaagtcaaatcttgcaaaggcctgcatattttttttaagattatatgaagtctgtgcaaaaagctttaaaaaattgcctctgccttgcctgcatacatgcaatgtatgtaacttagtctctcttctcagacactgttgggtagttatttctgtgttttctttttttaaaaaaaaatatggacttattgtggtttatctgagaggttctaacattcacatgcaatttggtgtggcatttagctattatgagttattggcgcgaacttgtttgatatttgaagtgtctctccccttttcccatgacgtaatacataggtgtgttccaggatttgttcaggtttttccccccctcctaatcttgtacataacttgtattttgtgtaagttaaacattttatttgaacttggaatgttcccagtgatttcattcagcagggtattttctgccttgttggcaagtagcaaaaaatatgggaagtatttgctaccagttgttagatggtgccccttattggtagaatcaggaaaatgtccgcaaaagcatgttttattatctttacttttttggggggttggagggggtagcctagccagacatcatgtaatcttaaaacataagatgcttttattagatgatcaactaaaaatagctggaagacagtactttagaaacaaaatagttagtaagatatataatgcaaatgtaacttatgttttcatttttttctctgccttttttttttgttttttttctttttttccagtactgagcatctccacaaatgtctcctactcagaaaatgtttcttttctttcagttgagatttggtgcattcagggttgtaggttggccttgcttgctaacccgccggttttaccgtgctttattcctgaactttgtttatgcctttgtttggttcttctgaaattgcagcagactcattgggctacatttagtacaggaaccacgtgtgtaatgttatacaacacagtcagtaatacaatcatccctcttagagtaaaaactacctctagattgtgtaagctttttactgtccataaaacaggagccacagtaccttatgaatgcaaaactgtaacttcctacagtgtttccccacagaacattgtctttctggtgtctgggctgtttttgaaaaagtttccattaatagactttttagaaattattattagtagcattttttttccagctttgcgtcttcatcactcactcaagtgtcagactatgcactgtaaatatcttcctaacatctttaaatcgccttttcctcagttttcaaggggaaggtcatttgtaaagcacgttaggtggttaaatcagttattgcggttttctcttacagcaagcctttttaatcacccccaggctgcattttattctatatcgccttttttcttcaaatctgctccaatcatccacttctctcttataagctattcctgcctcacacctaaatctgtttcagtgatcaagggcagaactcattgtggccttatctttctttgttgtaattgttcactgtctctttcttacagaccacttattctgagtagtagttattcctccctatggagtcatggcaggaatcattacacagtgcttttgttcagagcatggacatgttccaggtgctgctttgctttaacggccacaagtttcctccacttctcaggtttggtatttagtaaggaatcaattaaattaaccaataacaaaagagatacttttgaagaacaaactattctttacccattttgtagctcaaaaataatttttcaagttcatgaccttattaaaatgaacttgtgtttttttaacaaacgtctattttattttgatagtttctttccgaagataattgaaatattatactgtaacccttttcttttcttttttgaaaagtccaagaatgtacttatacaggatttttccccacctatttttggccattctcataccacagacaaaagagtgaatgattgtcattgtagcttattgtttatcagtagttcttttgtagctgcttacattttttctttcatggtttgtgaatcatttcagtatgtaatttataggaaccttgtcctctggtatagtagactgtgtgccctcctccaggatggcattattagacatgctggtcatttaccctcagaaagactctcttatagaatggtgagtgcttcagttatagtatgtttgaattttaaaaaattcctgtttagaatgtatctatgctctcatgactatgcagtttctaacatacacatagaagctgagtctctgatccaatatgtttttatttgttccattaatttatcacatagattgggaaggcaagctaaaagccttaaaaatgccctttatattttgagtgatttcagcgttgaacacagtatactatctaaatttgctgctcactttcttaaactgttgcaattaaaggcatgtttatacatgactaatcgtgaaatgtttgtcactcttactgcacagacttatctgcaatcaaactggttagtttttttgttttgttttgttttattgtttttaatgaatctggtaccatctgtgctttcacaaaaaacttccaatgccatttttgagaactaacctaactagtcactccctccagaaaatccactggggaggaggttccttttgaaacaaaatgctgttcagttagtaaccaagttactttgattgcaaaagcagctgtgtttctgataagtactgaacaaatgtgtgtaattttctgtgccagacttatgactttgttttcaagccactgtaaatgtgggatggatggttagaaaccaataatatattgggggtttctgtttaacccttatcagggactgaactggtatctccttttgttaattttccccctgtgttggtgataaaatgttttgcccagcattccaggtacctgtggtggggcccccagaggtagggtttatatggccccatttttagccttatttccttgtacccttgccagccatgctccacgcattcagtccctaagggggtttattttacaaactgtgcgccctgtaaggtttattagcaataagatagaaaattgagcaagtttatacccataattttgttgttggtagaaaaaaagaatctgctcagttccgatatttcatccgtgaaaaacttgcaacaccagcagttccaaggaatcactacaacaggacatgtaaaccattgtaaaagtcttctgtcgaatgtgcctgatgcaatgtattatcgtcttttatttcagaatacttcataaagataaaattaaattctaaaaaaaaaaaa

SEQ ID NO: 152081 - DNA, 567 bp, Homo sapiens
ttttttcctttccaagatgcaagtcggaagcccctgacttggtggggattcagggaagtgtgtgttagttggtcaatcttgtcagtcatggtgacaaaagtggctgtggtggggctactggaaaaccgggcaatgggggccatcctgaaaaaaacaccactttgcaagtgaatgcaaaactgctccccttaacttgcctgtgtcccctatcaggcaaagttaactttgccctctcctgaagccctcagtttcctttattcattaaaattcaaatatgaaccccaggtatggtggccccacgccctgtaatcccaccccttttggaagggtgaaggcagtaggatcgcttgagcttgggagtttgagaccagcaacataggaagaccccatctctacgaaaaataaaaaaaattagctgggcatggtggtgcatgcctgtggtccccaggtaactcaggaggcccgaggtgggagaatttgcttgaacccagaaaggttgagactacggtgtgctgtgatcgtgcactccatcctgggggacagaagtcaggccctgtctcagaaaaa

SEQ ID NO: 152082 - DNA, 631 bp, Homo sapiens; identical to SEQ ID NO: 148037

SEQ ID NO: 152083 - DNA, 4875 bp, Homo sapiens
  misc_feature (1)...(4875): n = a,t,c or g
tcaacatatgaaaaatcaatgtaatatttcatattaacagttggaagactcacaattcatagtttcagaatttacaacacaaacctacaggaataaagacaatgtagtattagaataaggtcagatatatagatcaatggacagaattgacagtccagaaatacacccatacgattacggtcacctgatttttgactaaggttccaaaacaattcactaggggaaagaatagtcttgtcaaaaaatggtgctcagacaagtggatagccataagcacagaatgagtttggacccctatctcaaatctcaaatacaaacattaactccgaattaatcaaatgcctaaatttaagagctaaaattttaaagctcttagaagaaaacataggtacacatctttgtgactttgaattaggtcacggtttccttgacatgacacttaaaagtacaagcaacaaaagaaaaaaatagataaaatgaacttcagcaaaattagaatgtttatgcttcagaaaacactgtgaagaaagtgatcagacaactcacagaatgggaaaaatatttgtgaatcatatctcttaataagggtccagcagaaaagggcaaaggtggaaatggaggaggaaaacctccttctggtccaaaccgaatgaatggtcatcaccaacagaatggagtggaaaacatgatgttgtttgaagttgttaaaatgggcaagagtgctatgcagtcggtggtagatgattggatagaatcatacaagcatgaccgagatatagcacttcttgaccttatcaacttttttattcagtgttcaggctgtaaaggagttgtcacagcagaaatgtttagacatatgcagaactctgagataattcgaaaaatgactgaagaattcgatgaggatagtggagattatccacttaccatggctggtcctcagtggaagaagttcaaatccagtttttgtgaattcattggcgtgttagtacggcaatgtcaatatagtatcatatatgatgagtatatgatggatacagtcatttcacttcttacaggattgtctgactcacaagtcagagcatttcgacatacaagcaccctggcagctatgaagttgatgacagctttggtgaatgtggcactaaatcttagcattaatatggataatacacaaagacaatatgaagcagaacgaaataaaatgattgggaaacgagccaatgagaggctagaactcctgctacaaaagcggaaagagcttcaggaaaatcaagatgaaatagaaaatatgatgaatgcaatatttaaaggagtgtttgtacatagataccgtgatgcgatacgtgaaattcgagctatttgcattgaagagattggcatttggatgaagatgtatagtgatgcctttcttaatgacagttatttaaaatatgttggttggactatgcatgataagcaaggtgaagtaagactcaaatgtcttactgctctacaagggctttattataacaaagagcttaattccaaactggaactttttaccagtcggttcaaggatagaattgtgtctatgacccttgacaaagaatatgatgttgcagtacaagcaataaaattactcactcttgttttacagagtagtgaagaagttctcactgcagaagattgtgaaaatgtctatcatctggtttattcagctcaccggccagtagcagtagcagctggagaatttctctacaaaaagctcttcagtcgtagagatccagaggaggatggaatgatgaaaagaagaggaagacaaggtccaaatgccaaccttgttaagacattggtttttttctttctagaaagtgagttacatgagcatgcagcataccttgtggatagcatgtgggactgtgctactgagctgctgaaagactgggaatgtatgaatagcttgttactggaagagccacttagtggagaggaagcactaacagataggcaagagagtgctctgattgaaataatgctttgtaccattagacaagcggctgaatgtcatcctcccgtgggaagagggacaggaaaaagggtgcttacacgcataggagaagaagacacagttggatgataggacaaaggtcactgagctttttgccgtggcccttcctcagctattagcacaatactctgtacatgcagaaaaggtgactaacttgttgcagttgcctcagtactttgattaggaaatatataccactggacgattagaaaagcatttggatgccttattgcgacagatccggaatattgtagagaagcacacagatacagatgttttggaagcatgttctaaaacttaccatgcactctgtaatgaagagttcacaatcttcaacagagtagatatttcaagaagtcaattgatagatgaattggcagataaatttaaccggcttcttgaagattttctgcaagagggtgaagaacctgatgaagatgatgcatatcaggtattgtcaacattgaagaggatcactgcttttcataatgcccatgacctttcaaagagggatttatttgcttgtaattacaaactcttgaaaactggaatcgaaaatggagacatgcctgagcagattgttattcacgcactgcagtgtactcactatgtaatcctttggcaacttgctaagataactgaaagcagctctacaaaggaggacttgctgcgtttaaagaaacaaatgagagtattttgtcagatatgtcaacattacctgaccaacgtgaatactactgttaaggaacaggccttcactattctgtgtgatattttgatgatcttcagccatcagattatgtcaggagggcgtgacatgttagagccattagtgtatacccctgatatcttcattgcagtctgagttgctcagctttattttggatcatgtcttcattgaacaggatgatgataataatagtgcagatggtcagcaagaggatgaagccagtaaaattgaagctctgcacaagagaagaaatttacttgcagcattttgtaagctaattgtatatactgtggtggagatgaatacagctgcagatatcttcaaacagtatatgaagtattataatgactatggagatatcatcaaagaaacaatgagtaaaacaaggcagatagacaaaattcagtgtgctaagacccttattctcagtctgcaacagctttttaatgaaatgatacaagaaaatggctataattttgatagatcatcctctacatttagtggcataaaagaacttgctcgacgttttgctttaacttttggacttgatcagttgaaaacaagagaagccattgccatgctacacaaagatggcatagaatttgcttttaaagagcctaatccgcaaggggagagccatccacctttaaatttggcatttcttgatattctgagtgaattttcttctaaactacttcgacaagacaaaagaacagggtatgtttacttggaaaagttcatgacctttcagatgtcactccgaagagaggatgtgtggcttccactgatgtcttaccgaaattctttgctagctggtggtgatgatgacaccatgtcagtcattagtggaatcagcagccgggggtcaacagtacggagtaaaaaatcaaaaccatctacaggaaaacggaaagtggttgagggcatgcagctttcactcactgaagaaagtagtagtagtgacagtatgtggttaacgagagaacaaacactgcacacccctgttatgatgcagacaccacaactcacctccactattatgagagagcccaaaagattacggcctggaggatagcttcatgagtgtttttatccaatgcagactgaacatcatcaaacacctcttgattataatcggcgtggcacaagcctaatggaagatgatgaagagcccaattgtgggaagatgtaatgatgtcctcagaaggggaggattgaggatcttaatgagggaatggattttgacaccatggatatagatttgccaccatcaaagaacagaccgagagagaacagaacctgaaagctgatttctttgatccaggcttcaattatggatgaatcagttcttgggagtgtcaatgttttaataccagtacacaattaaatctgtggtgaagtcattttctaagtggaagagggaattttaaaagtgtggtagatacagtgaaattctgtacagatttttctctaaggagaatatgacatgcttatgcttaccaagatcaagtgcattgaggggcagttttgtttgcctgaataaacgtaaaggacaagtaaacaatttgatgataagctacagtttttcttagaaagtaaatattttatttatgcgctgttagttggcttttgaatcgattatttcatgcttttttttaaaaaaaaaaaaaaaacaaaataacaatctgaagaggcatttggtacagatatgaattctcttacatttatttactggttgtactaaataatgatgacctctgctggatttctgtttacatccagaaaacaatgttaaggatgtatttattcccctaccctgaagaaagtgtaggatagaattgtttttagcattctaaatttaaatgcttaaaacgtcaatcaacaaaactttgttttaaatattgtaattgtggagaaaagtaaacttataagcagaacttttacaattttttcatctaaaagtattttaagatatttttaaaatccaagagcttctctatacttttcagaaatatccagatgcagtgganctgccagaaggtaaccagtctcaaacatgcttatcccattatcaaccctgaaagtttgcttgtcc

SEQ ID NO: 152084 - DNA, 2328 bp, Homo sapiens
atgggaaagaaacggacaaagggaaaaactgttccaatcgatgattcctctgaaactttagaacctgtgtgcagacacattagaaaaggattggaacaaggtaatttgaaaaaggctttagtgaatgtggaatggaatatctgccaagactgtaagactgacaataaagtgaaagataaagctgaagaagaaacagaagaaaagccttcagtttggctgtgtcttaaatgtggccatcagggctgtggcagaaattctcaggagcagcatgccttgaagcactatctgacgccaagatctgaacctcactgtctggttcttagtttggacaactggagtgtatggtgttacgtatgtgataatgaggtccagtattgtagttcaaaccagttgggtcaagtggttgattatgtcagaaaacaagccagcattacaactccaaagccagcagagaaagataatggaaatattgaacttgaaaataaaaaattagaaaaagagagtaagaatgaacaagagagagaaaagaaggaaaacatggctaaagagaatcctcccatgaattctccttgccaaataaccgtgaaaggactcagtaatttgggaaacacatgtttcttcaatgcagttatgcagaacttgtcacaaacaccagtgcttagagaactactaaaagaagtgaaaatgtctggaacaattgtaaaaattgaaccacctgatttggcattaacagaaccattagaaataaaccttgagcctccaggccctcttactttagccatgagccagtttcttaatgagatgcaagagaccaaaaagggggttgtgacaccgaaagaactcttttctcaggtctgtaaaaaagcagtgcggtttaaaggctatcagcagcaagacagccaggagctgcttcgctacttattggatgggatgagagcagaagaacaccaaagagtgagtaaaggaatacttaaagcatttggtaattctactgaaaagttggatgaagaactaaaaaataaagttaaagattatgagaagaaaaaatcaatgccaagttttgttgaccgcatctttggtggtgaactaactagtatgatcatgtgtgatcaatgcagaactagtggtaagaaaagtgtaaatgataaaaatctgaaaaagacagtggaggatgaagatcaagatagtgaggaagaaaaagataacgacagttacataaaagagagaagtgatattccttctggaacaagtaagcacttacagaaaaaagcaaagaaacaagccaaaaagcaagccaagaaccaacgaagacaacaaaaaattcaaggaaaagttcttcatttaaatgatatttgtactattgaccatcctgaagacagtgaatatgaagctgaaatgtcacttcaaggagaagtaaatattaaatccaaccatatttcacaagagggtgttatgcataaagaatattgtgtcaaccagaaagatttgaatggccaagcaaaaatgatcgaaagtgtaactgacaatcaaaaatccacagaggaagtagatatgaaaaatatcaacatggataatgatctggaggttttaacatcttctcccactaggaatttaaatggtgcctacctaacggaagggagcaatggagaagtggacatttccaatggtttcaaaaacctaaatttgaatgctgctcttcatcctgatgaaataaatatagagattctgaatgatagtcatactcctggaacaaaggtgtatgaggttgtaaatgaagatccagaaactgctttctgtactcttgcaaacagggaagttttcaatactgatgagtgttcaatccaacattgtttatatcagttcacccgtaatgagaaacttcgagatgcgaataaactgctttgtgaagtatgcacacggagacagtgtaatggaccaaaggcaaatataaaaggtgaaaggaagcatgtttacaccaatgccaaaaagcagatgctaatttctcttgctcctcctgttcttactcttcatttaaagagatttcagcagaatgttgcagaagaaaatacaagggtactctattccttatatggagttgttgaacacagtggtactatgaggtcggggcattacactgcctatgccaaggcaagaaccgcaaatagtcatctctctaatcttgttcttcacggtgatattccacaagattttgaaatggaatcaaaagggcagtggtttcacatcagcgacacacatgtgcaagctgtgcctacaactaaagtactaaactcacaagcgtacctcctattttatgagagaatactgtaa

SEQ ID NO: 152085 - DNA, 522 bp, Homo sapiens
tagccacttcccataatgccgcgttccggaagttattgctttccaggggtcactctggcgttatccgtcgctctcaattcgtcaccaggaggaagacggagctggctgcccagcccaaaggcccatgaggggatgcagttatgggctctgtcgccgtgggtgagttctggtcccgactgcctggcagtcgtcgctcgcctggcgtttctgcgctgggagagctcctgttttccgccccaacttcgttctcttcttgaaggccgctctccttaagcacgtaacccggctactttccggtactgcgatctcattggctgcatgttctgtcagttccagaagctggccaatgagatgccgctgctggcggccttctcgaccccgtggacccagaggttcccccgtgggatcggagcagttagaaggggaggagagggaaggtgtggcaggcgccgagcaaatgggtgggtggcgcgtggcagggacttccctatgggttggagctggatttgcagccgcgttcat

SEQ ID NO: 152086 - DNA, 3181 bp, Homo sapiens
  misc_feature (1)...(3181): n = a,t,c or g
ctggcttcgactccgtcgctctcaattcgtcaccaggaggaagacggagctggctgcccagcccaaaggcccatgaggggatgcagttatgggctctgtcgccgtggaacttgtttgcttcattcttatgtacctacctttgcaccttgtaatcatcctttatgcctcagattgttattttgtgtcagtaagtaatccataaagtgccaacatgggaaagaaacggacaaagggaaaaactgttccaatcgatgattcctctgaaactttagaacctgtgtgcagacacattagaaaaggattggaacaaggttaatttgaaaaaaggctttagtgaatgtggaatggaatatctgccaagactgtaagactgaccaataaagtgaaagataaagctgaagaagaaacagaaaataagccttccagtttggctgtgtctttaaatgttggccctcagggttttggcagaaatttttcaaggggcagcatgccttgaagcactatctgacgccaagatctgaacctcactgtctggttcttagtttggacaactggagtgtatggtgttacgtatgtgataatgaggtccagtattgtagttcaaaccagttgggtcaagtggttgattatgtcagaaaacaagccagcattacaactccaaagccagcagagaaagataatggaaatattgaacttgaaaataaaaaattagaaaaagagagtaagaatgaacaagagagagaaaagaaggaaaacatggctaaagagaatcctcccatgaattctccttgccaaataaccgtgaaaggactcagtaatttgggaaacacatgtttcttcaatgcagttatgcagaacttgtcacaaacaccagtgcttagagaactactaaaagaagtgaaaatgtctggaacaattgtaaaaattgaaccacctgatttggcattaacagaaccattagaaataaaccttgagcctccaggccctcttactttagccatgagccagtttcttaatgagatgcaagagaccaaaaagggggttgtgacaccgaaagaactcttttctcaggtctgtaaaaaagcagtgcggtttaaaggctatcagcagcaagacagccaggagctgcttcgctacttattggatgggatgagagcagaagaacaccaaagagtgagtaaaggaatacttaaagcatttggtaattctactgaaaagttggatgaagaactaaaaaataaagttaaagattatgagaagaaaaaatcaatgccaagttttgttgaccgcatctttggtggtgaactaactagtatgatcatgtgtgatcaatgcagaactgtctccttggttcatgaatctttccttgatttgtccctcccagttttagatgatcagagtggtaagaaaagtgccaatgataccccctctgacaaagacagttacttacgctgaatgttatagtgaggaaaaataccataccgactgctgcatatactagagaagcgatatttcttctggaacacgtaagcacttacagaaaaaagcaacgaaacaagccaaaaagcaagccaagaaccaacgaagacaacaaaaaatatccggaccagctcttcatttaaatgatattcgtactattgaccatcctgaagacagtgaatatgaagctgaaatgtcacttcaaggagaagtaaatattacatccaaccatatttcacaagagggtgttatgcataaaggaatattgtgtcaaccagaaagatttgaatggccaagcaaaaatgatcgaaagtgtaactgacaatcaaaaatccacagaggaagtagatatgaaaaatatcaacatggataatgatctggaggttttaacatcttctcccactaggaatttaaatggtgcctacctaacggaagggagcaatggagaagtggacatttccaatggtttcaaaaacctaaatttgaatgctgctcttcatcctgatgaaataaatatagagattctgaatgatagtcatactcctggaacaaaggtgtatgaggttgtaaatgaagatccagaaactgctttctgtactcttgcaaacagggaagttttcaatactggtgagtggtcaaatccaacattgtttatatcagttcacccgtaatgagaaacttcgagatgcgaataaactgctttgtgaagtatgcacacggagacagtgtaatggaccaaaggcaaatataaaaggtgaaaaggaagcatgtttacaccaatgccaaaaagcagatgctaatttctcttgctcctcctgttcttactcttcatttaaagagatttcagcaggctggttttaacctacgcaaagttaacaaacacataaagtttccggaaatcttagatttggctcctttttgcacccttaaatgtaagaatgttgcagaagaaaatacaagggtactctattccttatatggagtttgttgaacacagtggtactatgaggtcggggcattacactgcctatgccaaggcaagaacccgcaaatagtcatctctctaatcttgttctttcacggtgatattccacaagattttgaaatggaatcaaaagggccagtggtttcacatcagcgacacacatgtgcaagctgtgcctacaactaaagtactaaactcaccaagcgtacctcctattttatgagagaatactgtaataatatcaaaagccactttttctggaaacacatttatggcttttataatggctgaaataacgaataaaaaaagcctaattaaaatcatgttcacttaacattaaatacatgccagaagaaatcatgtttatttaaatattgaagggaaaaatccctaaaaatgtccaaaggttttatattgtcatatgtggtttttattcctgctttgtttctggaaaggaaatcctgaattacttaagtactttgtgtttaatatatctgggtgatggatcacaacacatcaataaactgacttaccctaccaaaaaaagaacaaaaaatatatattttcntggggggggccctttttaaaaattcccttgggggggccaaacttaaccgggtaaggaaaannnnnnnnnnnnnccttaagggggggctatataaacaccctttgggattctttgggaaaaacccttttttttgggggggaaaaattaag

SEQ ID NO: 152087 - DNA, 2611 bp, Homo sapiens
  misc_feature (1)...(2611): n = a,t,c or g
tttttttttttttttttttcattttgcacctttggcttttacactttaaaacatttattttgcttcacatatagaaccaggaaagaaatcacctccccaagtcggacagggcttagacagactggatgaagcgccccaattttgccacattgtctccaggctggtctctccagccacacatttaagccagccaagatggccccttttagtcacattcatctccaacattagcagggagcaagacaaggaagtgaaaagggaactgccctatgaagccccaggatcttgccctccaggatggggacggaaactggggttggtgaaggagcccaaccccacctgtctccaagcctcaggctaggaaacagcacttggctgcaggcccaggaccaagagcccggaataggtgcctgctggggcttgagaacccaagaaaaccagttcccctctttttggaactcgggaaggggtggaacaaccccagaccccattcccttcctcagatcacactctatcccagactgctgtacagtgcgggcccaaagctggaattctcagaacacccccatttttggccatgagcagatctggattctagttcgttttgacctttgagaaaagtcaaattgtgttgatcttttttaaaaacaaaggggcggttttcagaaatctataagcttccttctggctgtaagaacttagcactctgggctccctgcttcctttaaaactccactgggagatctgggaaagggaggctgagacctctctcctaagggctgattttaccttcctgtccctcatgaaagaacgggctggaggacaggaataggacctgggccagccactctccaaggacacaagctggatccagacaggaagcagcgggcaagtagattgctttctccccagataggtttgtttccacaatatatttaaatacaaaatggcagcagcccactgtgccagttataacaaaattagcccatagggtatctggagaaatgtacacaggcagcctcagctggagtcatgcgagccaactccggcctgctcgggtagggcctgtgcctgctgcccagtcagctgtgggtggtcacacggccaggactggatggtgcccgtggcagggcggtgcacaagggctcagaggtgctgtacaggaggagccagtcttccaacagtacacaaaagcacgctgtcctcttgctctgccccccctgcggactcagcagcatgtgtgttcatttattttattattattttttgaagacagagtctcaactctgttgcccaaggctggagtgcaatggcgcgaatctcaagctcctgcaacctctgcctcctgcgttcaaagcgattctcctgcctcagtcttctgtgtaactgggattacaggcgcgtgccaccaggcctggctaatttttgtatttttagtagagacggaggtttcaccatgttggtcgtcaggctggtctcgaactcctgaccttgtgatctgcccgcctcggcctcccaaagtgctgggattacagaccttgagccaccatgcctggcctattattttttgagacagagtctcgctctgtcgtccaagctggagtgcagtggtgtgatcttggctcactgcaagctccgcctcctgggttcacgccattctcctgcctcagtcttcagagtagctgggactacaggcgcccgccaccacgcccggctaattttttgtatttttagtggagacagggtttcactgttagccaggatggtcgcgatctcctgacctcatgatcccgcccggcctcagtctcccaaagtgctgggattgcaggcgtgacaccaagcacccagcctccaaattttaaatgagccccttgtgagaaggaaaagaatctgctgtccacagaagccaggcgtgggagctacttcaaccagaaacttgtcacccatgacactctgtgtgggttcagtcacacagaccaacgattccattatggaagggagggaagaaaggatcacatcaaatctactatatgcctcataggcccaccctttatttcaaaaatagatattcgctatttaaatgccgccccgtgttgcgacaggcctgatatttgcttctgcatgtggcagatctgttattgcttacactgtggcctcctggcctgtgctgctcagctggccctgttagagaacatgggaaccacatcaaaatcctaagtcacaaaacaagggctctgtccccagcctgggcccaggggcccacatgcccacctccacagcccagtcaagtgtggggataaggcactcctctgtgctatgagataaaatatgaatagagtcccttatgaattatgagttgcaaagaatgattttgtgctaataaattcccagtgcatccaaaatgtacaaaaaccctagaatttccagtttttagattgnnnnnnnnnnnttttttctgtagatccagaagaaactttcattgaaactttaaagacctcacctcgcacctgctctagtaatgcactagttactaatatacaaacgtaaatctttgatgagtatggtcgggaaaaaactgtctgtccttgtgatcagaattccaccgcactgg

SEQ ID NO: 152088 - DNA, 1824 bp, Homo sapiens
  misc_feature (1)...(1824): n = a,t,c or g
gtcgaggtcctaggctgggtgtggagctgcagcgtatccacaggtaaagcagctccctggctgctctgatgccagggacggcgggagaggctcccctgggctggggggacaggggagaggcaggggcactccagggagcagaaaagaggggtgcaagggagaggaaatgcggagacagcagcccctgcaatttgggcaaaagggtgagtggatgagagagggcagagggagctggggggacaaggccgaaggccaggacccagtgatccccaaatcccactgcaccgacggaagaggctggaaaggcttttgaatgaagccccaggatgcatgccctggtgctactcctctgcattggagccctcctcgggcacagcagctgccagaaccctgccagccccccggaggagggctccccagaccccgacagcacaggggcgctggtggaggaggaggatcctttcttcaaagtccccgtgaacaagctggcagcggctgtctcccaaacttcggcctatgacctgtaccgggtgcggatccaagcatgagccccacgaccaaacgtgctccctgtctccctcctnaagtgtggcccaacggccctctcggcccctctcgctggggaagcggagcaagcgaaacaagaatcccatcattcaccggggctctctactatgacttgatcaagcaagccccagacattccatgggtaccttataaggaagctcccttgacacggtcacttccccccccagaagaacctcaagagtgcctcccggaatcgtctttgagaagaagctgcgcataaaatccagctttgtggcaccttctggaaaagtcatatgggaccaggcccagaagtcctgacgggcaacccttcgcttggaccttgcaagagatcaacaactcgggtgcaggccccagattgaaagggaagctcgccaggtccacaaaggaaattcccgatgagatcagcattgtccttctcgagtgtgagcgcacttcaaggggcagttgggaaacaaagtttgactccagaaagacttcccctcgagggatttctacttgggatgaaggagaggacccgtgagggtccaccatgattgtcggaccctaagggctgtttttacgctatgggcttgggtttcagattctcagcttgcaagatttgcccagcctgccctttgaccggaaggcatgagtatcatcttcttcctgccccctgaaagtgacccagaaatttgaccttgataggaggagagcctcaccctccgaagttaattcatgaccatagacccgagaacttgaaagaccgttgcaggcggtccctcactgtcccccaagctgaagctgaagttacgaaggcgaagagcacccaaagttccttgcagggagatgaagcttgcaatcccttgtttgattccacccagactttagcaagatccacaggcaaaacccatcaagcttgacttcagggtggaacaccngcgcctggcttttgagtggaacgagggatggggcgggaaaccacccgcccagccccaggggcttgcagcctgcccaccttcaccttcccgctggactatcaccttaaccagcctttcatcttcctactgagggacacagacacacggggcccttctcttcattggcaagatttctggaccccaggggcccctaatattcccagtttnattatttccattaccttaggaggaaaacccgagggacagcagatttccacaggacacgaaggcttgcccctgtaaaggttttcaatggcattacaataaaagagctttatccctaaaaaaaaaaaaaaaa

SEQ ID NO: 152089 - DNA, 395 bp, Homo sapiens
cggatttggacctcagaggagggcagccagtctgccggggagggacacagaggccttgttataaagtcatttacttccatgatacttctcgaagactgaactttgaggaagccaaagaagcctgcaggagggatggaggccagctagtcagcatcgagtctgaagatgaacagaaactgatagaaaagttcattgaaaacctcttgccatctgatggtgacttctggattgggctcaggaggcgtgaggagaaacaaagcaatagcacagcctgccaggacctttatgcttggactgatggcagcatatcacaatttagagaaaccagcagttccttctagagaagctgaaggtgaggaaacagagctgacaacacctgtacttccagaagaaac

SEQ ID NO: 152090 - DNA, 500 bp, Homo sapiens
cgggaagccagaccctagcacaaagaagcaacacaccatctggccctctcctcaccagggaaacagcccggacctagaggtctacaatgtcataagaaaacaaagcgacgtgagcttagctgagacccggccagacctgaagaatatttcattccgagtgtgttcgggagaagccactcccgatgacatgtcttgtgactatgacaacatggctgtgaacccatcagaaagtgggtttgtgactctggtgagcgtggaaaatgaaatatatggttattaggacatataaaaaactgaaactgacaacaatggaaaagaaatgataagcaaaatcctcttattttctataaggaaaatacacagaaggtctatgaacaagcttagatcaggtcctgtggatgagcatgtggtccccacgacctcctgttggacccccacgttttggctgtatcctttatcccagccagtcatccagctcgaccttatgagaaggtaccttg

SEQ ID NO: 152091 - DNA, 443 bp, Homo sapiens
tggggaggagtaaggagtctggatgggtggaaaatgaaatatatggttattaggacatataaaaaactgaaactgccaacaatggaaaagaaatgataagcaaaatcctcttattttctataaggaaaatacacagaaggtctatgaacaagcttagatcaggtcctgtggatgagcatgtggtccccacgacctcctgttggacccccacgttttggctgtatcctttatcccagccagtcacctggcagtgataaagatgggctgtggagcttggaaaaccacctctgttttccttgctctatacagcagcacatattatcatacagacagaaaatccagaatcttttcaaagcccacatatggtagcacaggctggcctgtgcatcggcaattctcatatctgtttttttcaaagaataaaatcaaataaagagcaaaaa

SEQ ID NO: 152092 - DNA, 422 bp, Homo sapiens; identical to SEQ ID NO: 135181
  misc_feature (1)...(422): n = a,t,c or g

SEQ ID NO: 152093 - DNA, 492 bp, Homo sapiens
  misc_feature (1)...(492): n = a,t,c or g
ccgggggaaaaaatttcaaaaaatcaacccagtaaagcaaaacttccaaccagcaagctaatccagttaggtttccccctttnnnnnnnnnnnnnnnnnnnnnnnnnnnnnnnnnnnnnnnnnnnnnnnnnnnnnnnnnnnnnnnnnnnnnnnnnnnnnnnnnnnnnnnnnnnnnnnnnattcccaagtaggttttaaatcggccccctataaggaaaaaactattaccttgccagcccgcgtaaactttggcccccccaaggattctttaaaacggcccccccnnnnnnnnnnnnnnnnnngcaaacatctttattaatctcatataaaaataaggtccatggacggtcctcggggctggggcttgcgggggcgaggtgcactttataagttacaggccaggctcctgctgaggctaagtatggctatttggagggggccggacgcgtgggtcgtcccganggttatcaatcggtnccgcaggcgatcaat

SEQ ID NO: 152094 - DNA, 400 bp, Homo sapiens; identical to SEQ ID NO: 151425
  misc_feature (1)...(400): n = a,t,c or g

SEQ ID NO: 152095 - DNA, 383 bp, Homo sapiens
  misc_feature (1)...(383): n = a,t,c or g
cccacgcgtccgccgtctgattctaatagagagccggattcaccgtttggctcgatattataagaccaagcgagtcctccctcccaattggaaatatgaatcatctacagcctctgccctggtcgcataaatttgtctgtgtactcaagcaataaaatgattgtttaactnnnnnnnnnnnnnnnnnnnnnnggggggggccgttttaaaggacccttgggggggccaaagtttaccggggctggcaaggaaatagttttttccttatggggggccgaattaaaacctacctgggaatttttggaaaggacccttactttgggggggggacatattgggccaacctccctacagaaattaaaggctttagggaaaatataaan

SEQ ID NO: 152096 - DNA, 391 bp, Homo sapiens
  misc_feature (1)...(391): n = a,t,c or g
attcatgagatctatactgttggaaaacgcttcattgaggcaaataacttcctgtggcccttcaaattgtcttctccacgaggtggaatgaagaaaaagaccacccattttgtataaggtggagatgctggcaacagggaggaccagatcaacaggcttattagaagaatgaactaaggtgtctaccatgattatttttctaagctggttggttaataaacagtacctgctctcaaattgnnnnnnnnnnnnnnnggggcggccgttttaaagatcccttgggggggccaaagtttacccgggcttgcagaggaatagttttttccttatggggagccgtattataaccaacctggggatttttgggaaggaactttatttttggggggga

SEQ ID NO: 152097 - DNA, 561 bp, Homo sapiens
  misc_feature (1)...(561): n = a,t,c or g
cattaacaaaactttccaacaaccagcatatgcaggttgttttaccccctttaccctttaaaattttttattttccctaaaaccttaaatttctgtagggaggttggcccaataagtccccccccaaaaataaaggtcctttcccaaaaattcccaggtaggttataatatggccccctataaggaaaaaactattaccttgcaagcccgcgtaaactttggcccccccaaggattctttaaaacggccgccccnnnnnnnnnnnnnngccacagccagaaaaatttattttaaaatagaaacatacattaagctttaaaacaaccaactctcaaacaaaagaggaaagagcctttgatcccagagtccatgcggaatgaattccatacgtgtttgaaattcacataaggagcacttagaaaaccacctgaaatggaaatccaacagcccccttgcctgtgagggctcccacccctgcccgcgtgaggacatggccgaaccccggacactcgtgtgccgggagccaccacagctcaaggtgaccggcagcacccagctctg

SEQ ID NO: 152098 - DNA, 1959 bp, Homo sapiens
  misc_feature (1)...(1959): n = a,t,c or g
agtgtctgttagcgtggatcctccagagcggccgcagagacagcggggtagggatgctggatcccttttgctgtgggaaccctgcctgttactcctcgtctcttctgcggggttggatggctgggtcgagcgcccggtatgagagcgcttagagatcgggaaagaactccagttagtgtgggacgagccccacctgactccggggaatgactctctgcttccttcctcctgttgtgtcactgcagcctcggatttggacctcagaggagggcagccagtctgccggggagggacacagaggccttgttataaagtcatttacttccatgatacttctcgaagactgaactttgaggaagttataattttcctgcaggagggatggaggccagctaggcagcatcgagtctgaagatgaacagaaactgatagaaaagttcattgaaaacctcttgccatctgatggtgacttctggattgggctcaggaggcgtgaggagaaacaaagcaatagcacagcctgccaggacctttatgcttggactgatggcagcatatcacaatttaggaactggtatgtggatgagccgtcctgcggcagcgaggtctgcgtggtcatgtaccatcagccatcggcacccgctggcatcggaggcccctacatgttccagtggaatgatgaccggtgcaacatgaagaacaatttcatttgcaaatattctgatgagaaaccagcagttccttctagaagaagctgaaggtgaggaaacagagctgacaacacctgtacttccagaagaaacacaggaagaagatgccaaaaaaacatttaaagaaagtagagaagctgccttgaatctggcctacatcctaatccccagcattccccttctcctcctccttgtggtcaccacaagttgtatgttgggtttggatctgtagaaaaagaaaacgggagcagccagaccctagcacaaagaagcaacacaccatctggccctctcctcaccagggaaacagcccggacctagaggtctacaatgtcagtaagaaaacaaacgcgaagtctttcttatctgagacccggccagacctgaggaatatttcattccgagtgtgttcggaagaaagccactcccgatgacatgtcttgtgactatgacaacatggctgtgaacccatcagaaagtgggtttgtgactctggtgagcgtggagagtggatttgtgaccaatgacatttatgagttctccccagaccaaatggggaggagtaaggagtctggatgggtggaaaatgaaatatatggttattaggacatataaaaaactgaaactgacaacaatggaaaagaaatgataagcaaaatcctcttattttctataaggaaaatacacagaaggtctatgaacaagcttagatcaggtcctgtggatgagcatgtggtccccacgacctcctgttggacccccacgttttggctgtatcctttatcccagccagtcatccagctcgaccttatgagaaggtaccttgcccaggtctggcacatagtagagtctcaataaatgtcacttgggttggttgtatctaacttttaagggacagagcttttacctgggcagtggttaaagatgggctgtggagcttggaaaaccacctctgttttccttgctctatacagcagcacatattatcatacagacagaaaatccagaatctttttttagcccacctattggaacacagggtgggctgtgcctcggcaaatttcatatatggtttttttcaaagaataaaatcaaataaagagcagnnnnnnnnnnnnnnccgggggccgttttaaaggatccttgggggggccaaagtttacgcgggctggcaaggtaatagttttttccttatagggaggcgtattataacctacctggggatttttgagaaggacctttatttttg

SEQ ID NO: 152099 - DNA, 686 bp, Homo sapiens
atccttaattaaattaatctccccccccccccccccccgcccgggagatgaactttgtccgagccgccaaccggagacccaggcgagtgtcgcggccgcgcccggtgcagcaacagcagcagcagcccccgcagcagccgccgccgcagccgccccagcagcagccgccccatcagcagccttcgtcgccgccgcagtagcagcagcagcagcatcctccggcgtcgtcaccgccgcctccgccgctgcctcaggagcggaacaacgtcggcgagcgggatgatgatgtgcctgcagatatggttgcagaagaatcaggtcctggtgcacaaaatagtccataccaacttcgtagaaaaactcttttgccgaaaagaacagcgtgtcccacaaagaacagtttggagggcgcctcaacttcaactacagaaaactttcggtcatcgtgcaaaacgtgcaagagtgtctggaaaatcacaagatctatcagcagcacctgctgaaacagtatcttcaggagaaactggccagatgaagtggttctaaaaatcttctcttacttgctggaacaggatctttgtagagcagcttgtgtatgtaaacgcttcagtgaacttgctaatgatcccaatttgtggaaacgattatatatggaagtatttgaatatactcgccctatgatgcat

SEQ ID NO: 152100 - DNA, 771 bp, Homo sapiens
ggcgcgctaccctcccgccgcccgcggtcctccgtcggttctctcgttagtccacggtctggtcttcagctacccgccttcgtctccgagtttgcgactcgcggaccggcgtccccggcgcgaagaggctggactcggattcgttgcctgagcaatggctgccatccggaagaaactggtgattgttggtgatggagcctgtggaaagacatgcttgctcatagtcttcagcaaggaccagttcccagaggtgtatgtgcccacagtgtttgagaactatgtggcagatatcgaggtggatggaaagcaggtagagttggctttgtgggacacagctgggcagaagattatgatcggctgagggccctcttcttacccagataccgcgaggtttacctgggggggttttccatcgacagccctgatagtttagaaaacattccaaataaggggaccccagaagtcaggcatttttgcccaacgtgcccatcatcctgggtgggaatagaggatcttcggaatgatgagcaacaaggcgggagctacccaagatgagcaggacccgtgaaacctgaagagggcagaattgcaaacagattggcgttttggacatgagtgtcacaaagaccaaagtggggaagagtttgaaagctacaagctgttgagctgagtggagaaaactgtgctgttggaactgcgacccaccttgggatatgagggtattactagtgtacgcttctttctttactaatcaccagcttgtccttaaag

SEQ ID NO: 152101 - DNA, 1966 bp, Homo sapiens
cctcgctctctcgcgctaccctcccgccgcccgtggtcctccgtcggttctctcgttagtccacgggctggtcttcagctacccgccttcgtctccgagtttgcgactcgcgggaccggcgtccccggcgcgaagaggctggactcggattcgttgcctgagcaatggctgccatccggaagaaactggtgattgttggtgatggagcctgtggaaagacatgcttgctcatagtcttcagcaaggaccagttcccagaggtgtatgtgcccacagtgtttgagaactatgtggcagatatcgaggtggatggaaaagcaggtagaagtttggcttgtggggacacagctgggcaggaagattatgatccgcctgaggcccctctcctaaccagataccgaatgttatacttgatgtgtttttccatcgacagcccctgatagtttagaaaaacatccccagaaaaagttggaccccagaagtcaaagcatttcctgtcccaacggtggcccatcaatcctggttggggaattaagaagggttctttcgggaattgatggagccacacaagggcggggacttaggccaagattgaaggcagggagcccggttgaaacctgaaggaagggcagagatatgggcaaacagggattggcgctttttgggtacattggaagttgttccagccaaagaccaaaagattgggaagttgaagaagaggttttttgaaaatgggctaccgagagcttgctctggcaagcttagacgttggggaagaaaaaatctggggtgcctttgtccttggtgaaacccttgctgcaagcacagccccttatgcggttaatttttgaagtgctgtttattaatcttagtgtatgattactggcctttttccatttatctataattaccctaaggattaccaaatcagaaagtcatctttgctaccagtatttaggaagccaactatggttatttaacggtgttccacaccgtttgggccccccggggtcccttttgaaaactgggcctaaaaggcctcctcttggaattcccacctgacacatccaggcgcctaattccaaggaatttccttaaccttcttgcttctttcctagaaagagaaacagttggtaacttttgtgaattacggctgtaactactttataactaacatgtcctgcctattatctgtcagctgcaaggtactctgggtgagtcaccactttcagggctttactccgtaacagattttgttgggcatagcttctggggggtggggcagttttttttgaaaatggggctccaaccagaaaaagccccaagtttcatggcagctgttgggcagagttacaggtctgggggttccatgttagttaccttatagttactgtgtaattagcgccacttagtgtatgttacccaaaaataaatatatctacccccagactagatgtagtatttttggtataatgggatttcctaatacctgtcatccctcaaaggaaagtgtattgggttttttaaaaaagaaagtgtatttggaaattaaaagtccaggatggaaaaattccatttttttaaaattccccgtttttgtcacctttttcctgaataaaagatggcccatattacccctttttcggccccccatgtatcctcagtacccccatggagctgggcctaagtaaataggaatttggtttcaacgcctgaggcaattagacacttgggaaaatggccatcccctgtctcaccctggacttaagcgtctggctctaattcacgagtgctcttttctcctcgactgtataccaggttccctcccagaggagccaccagttctcatgggtggcactcagtctctcttctctccagctgactaaactttttttctgtaccgagttaattttttccaactactaatagaataaaggcgagttttctaaaaaaaaaaaaaaaaaaa

SEQ ID NO: 152102 - DNA, 714 bp, Homo sapiens
atgagggaagaagccagaagtcgggagctgtgggctggggcttcccgccatgtcccggtgcctgtgtacaagaacttacagctctttatggagaacaaggacccccgggacgacctcttcgacaggctgaccacgaccagcctgaacaagcacctccaggagctgatggacgggctgacggccaaggtgttccggacctacaacgcctccatcactctgcaggagcagctgcgggccctgacgcgcgggcttcctggaggaggcgccgaggctgggtgctcaggggcgctgacgctcggcatgtgtttcgcgtgcacccgtgggcctcagaggccggtgctgtgctgccctggggacaaccttggagctggggcagcactggggctgtgggatgcggaggagctagctggcatccaggtgagagccccaggagaggagacgccccctccactgagggaggcagaagattctggcccgtgcctctcagccgaggacagcatagcagctaagatcttatcctacaaccgagccaaccgagtcgtggccattctctgcaaccatcagcgagcaacccccagtacgttcgagaagtcgatgcagaatctccagacgaagatccaggcaaagaaggagcaggtggctgaggccagggcagagctgaggagggcgagggctgagcacaaagcccaaggggatggcaagtccaggaggtga

SEQ ID NO: 152103 - DNA, 2816 bp, Homo sapiens
atgggggtgacctcggctgccagtgggcttgtgggctctgcccctcagtgcgtggctctgcccagtgaggggtggacgctggcagtatggcctgttgcggcctgcacctgctccggagttgggagcagccccaagctgacccctggctcctttgttcattgcccttggtttctgctcctgacagaggccacaagggctgagatcaagaggccattttccaaagctgagttaaaagcatctgttaggcccatggagggcagccattgctggggtggggaagcacggaggacgagccagggccacactgagcagaaaggagagttacgggccaggagacaagcacagaacgaggacgaggatgtaaaagaagtgtgggtgggaaaaaccaagaaagaagaaagtgacaaattaggttgccagggagcctgggtgccccccagagtgccctcttggatcggcaggtttgagctgtgggttgtagggtactgggagcagccagcagtaagctggcagatgcgcgtggtgcggctgctgcggctccgggcggctctgacgctgctcggggaggtcccccgccgcccggcctcccggggtgtcccgggctcgcgcaggacgcagaagggcagtggagccaggaccgattctgcatggcggcgggcgctcactgtcatatctacatcaccaggcacaagccgcatggatccagtggccctggtggccgttggtggtcccaggcgctttcctggaggacatacccttcagagacttcctgttgctctgaggacactcatcccagccgaccaggcccaccaggcccccaacagcactacctggctggggtcacgtgcaggtctcctggctctggcagctgggcttggtgggatccgtgactcagcagcacacgggcctctgcaggtggggggcatgggcgggtacacgggcatggggtctgaggtcaggtgggagaaggagaagcacgaagacggggtgaagtggagacagctggagcacaagggcccgtacttcgcacccccatacgagccccttcccgacggagtgcgtttcttctatgaaggaaggcctgtgagattgagcgtggcagcggaggaggtcgccactttttatgggaggatgttagatcatgaatacacaacaaaggaggttttccggaagaacttcttcaatgactggcgaaaggaaatggcggtggaagagagggaagtcatcaagagcctggacaagtgtgacttcacggagatccacagatactttgtggacaaggccgcagcccggaaagtcctgagcagggaggagaagcagaagctaaaagaagaggcagaaaaacttcagcaagagttcggctactgtattttagatggtcaccaagaaaaaataggcaacttcaagattgagccgcctggcttgttccgtggccgtggcgaccatcccaagatggggatgctgaagagaaggatcacgccagaggatgtggttatcaactgcagcagggactcgaagatccccgagccgccggcggggcaccagtggaaggaggtgcgctccgataacaccgtcacgtggctggcagcttggaccgagagcgttcagaactccatcaagtacatcatgctgaaccctttgctcgaagctgaagggggagacagcttggcagaagtttgaaacagctcgacgcctgcggggatttgtggacgagatccgctcccagtaccgggctgactggaagtctcgggaaatgaagacgagacagcgggcggtggccctgtatttcatcgataagctggcactgagagcaggaaatgagaaggaggacggtgaggcggccgacaccgtgggctgctgttccctccgcgtggagcacgtccagctgcacccggaggccgatggctgccaacacgtggtggaatttgacttcctggggaaggactgcatccgctactacaacaagagtgccgggggagaagccggtgtactagaacttacagctctttatggagaacaaggacccccgggacgacctcttcgacaggctgaccacgaccagcctgaacaagcacctccaggagctgatggacgggctgacggccaaggtgttccggacctacaacgcctccatcactctgcaggagcagctgcgggccctgacgcgcgccgaggacagcatagcagctaagatcttatcctacaaccgagccaaccgagtcgtggccattctctgcaaccatcagcgagcaacccccagtacgttcgagaagtcgatgcagaatctccagacgaagatccaggcaaagaaggagcaggtggctgaggccagggcagagctgaggagggcgagggctgagcacaaagcccaaggggatggcaagtccaggagtgtcctggagaagaagaggcggctcctgtaaaaactccaagaagcacctggcccatctgagtgtgcaggccacggaccaaggaggagaacaaggcaggtggccctgggcacgtcccagctcaactacctggaccccaggatcagcattgcctggtgcaagcggttcagggtgccagtggagaagatctacagcaaaacacagcgggagaggttcgcctgggctctcgccatggcaggagaagactttgaattctaacgacgagccgtgttgaaacttcttttgtatgtgtgtgtgtttttttcactattaaagcagtactggggaattttgtacaaaaaaaaaaaaaaaaaaaaaaaaaaaaaagggcggccgctctagagtatccctcgaggggcccaagcttacgcgtacccagctttcttg

SEQ ID NO: 152104 - DNA, 2390 bp, Homo sapiens
  misc_feature (1)...(2390): n = a,t,c or g
cccattctgccatacccattgcccagattgtgtgatttcatgtccaatgcttatccccatgagactcaggttataggcagtgaggaattgttcttcctggaaatgtcctccagcaacttcagaggaatgggaaagtgttaatcttacgtgaagcaaaggagcctgtactaggggcagagagaaagaagcagcagcccaccttctttgtgtatgcacatgtgcctatgtcgtgtacattggtacctgactgtggctcagatctgcgtcgcagcagcgagagaagaaatcactccatatccgatgagaggaagggtggcacagagatggtgtctacaattagagacatttctgactccaccttagcataagcaaactttatatactgagtaacatttgaaggttgtcttttaatggtggggggtgttttttcctttttaaactacagtgcttgcacaagagagggagggactcagaaaaggttagggcaggtgagggagacagtagatggcctgggatgacttgagtccatcatactattgcttggcaggtgtcctcccccatgtttgattcaaattccatgagtgacctacctttccccaggaatgggactgagagggtagtctccagcaactcagtctgcacagggctccccgttcaggctgcctttggtggttgtgcttttgtaagtttctttctctgcacttcgacttacctctgaatcagaaagcaagcccagcaggtgaatgagggatgtctgcttggcattgcccaatctaaccagggaggctggctggccacccactgtccgctagaggggagagctagcaggtgttggtatgaactcaggaatagaaacacggaggccttttttaaatacggagggagaagaatccatgatgcatacctgtaaccccctagaacccaagtgccagaattcctagatgctgcttctgtttgaacaaaatgtcactgcttttacacttgaaaaaaacacactcgaaaaatgttcaactccatgaaaaatattttttggctttaagaaattgtttggtgtttaactgtttcctttgattgccattccaccagtaaattgttggttgatttgcactgccctctggggttggggttgggaggggagggtccttatacagagccgaacctggggttgctcaggaagtgggccagggaatgtggaagtcgttgacattgcctgggccaaaagagtgggagatagtttttctcccctcagcccactcctggtagcacctgtcgccagcctggtacaaagccaggcctttttcttctgtgagcatctcatcactgtccagcagcaggtggaaaaagggggacaacaaccagacctattttttctcccccattttttccaaattttgctgtgccaaatgtttaaaattttataaatatgaatctattgaaatttccttaatcaagagcttcttcgtgtaaagtttgcttttttagctatagaaaaagaaaacagtaaatatctcttaatggcatccagccttgctgagctcaccttttttcctgaaggaatgggtaggagtgaaatatttaatgtaaacatttcaccaagtccctttaccctaattttgaagctgcattaaacccaactcactaacacagggaatgattgcaccctagtcctctgtgggccaagaaactttcagaagcattaaaaaaatagttgaagtatatcacttctcaccaagtgggtagagtcagttggctgtttgtcccttgttttttatttattccataattatgtttgtgctttttgttttgtaaacagtaatggaacgtacatttttattttgtttagaagacaactttgattcaatctttcaagaactgttccattcttggtttcttcttagggggataaaaagttaccagttaatttgttttgagatatttaagcattctttgagttatagaattgtgatgcagggatttgtgaatgagacatttcacatgtgaaaaggtgacttcactaagttaccctgcttgagcagaggtaaaagtgtggtatagtgtacactaaagatgtaaggtaatgcttaacctccagttgtggcaggtgcctctttagagtgttcccgctttctattaaaggtctctcaaaatttgttgcagtatatatttagtatagtatatgagtgtaagtgttatagaaagtatatgttataaatatacagtattttgttccagggggtgatcttgaataggtcctggtatttgtgtatatggagagtgtgaaaggaaagaaaggtactttctccctctagaaaatataaatcacccaaaagtcctgtttaaggtaagaaaaagtattgaaacgaaaaaaataaaaaanaaaaagccattgc

SEQ ID NO: 152105 - DNA, 428 bp, Homo sapiens
ggagtgcggcggaagtcaatattcaacaagtgtcacaaaaagaagctaagcataaaattacatctgctgatggacacatagaaagttctgcacttttaaaagaaaagcaaaggcatcgattacataagttcttgtgtctcacagttggaaaaccaatgaggaaaacgtttgtatctcaagcaagtgctacaatgcaacagtatgcacagagagataagaaacatgaatattggtttgctgtgccacaagaaaggacagatcacttgtatgccttcttcattcagtggagtccagaaatatatgcagaagatactggcgaatataccagagaacctggatttatagtagtaaaaaagattgaggagtctgaaacaattgaggattctagtaatcaagcagcagccagagaatgggaggtagtgtcagtg

SEQ ID NO: 152106 - DNA, 1574 bp, Homo sapiens
  misc_feature (1)...(1574): n = a,t,c or g
cactgaaagcatcggaaccgccccggaatcccggtcgacccacgcgtccgcggacgcgtggggaattacttggtctataaggttaattttttggtcatattgaataaggcacattttttatatgctttggagatacgtgctacatccttttgttaaaaagtctttttagtgatactaattctgcgttcagcgcgtgaaaagtaaaataccacaattttaaaagtctaattatttttaattttgtttaatgacagagatatagatcagctatcaggaagggacttctgccattcaaagaaaatgacaggaagtaacactgaggaaatagactcaagaatccgagatgcaggtaatgatagtgccagcactgctcctaggagcactgaggagtctctttctgaagatgtgttcacagaatcagaactttcccctatacgagaggagcttgtatcttcagatgaactgcgacaagataaatcttctggtgcgtcatcagaatctgtgcaaactgtcaatcaggctgaagtagaaagtctgacagtcaaatcagaatctactggtactcctggtcacttaagatctgatactgaacattctacaaatgaagttgggactttatgtcataaaactgatttaaataatcttgaaatggccattaaggaagatcagattgcagataactttcaaggaatatcaggtcctaaagaagacagcacaagtataaaaggtaattcagaccaggattcttttcttcatgagaattcgttacaccaagaagagagtcaaaaagaaaatatgccttgtggggaaacagcagaatttaaacaaaagcaaagtgttaacaaaggaaaacaaggaaaggagcaaaatcaggacttcacaggacagagggcagganggagctacgcaaactttgggaaaacccatactatgcaacaaactaaacagcaaagggaaaatattcaacaagtgtcacaaaaagaagctaagcataaaattacatctgctgatggacacatagaaagtaagtgttatagagtaaatgaagttagttcatccaattgtatggtgtctccgtctttcctcactgactcaaaagccgctgtaccttagggcaacctgaaggataagtgagtgacccttgaccggtgattctctggggacaagtatatacagtctccagtgtctactgtcttttcttatcccacaggtggattgtacacataatgagcatcattgctacccaccatgtttaaacattcttggctcactacatcgtatcattaaacaatttatttcttgagaaatttgcacaaaagctgtataatacctttgatcactccatttttcttcttaaaaaggtttttggtgtgttaccattaaaaatgtcttttttcatatataacattttaattgccaaagttgtaatcccatcttttataaaatgtacagttaaacctaaaagtgtacttacagaattcttccacgtatcgagaagtttcatcatcatcatctaattattttcttttaaaaacctgccctcaggacaaataaaaacactattttatctgtca

SEQ ID NO: 152107 - DNA, 2424 bp, Homo sapiens
atggaccacatgtgggcctggaaacaaggggtttatgtccctaatatccttatccagttccaaaaatggaaaactccccaaaatcccctacaaacacaaatgtgtttaaaggataataatcccagttccttcagttcctccttgggactctcccctgcagttatgtctctgaaaaaggaattttacaagagaataaacaaaccactacaccatatcaaaacgaaatataaagtttcttcccaccagcctgatttagcatactcagagttaagaactggggacgaaatatttggctttaagaaataagaaatggcctaaatggatattttggaaaaagttagctattgaagtgttatttaaggtaagggggaaaaaaggacaaactcatgctttttgcaatatccatcctagtggacactgaatagggctattgctttctttccaatactctgggcccacatttcatcatactaaaaagacataattagttttcttacccatgtcaatggatattagatataacacaaggaaaatgaaatttgcttctagactcaaaatctgttgacacttaaagtataattatacttttttattaaactgttagaatcatctatggagaaaaatgagttttagcttccaataaagctctgctcttattagaaatcatattgagcagtgaaactaccaatatggcagttgctattctattgttttaacatgactctacctatcccaattggaatgtctaattcaagagacatgagttagattttcaaattaaatgattgtgaatagaggtgattacactgatggcatattccctatttctttaggaaatataaaatacattcataaaggccttacttggatcaggggtacagatatcaattgggaatctctaaggtaataagttttcttgatgcgattttattattttttcattttccaaatctaattttcagtactgataattggacaattttcaagtaagagtctgttaaatccgtcagtaataaaactgagttttaagactgagggctgggaaaggagactttaaatagcaaagtcagacatatcaaaagaaatcattattcaagagtccagctatctgctgaaacttctggggggctaatacttgaaaattaaggactttgttttttctaagttaaaaatgggggaaatgaagttataatctgccatttccaccttacatttggaatttatttattattttttgagacggagttttgctcttgtcgccccaggctggagtgcaaatggcgccatcttggctcactgcaacctccgcctccctgggttcaagcgattctcctgcttcagcctcccatgttgctaggattacaggcacctgccaccacgcccagttaaattttttgtagttttggtagagacggggttccactatcttggccaggctggtctcaaactcctgaccccaggtgatctgcacccccgcttggcctcccaaagtgtgtgagccactgtgcccagcccagagtttctaccttttgatggtaccttttgaaggagcagctggagagggcaggatcaaaattaaatcacatgaaagtgtactccccctccgcctgctccttaataaggaacccccttatgactagaacccaagacccagtaccccacagccctgaaaagggaatttccagacaacccctaccataggaagtagtgaagaaaccttaatttcctaatctccctagtggaataccagtgaaggaattcccatttgtggggcaatggggggatgctgggggagttccctcccctcacagactagagacggcacctaagattctgtaactctgggaagggtaccagccttatagaaattccagtaggtcaactgcctcttgaagcatgcttaaagtctcttaacaggtttataaatgccaatttctggttggtattatatccacagcatagcactgtctactgcatcaggagggctatggagacttaatatactagacatgcgattaaaaaaactgaaagaaaagggaaaggccaacagagtaagggggccaaagaaatggtgatgcagtcttctaatagatgtgaatggggaaggaagaaaagagaagtttagatccaaaatgaacaaagaagtcaagcattaaattccaaatgaacaggtatacagaaatgaaaagttaatgaaatcattgtattatcacaatccaagagctcaagatggaatttaagctttttctccttcactagcttcatcctttggcagccagtctaagaatctctgaaattcaggtttttcaggagattatctctatcctgaatacctgaagacctaatctaaactgttatttctttctgtgaatttcaaagtcatagcattttgtcttaactggccttgaattttctttttttctg

SEQ ID NO: 152108 - DNA, 973 bp, Homo sapiens
cagacgttctttctttgctgcgtctactgcgaggctgggacacactggggcccgctgtcggtctcccgtcctccgacatcttgtctggaacttccgcctggcagtctccagtaggagtggagctctgtgcggcgtagtttggtggaaaaacgggccttgcgtcggcctcacccccagtgtttgtgtttcagaatgaagactattctcaagcaatcagactgtcgaccattcccagaaaaatgtcgacattactctgaaggggacgccccagtaatcgtgtaagggccccagaggaacctctgcggaagggacttcaatccacatcaaatgtggaacctcagcccttcttgggaaagagaaaaaaagaggcttccgggttgaccaaatggtgggggtaccagaagggaactgggctacccgttcgggactatttggtagtcatgtacaggaccatgatccaaggggtgttaccactggggcttcccgttaccaagatgagggtcctgtgtatgcctcaccttccccccatccaaccgttggtttatcccaggagaatgggtcctccttgttgaaatcccgaaatttctttggggtgaaaaaatatatcccgcagggtttccggatgagaccaggttgtttgcttgtttcagtatctcaaggccccagaaaagagtgaattaatcccttgaaaggaaatgacatttgagctttgttgcaaattccagcggctttggattccagcaagccccaccaggttaaaaacaaagggtatcaggaaattttttggatgggtatcaatgtctctggaaaaaggaactgttcaaccaggcttgattgaataagatctaagaagttacctggctacagaaaaaaagatgccacgatgacacttaagacctacttgtgatatattaaaagatgcaaaaaaaaacacatattagatttggaaaaaaaaaaaaaaaaaaagtcgagc

SEQ ID NO: 152109 - DNA, 363 bp, Homo sapiens
  misc_feature (1)...(363): n = a,t,c or g
ggattttcagcaggaactttattccaatgctaatggcagacatcaggaaggaggagaggaaccatttgtgcagatcatctagaagaacctggaccattcttgacagagctgaatacagtgatcacgttgtcctccaaggagcaggggtggggtggggtacttctangagtccttttttatattcctttgaaattccttatggcgcacaggtagcgtagaaaataactgcttcacgctgactgtggtccctctggggtgggggtagggggttttntnnatnatttttnnatntttatcaaaaacctatcnaatccaaatcttctccnatactttacatgtagaaattgtgacatcattaaagct

SEQ ID NO: 152110 - DNA, 3039 bp, Homo sapiens
ctagatgatctgcacaaatggctcctctcctccttcctgatgtctgccattagcactggaataaagttcctgctgaaaatccacatctcccctgggtccggtgttctcctccaactcctccggggaaacccaagccctgcagcgcatggaacagaagaactggaaccgacgcttctggaacaaggctatctgagagcagttcttcctggccctcgggttcatgggacggcataactggaaccaatgcttagggcgcaagggtatgtgagagtgggtcttcccgtacaggaagtagaagatcttttgtttgggggcctcgtcgtcctcctccatgtcattggccagatagctcagcattggggtgactgtgctcatgtggaaattgcggggtggaggggtattcgaaggtcggatgcaaatccgagaagccggaggaagggttttaggtgatgctcccaggatggtgggctccgatgggatcttgtctgacaccctcagatctttgtcccaggccaggaatcttttaatgacaggatcctcaagcagcctgttgaaggcctcgtagtactcagggagcacgagcgacactcgccgtcgcttcgccttcatcttgaggccacacagcgtctccgccacccaggtctcctcaggctcaggggcgagctccttctctggctcatcatcagattcatccaaacactccctcttccttttgcagccaagggacctacgcggggggctgggatctaccccaggggcaagcagcctgttgaaggcctcgtagtactcagggagcacgagcgacactcgccgtcgcttcgccttcatcttgaggccacacagcgtctctgccacccaggtctcctcaggctcaggggcgagctccttctctggctcatcatcagattcatccaaacactccctcttccttttgcagccaagggacctacgtggggggctgggatctaccccaggggcaagcagcctgttgaaggcctcgtagtactcagggagcacgagcgacactcgccgtcgcttcgccttcatcttgaggccacacagcgtctctgccacccaggtctcctcaggctcaggggcgagctccttctctggctcatcatcagattcatccaaacactccctcttccttttgcagccaagggacctacgtggggggctgggatctaccccaggggcaagcagcctgttgaaggcctcgtagtactcagggagcacgagcgacactcgccgtcgcttcgccttcatcttgaggccacacagcgtctctgccacccaggtctcctcaggctcaggggcgagctccttctctggctcatcatcagattcatccaaacactccctcttccttttgcagccaagggaccaggcagcaggtagagctgcctgccagttctgcgccttgctcccgcactcctcggcccttgggcggtcgatgggaccgggcgccgtggagcagggggcggcgctcctcgtggaggcttgggccgcgctggagccctgggtgatggagagtttggtcccctcgatggactgccactgctgcctccctgagctccgtgtgtccagctcaactcggcagaaatacacagactggtcctgcttctgcaggttggagatcctgaggaagccgctcttctgaccctctgtccagttcagaaagagccggttcacataatccttgtgaatggaaggcggccttgtgctgtagaaggactgcctgtggaagtggccccgtctccaggatattctcacgtcgggagctgtggctaactcccaggggtaatagaaggagaaggggatttccacagagccacccatggaggctgagaggtgttttggttgagtgaccccataaaggtagcttggaccagatcctgtggagccactaggctgcagaaatgctggcggcagcagcaagggcagtaggggcagcagcaggggccgacccatggccttgttcttctccaggggacggggagaccagcagagccgtccaggcaggagaggggccagttctgcaggctgtacaggaagcatggctggggaggcctcaggaaactgacaatcacggcagaaggcgaaggggaagcaggcacgtttcttcttaatattcctttgaaattctttatggtgcacaggtagcgtagaaaataactgcttcacactgactgtcatccctctggggtgggggtagggggttttctggatgattttcccatagtgatcaaacaccagtcgagtcccaaccttcgccgatacatggcaggtagaaatggtgacatcactcagtgcacaaagtgagctcagagcttccccccgaaagccaaaagtttcaacctgaggtaggtcggcaaactcttgaatcttagatgtgtgatgtttcagagttaagccttcgaagttttcttcttctaccccacatccattgcctgaaacttcaatgagatccactccatagtccttaagctttagatcaatattagtggcaccagcatccagactgttttctactaactccttcaccgcagtgcttagactcggtaccaccggcccagagcaaatctgatggactgacttccgatcaataggtttgatggccttagcaggttctgtacggactgcgttttttccgaacgccagcagcagggtcagaagggaggtagtcgccctccgtcgtggcctggcgtggattccgagcgttggtgtctggcggtttccgaccgttggtgtctggcacgcgccaccccgatgtaccaggtaaagccctatcacggggtcggcgcccctctccgtgtggagcccacctgcatgtactggctccccaacatgcacggcaggagcggcggcccagcactcggcactggccacttgcaggtaggagcgcggggcccccccgcccactgggttcacactgggaacccggtcaccattctgtgagcaaggccagcagtcaaaggaaaaggccgtgtgtaggtgttcttgccagcagtcctcaccgaggtcccagccaacatccat

SEQ ID NO: 152111 - DNA, 460 bp, Homo sapiens
  misc_feature (1)...(460): n = a,t,c or g
ggcgtggtctggattgattatttgctgcccagtgatatttttccttaatggggttgtggttatttgaacatatttattagctctggaagataatcctgtgctgttttttatgtagaaaaaaacataannnnnnnnnnnnnnnnnnnnnnnnnnnnnnnnnnnnnnnnnnnnnnnnnnnnnnnnnnnnnnnnnnnnnnnnnnnnnnnnnnnnnnnnnnnnnnnnnnnnnnntctacatctannnnnnnnnnnnnnnnnnnnnagaaaaacaatagaagagaaggctgatcccaagctacannnnnnnnnnnnnnnnnnnnnnnnnnnnnnnnnnnnnnnnnnnnnnnnnnnnnnnnnnnnnnnnnnnnnnnnnnnnnnnnnnnnnnnnnnnnnnnnnnnnnnnnnnnnnnnnnnnnnnnnnnnnnnnnnnnnnnnnnnnnnnnnnnnnnnnnnnnnnnnnn

SEQ ID NO: 152112 - DNA, 1104 bp, Homo sapiens; identical to SEQ ID NO: 114550

SEQ ID NO: 152113 - DNA, 466 bp, Homo sapiens
gtcttttttctttttgggggggatggagtctcgctctgtcacccaggctggagtgcggtggcgtgaacccaggaggcagaggaaccatttgtgcagatcatctagaagaacctggaccattcttgatggagctgaatacagtgatcacgttgtcctcctaggagcaggggtggggggaggggggtggggtccttctaggagtccttggagaaaagtaagaaaccaggagcgtttcttacggacttgcagtccaggaggatttgaaggcacaatgcaggggctcagattgggacagaattcttttgtgaaatatcagtgccacagattgtaacagatagcttcatgcacactctgcattttattggtttgtatggaaaatgtcggccattgaattattcatagatttatttcaaatagtttggaaattgttgtacttttgaaaacatgctgttcctgtagttttttg

SEQ ID NO: 152114 - DNA, 2172 bp, Homo sapiens; identical to SEQ ID NO: 135567

SEQ ID NO: 152115 - DNA, 1338 bp, Homo sapiens; identical to SEQ ID NO: 114554

SEQ ID NO: 152116 - DNA, 1322 bp, Homo sapiens
ctagatgatctgcacaaatggttcctctcctcctgcctggtgtctgccattagcattggaataaagttcctgctgaaaatccacatctcccctgggtccggtgttctcctccaactcctctggggaaacccaagccctgcagctcatggaacagaagaagtggaaccgtcgtttctggaacaggactatctgagagcggttcttcctggccctcgagttcatggaacggtataactggaaccgacgcttacagagcaagggtatgcgagagcggttcttcctggccctcgggttcgtggaacggtataactggaaccgacgcttacggagcaagggtatgcgagagcggttcttcctggccctcgggttcatggaatggcctaactggaaccaacgcttacggagcaagggtatgcgagagcggttcttcctatacaggaagtggaagatgttttgtttggagtcctcgtcgtcctcctccatgtcattggccaggtagagagccaggaagaaatgaatgcgttggtattgccaggaggggaagccggcccggctgaaatacgctatgaccatagccaggagatacttgtccgacaccctcagatctttgtcccaggccaggaatcttttaatgacaggatcctcaagcagcctgttgaaggcctcgtggtgctcagggagcacgagcgacactcgccgtcgcttcagcttcatcttgaggccacacagcatctccgccacccagatctcctcaggctcaggggcgagcaccttccgtggctcctcctccaacgactcctcagattggtcccaccactccatcttccttttccagcaaaaggacctatgcggggggctgggatttaccccaggggcaagctgactgttgaagtccttgtggtgctcagggaggatggatgacactcgctgttgcttcagcttcatcttgagcccacacagcatctccactacccaggtctcctcaggctcaggggcgagctccttctccggctcctcctcagattcatctgaccactccctcttccttttccagccaagggacctacatggggggctgggatctaccccaggggctgatggtcccaacatttcatcatccaccacctcctggagggggtaccccgaggtgctccgctggggactctgctcattctgggggtgcggttgacggctggtcgtgatctttcccgtaatctgtcccctcttacggaacctagtctccgttctgtccatggccttcttctggacacttccagaggacttgggctccaggacccagtaacgcagccctggacttgacc

SEQ ID NO: 152117 - DNA, 2257 bp, Homo sapiens
  misc_feature (1)...(2257): n = a,t,c or g
atggactcacccacaccccatgacccagcagctccactcctggtgactgttctagagagtgtccagaagaagaccaaggacagaacagagactagcttcggtgagattggacagattttgggaaagatcatgacgagccatcaaccgcagccccaggaagagcagagcccccagcggagcacctcagggtaccccctccaggaggtggtggatgatgaagtgtcgggaccatcagcccctggggtagatcccagccccccacgtaggtcccttggctgcaaaaggaagagggagtgtttggatgaatctgatgatgagccagagaaggagctcgcccctgagcctgaggagacctgggtggcggagacgctgtgtggcctcaagatgaaggcgaagcgacggcgagtgtcgctcgtgctccctgagtactacgaggccttcaacaggctgcttgcccctggggtagatcccagccccccacgtaggtcccttggctgcaaaaggaagagggagtgtttggatgaatctgatgatgagccagagaaggagctcgcccctgagcctgaggagacctgggtggcggagacgctgtgtggcctcaagatgaaggcgaagcgacggcgagtgtcgctcgtgctccctgagtactacgaggccttcaacaggctgcttgcccctggggtagatcccagccccccacgtaggtcccttggctgcaaaaggaagagggagtgtttggatgaatctgatgatgagccagagaaggagctcgcccctgagcctgaggagacctgggtggcagagacgctgtgtggcctcaagatgaaggcgaagcgacggcgagtgtcgctcgtgctccctgagtactacgaggccttcaacaggctgcttgcccctggggtagatcccagccccccacgtaggtcccttggctgcaaaaggaagagggagtgtttggatgaatctgatgatgagccagagaaggagctcgcccctgagcctgaggagacctgggtggcggagacgctgtgtggcctcaagatgaaggcgaagcgacggcgagtgtcgctcgtgctccctgagtactacgaggccttcaacaggctgcttgcccctggggtagatcccagccccccgcgtaggtcccttggctgcaaaaggaagagggagtgtttggatgaatctgatgatgagccagagaaggagctcgcccctgagcctgaggagacctgggtggcggagacgctgtgtggcctcaagatgaaggcgaagcgacggcgagtgtcgctcgtgctccctgagtactacgaggccttcaacaggctgcttgaggatcctgtcattaaaagattcctggcctgggacaaagatctgagggtgtcagacaagatcccatcggagcccaccatcctgggagcatcacctaaaacccttcctccggcttctcggatttgcatccgaccttcgaatacccctccaccccgcaatttccacatgagcacagtcaccccaatgctgagctatctggccaatgacatggaggaggacgacgaggcccccaaacaaaagatcttctacttcctgtacgggaagacccactctcacatacccttgcgccctaagcattggttccagttatgccgtcccatgaacccgagggccaggaagaactgctctcagatagccttgttccagaagcgtcggttccagttcttctgttccatgcgctgcagggcttgggtttccccggaggagttggaggagaacaccggacccaggggagatgtggattttcagcaggaactttattccagtgctaatggcagacatcaggaaggaggagaggagccatttgtgcagatcatctagaagaacctggaccattcttgacagagctgaatacagtgatcacgttgtcctccaaggagcaggggtggggtgggggtacttctaggagtcagttctgcaggctgtacaggaagcatggctggggaggcctcaggaaactgacaatcacggcagaaggcgaaggggaagcaggcacgtttctggccatggtggagcaggagagacagagagagtgaagcaggaggtgctgcatgcttctaaacaaccagatcccatgagcgctcactcacttcttaatattcctttgaaattccttatggcgcacaagtaggcgttaaaaaatacctggtttacgctgactggtggtcctctggtggtatagtggggctnttttctctataaatatttt

SEQ ID NO: 152118 - DNA, 1842 bp, Homo sapiens
gccgctcctgccgtgcatgttggggagccagtacatgcaggtgggctccacacggagaggggcgccgaccccgtgatagggctttacctggtacatcggggtggcgcgtgccagacaccaacgctcggaaaccgccagacaccaaggctcggaatccacgccaggccacgacggagggcgactacctcccttctgaccctgctgctggcgttcggaaaaaacgcagtccggtgtgctctgattggtccaggctctttgacgtcacggactcgacctttgacagagccactaggcgaaaaggagagacgggaagtattttttccgccccgcccggaaagggtggagcacaacgtcgaaagcagccgttgggagcccaggaggcggggcgcctgtgggagccgtggagggaactttcccagtccccgaggcggatccggtgttgcatccttggagcgagctgagaactcgagtacagaacctgctaaggccatcaaacctattgatcggaagtcagtccatcagatttgctctgggccggtggtaccgagtctaaggccgaatgcggtgaaggagttagtagaaaacagtctggatgctggtgcccactaatattgatctaaagcttaaggactatggagtggatctcattgaagtttcaggcaatggatgtggggtagaagaagaaaacttcgaaggccttaatctctttcagctctgaaacatcacacatctaagattcgagagtttgccgacctaactcgggttgaaactttggcttttcggggggaagctctgagcctcactttgtgcactgagtgatgtcaccatttctacctcccgtgtatcagcgaagggttgggactctgactggtgttggatcacgatgggaaaatcatcccagaaaaccccctaccccccaccccagagggatgacagtcagtgtgaagcagttattttctacgctacctgtgcaccataaagaatttcaaaggaatattaagaagaaacgtgccttgcttccccttcgccttctgccgtgattgtcagtttcctgaggcctccccagccatgcttcctgtacagcctgcagaactgactcctagaagtaccccaaccccacccctgctccttggaggacaacgtgatcactgtattcagctcttgtcaagaatggtccaggttcttctagatgatctgcacaaatggctcctctcctccttcctgatgtctgccattagcactggaataaagttcctgctgaaaatccacatctcccctgggtccggtgttctggaagtgagagagacaatgtcacacctcaaggagacagctctctagacaggaaggttattcacgtcccatgtcaagtctagctagagttcagagcaattgagaaatacaattttatctgctgcctttcattctataccctgcttctgaaccatcgtgttcaactgtgaaactcacattttggtgaccacgactccaaaactcacttaatacacccaaggtcagccccagtgatctgcttcatagcaaggactttgggtgggtctgcccagggagtagggcaccctcagagaatgtggctttggacttcatcacagctggggccttttgtgtcacttaagatctaaacttgtaaccatgctagatgtgtttctaatgtgacaacatcacgaaccacgagtccagaagcctaatccttaatcctacctcctcatgatgaagtctcatgctctgtgctcaacgtggttagctgcacaagatgtaaaccaaagcttcactgaaccctcgacccaaatcagtaactcaagtgcgtcaatcataatgaacctcccc

SEQ ID NO: 152119 - DNA, 2656 bp, Homo sapiens
tttttcgtgatgttgtcacattagaaaacacatctagcatggttacaagtttagatcttaagtgacacaaaaggccccagctgtgataaagtccaaagccacattctctgagggtgccctactccctgggcagacccacccaaagtccctgctatgaagcagatcactgggggctgaccttgggtgtattaagtgagttttggagtcgtggtcaccaaagtgtgagtttcacagttgaacacgatggttcagaagcagggtatagaatgaaaggcagcagataaaattgcatttctcaattgacatgggacgtgaataactttcctgtctagagagctgcctccttgaagtgtgacattgtctctctcgcttccaagaacaccggaacccaaggggagatgtggattttcagcaggaactttattcccaatgctaatggcagacaccaggcaggaggagaggaacccatttgtgcagatcatctagaagaacctggaccattcttgatggagctgaatacagtgatcacgttgtcctcataggagcaggggtggggggaggggggtggggtccttctaggagtccttggagaaaagtaagaaaccaggagtgtttccagttccaccctttcctgcggcaccacctccctttttatattgctgaatgccaacctccctggggcggaacctggaggtcctgtttcttatggacttggttgccacagtccagggaggatttgaaggcacaatgcaggggctcagattgggacagaattcttttgtgaaatatcagtgccacaaattgtaacagatagcttcatgcacactctgcattttattggtttgtatggaaaatgtcggccattgaattattcatagatttatttcaaatagtttggaaattgttgtacttttgaaaacatgctgttcctgtagttttttgatgagagttatagttgttacatatacataaagataattttcttttcatttttaagagacaattctttttatcctaaatattttattatctttaaatttgtttctgtattattacatgtgctcctgaagcgagcactctttttaatcctatgatacttcccataataatctcctcctatttaatagcctattggtagttccccaccagaaaaaaacataattctggtgatagaaatttttatttgctgtttaggtttgtgactgaattgtgagaattcagttgtgatttttaacatgtctcagatatatatactaacacgtctaatacatactatctaatttattggtttattttgaaaaacatgggtatagaattatttaaatatccttttatttatgcacatatttattaaatatatttacttacttaaatatttactaaatacatctctttatataaatgttattactttaaatattattttaaatatttttggaaatactggtatttttgaatagatgctgtttctataaagctgtgtgatggatattataactgttgatatacacactacatataattttgttttcctttttaagagaggattcttttcatcctaaatcttttacctttcaatctttgcatctattattacacgtgctgctgaagggagcatggtttttatctgtgatacttagttaacatatatattacatttatagctatgtagtagttcccctaaattcttgtaaaaataaatttttatttgatatttcatatatgtttgaaatgtgagaattcaggtgtaattttttaccttgttttggcatgtttgcatgttactttaacgaggatgtgtgttctaaaggaggacatgagctgtgtgttttcaagagaacaatagagtgcgtgtcttggggaaacataataaaaatgaacttttctcaccttcacagcaattgggatcatattgggcctggattggttattttgctgccccagtgatattttttccttaatggggttgtggttatttgaacatatttattagcctctggaagataatcctgtgctgttttttatgtagaaaaaaacataaggctgggtgcagtgctcacacctacaatccctgtggttttggaggtcatggcgggaggatcacctgaggccaggagttcgaggccagcctcagcaacacagcatctacatctatttttaatttttattttttaaagaaaaacaatagaagagaaggctgatcccaagctacagggtttttttgtttgtttgtttgttttggagacagagtcttgttctgcctctcaggctggaatggagtggcccaatctcaactcactgcaacctccgcctcctgggttcacacaattcttgtgcttcagcctcctgagtagctaggcctaacgggtgtgccaccgcaccaggctcatttttgtatttttagtagagatggggcttctccgtgttgaccaggctggtctccaactcctggtctcaagcgatccacctgcttcagccttctaaagtgctgggattacaggcatgagccaccgcgtctggcatatttcttacatttttaatagagacgagggtcttgctatgttgcccaggcccgtctcaaactcctggcctcaagtgatcctcctgctttggcctcccagtgtgctgggattccaggcgtaagccaccactctcg

SEQ ID NO: 152120 - DNA, 410 bp, Homo sapiens
  misc_feature (1)...(410): n = a,t,c or g
cnnnnnnnnnnnnnnnnnnnnnnnnnnnnnnnnnnnnnnnnnnnnnnnnnnnnnnnnnnnnnnnnnnnnnnnnnnnnnnnnnnnnnnncccattcaatttcagtgacatgactgctcccccccccacccatgccattgagatgcccttttcagaccctcagagcctctcgcgtcaaggaagccaattcactacccactgggccagctggcgtgggccgccccaactgcccaggaagccccactcagaccatgaccttgctgcctgtgcagtccaggccccggcaagggccaggcatggaacatatgctcagagcgatgggggtcagggccaaggccacagagcaagatgcagaggagcccaggctgggaccggttctgcctgaacatgagcccctcggagcaggggcccc

SEQ ID NO: 152121 - DNA, 3049 bp, Homo sapiens
ccctgccagccattatcccttggctgaaaggctcagctctttggggggtctggggtcaccctccccacctcctggaaaactttagggtatttttgcgcaaactccttcagggttgggggactctgaaggaaacgggacaaaaccttaaagctgttttcttagccccctcacccaactgccattagcttggctccttaaaaggcccaaggcctccttttctgcccctctagcagggaggttttcccaactgttggaaggcgcctttgggggctgccccctttgtctggagtcactgggggctttccgagggtctccctcgaccctctgtcggtcctgggaatggctgtcgggagctgtatcaacctgggttctgtcccctggctctgtatcacggcactttattaaagctgggcctcagtggggtgtgtttgtctcctgctcttctggagcctggaaggaaagggcttcaggaggaggctgtgaggctggagggaccagataggaggaggccagcagctagccattgcacactgggggtgatgggtgggggcggtgactgccccagacttggttttgtaatgatttgtacaggaataaacacacctacgctccggcttcgtgtcctgtgtcgcctgggtcgagcacagccttctggtccagcgctgcatgcggcctcaagaccacgtcttccggttgggggctcccagtaaagcgatcctcagcttcttcagcagccagtggccagtgagagcactgacacggctcccgggacctcggcaggatggaagagaagctgaagaaaaccaagatcatctttgtggtgggtgggcctggctcagggaagggcacccagtgtgagaagatcgtgcagaagtatggctacacccacctctccaccggggacctcctgcggtccgaggtcaggctcaggctcggccaggggcaagaaagctgtcggaaatcatggagaaggggcagcttgttccactggagacagtgttgaacatgctcctgtgatgccatggtggccaaaagtcaatacttcaaaaaggctttcctgatttgaatggctacccgccgggaggttgcagcaaaggagaaagaattttgagcgacgggatttgacaagccccacactgcttgctgtaatgtggaacgcaggcccctgagacccattgacccaagcggcttcttgaaaacgtggaagaagaccaagcggggcgtgtgggacggacaaatgagggagacccattcaaaaaagcgggctggaagacctaattaacaaggccacagaaccccgtattcggccttcttattgagaaacgtgggcattgtgcgcaaggttcaacgcttgagggcttccgtgggacagtgtcttctccccaggtcttgcacccacctggacgccctaaagtagcaacgctggaagccgctttccccaagctcagagccccgccccaccccgtcctgattagaggtcctcctggcctgagcgcagcgcctccaccctgccctgctgagcacagacggaggaagccgcttatcctgttttcatggacagctgagcactaaaggaatttctaaggacatttggttttactgctttttctctgcttccagttggagttgattcatgtgcttgtgcctacctggccgcaagtccccagcccctcaaccctccgttcctcctcagcctccctttgccagccacccctcctctagctctggtgggaggcccggggcccttcctcgcacagggcatgcctggcctgaggacccggcgctgagtgttggggcccttgctccgaggggctcatgttcaggcagaaccggtcccagcctgggctcctctgcatcttgctctgtggccttggccctgacccccatcgctctgagcatatgttccatgcctggcccttgccggggcctggactgcacaggcagcaaggtcatggtctgagtggggcttccctgggcagttggggcggcccacgccagctggccccagtgggtagtgaattggcttccttgacgcgagaggctctgagggtctgaaaagggcatctcaatggcatgggtgggtggggagtcagtcatgtcactgaaattgaatgggggaggcccaatgaggtggctcatgcctgtaatcccagcactttgggaagctgaggcaggaggatcacctgaggtcaggagttcgagagcagcctggccaacatggcaaaaccccttatttactaaaaatacaaaaacttagccgggcatggtggcatgtgcctgtattcccagctactcatgaggctgaggcaggagaatggcgtgaacccgggaggtggagcttgcaatgagccaagattgcgccactgcactccagcctgggtgacagagcaagactccgtctcaaaaaaaaaaacagtacacaaaaagaaattgaattgggggagtcatggtcaggggtgagacctgaaggacctccccctgtgtggccctggacacagcccaccctctgtgagccgtttccaattctaaaacagactcaatgtccccctcacccccacctcaaggtcaggatgcgaacacactgagtgaggaagttgacgctgtccattcgccacggccatgagggctggagaccagaacagcatggcccgaagcgtgcggggccccggatgacttggggacaccccagaattcccctggggagaacccttcctgcgcgctttcattttttgacctcatcactgagaaaggctcaatttggtgctcacgtgtcacttaacacctgatctggcccaagctgggctccctttaaagccaagagagcctcttgtggaccccgcctgcccgaatgaaatccgaacagttgggggctgttcatggcaagtggggctggtttttcatttccattggttatttaaagtttcctttaaaataaacgattttaagttataaaaggtgaatctattgaaagaagaacatcaaagaaataaacaggagttcagcggagtagcagaagacaaggcatgtagggggagccattctgtcccag

SEQ ID NO: 152122 - DNA, 1848 bp, Homo sapiens
cagcccgttaaatttcaaaaaattaaattgaaccagagtcccctggccccgttgaaggaaaaataaataaaaatgtgttagtgccaagtagtaatttttggcattaggggattgatacaattttgcccttaaatcagaattgaagtttaaaaaccaggccatagtttcccttaataaattttttttttttttttttttaagatggagtcttgctctgtcgcccaggctggagtgcagtggcgcgatctcggctcactgcaagctccgcctcgcgggttcacgccattctcctgcctcagcctcccgagtagctgggactacaggcgcccgctaccacgcccggctaattttttctatttttagtagagacggggtttcaccgtgttagccacgatggtctcgatctcctgacctcatgatctgcccaccttggcctcccaaaatgctgggattacaggcgtgagccaccacacccagccagtctatgctctttttttttcttttgagacggagttttgctcttgttgctcaggctggagggcaatggcgcgatctcggctcaccacaacctccgcctcccaggttcaagcaattctcccacctcagcctcccgagtagctgggattacaggcatgcaccaccaagcctggctaattttttttgtatttttagtagagacagggtttctcccagttggtcaggctggtctcgaactcctgacctcaggtgattcgcccacctcggcctcccaaagtgctgggattacaggcatgagcccccgtgcctggccatgggttttgtgtttcatttaacgctttgaaagcccccttttttcaaagattatatgaaaagctttttccagttttttaaatatttgatccaagggtaatgttctttggtataaggagtgaggtatagatccagccttatatttttctttttttttttgagatggagtctcgctttgtcgctcaggccagagtgagtgcagtggtgtgaccttggctctctgcaagctccgcctcccgggttcacgccattctcctgcctcaagcctcccgagtagctggggactaaaaggcggccaccaccatggccttggctaaattttttgggtaatttttaaggtagaaaacggggggtttcaccatggttaagccagcatggtctcgatctcctggacctcatgaatccggcccaacctcgggccttcccaaagtggctggggattatagggcatgagccagcgcgcccagcctagtaaatagttttcaagtgcaaacgtgtatactacatatattggttttatagattatatatacagatcaatctatcaactgaagttacatgttaataaagattatgaaaaaataacctaaaatagcatatgattttaatatacacattttcatttaagcttgagtggattattcatttatttatttttaacttttttaagagatggggtcttactgtgtcacccaggctggagtgcagtggcataattatagctcaccggagcctcaaactcctgggctcaagcgatcctcccacctcagcctcccaagtagctgggactacaggggcccgccaccgcgcctggctaaattttttttgtatttttagtagagacggggtttcaccatgttagccaggatggtctcgatctcctgacctcgtgatccacccgcctcggcctcccaaagtgctgggattacaggcgtgagccaccgcgcccggccccctcttccccaatttttcatacagttgcccctatacaatatacacacccttgagggcaggtagaagtccagcccacctgcgccagggaccctgtggggagcattt

SEQ ID NO: 152123 - DNA, 948 bp, Homo sapiens
gtgctggggtctcaggaggcagcgctctcaggacgtcaccaccatggcctgggctctgctcatcctcaccctcctcactcagggcacagggtcctgggcccagtctgccctgactcagcctccctccgcgtccgggtctcttggacagtcagtcaccttctcctgcagtggaaccagcagtgacattggtaattataattatgtctcctggtaccgacaacacccaggcaaagcccccaaactcatgatctatgaggtcactaagcggccctcaggggatgcctgaggcgattctctggctccaagtctggcaacacggcctccctgaccgtctctgggctccagttctgaagatgagggatgactattactgctgcagcatggcaagacaccactcagtggttgggtgttcggcggagggacccaagttgacccgtccttaggtcagcccaagcgtgccgccctcgggtcactctgtttcccgccctcccttggagaagcttcaagccaaccaaggcccacactggtgtgtgtcataagtgacttcttacccgggaagccgtgaacagtggcctgaaaggcaagatagcagccccgtcaaagcggggagtggagaccacccccacaccctccaaacaaaggcaacaacaattacgcggccaccagctattttgaccttaacgcctgagccattgaaagtcccacaggaagctaccgcttgcagggtcacgccttgaagggggcaccttggagaagacagtggcccctacagaatgttcataggttctcaaaccctcacccccccaccacgggagactagagctgcaggatcccaggggaggggtctctcctcccaccccaaggcatcaagcccttctccctgcactcaataaaccctcaataaatattctcattgtcaatcagaaaaaaaaaaaaaaaaaaagtaat

SEQ ID NO: 152124 - DNA, 532 bp, Homo sapiens
tttcgtgcatccccagagcctccctggacgctgtttgcaaggtcctcaccgcctggaagtccaggagccatttttagggaacagcattcaagctcaacatgaaacgaaactcaaccgaaagcctgcagagagcagaacatggaaggagacttctcggtgtgcaggaactgtaaaagacatacagtctctgccaacttcaccctccatgaggcttactgcctgcggttcctggtcctgtgtccggagtgtgaggagcctgtccccaaggaaaccatggaggagcactgcaagcttgagcaccagcaggcttatggatctggcataggcaagaggttctggtttcaggaaagactggctgttctcttgagatctgtaaagagaggatgtgaaaaaggaaggtcctggaaggcagtcagatggagccctgtttcccgcctttccatgtccattcctcctggggcccctgatctgtctctctggagatactcaagctcaggcagccggtgccaacataaaactgggctgacaacat

SEQ ID NO: 152125 - DNA, 2053 bp, Homo sapiens
gcgacagcaggggctggccatgctgtaaaggggcttcttgttaggttccagcctcaagaatcaaggggaactcctgagcgcgagaattctgaagatctcctccctccctgaagctgtgggctgggccatcggaaaactttcagttttgtttccttgcctgcaagaaacgaaactcaaccgaaagcctgcagagagcaaaacatggaaggagacttttcggtgtgcaggaactgttaaagacatgtagtctctgccaacttcaccctccatgaggcttactgcctgcggttcctggtcctgtgtccggagtgtgaggagcctgtccccaaggaaaccatggaggagcactgcaagcttgagcaccagcaggttagggtgtacgatgtgtcagcagatcatgcacaagtcctcgctggagtttcataaggccaatgagtgccaagagcgccctgtcgagtgtaagttctgcaaactggacatgcagctcagcaagctggagctccacgagtcctactgtggcagccggacagagctctgccaaggctgtggccagttcatcatgcaccgcatgctcgcacagcgcagagatgtctgtcgcagtgaacaggcccagctcgggaaaggggaaagaatttcagctcctgaaagggaaatctactgtcattattgcaaccaaatgattccagaaaataagtatttccaccatatgggtaaatgttgtccagactcagagtttaagaaacactttcctgttggaaatccagaaattcttccttcatctcttccaagtcaagctgctgaaaatcaaacttccacgatggagaaagatgttcgtccaaagacaagaagtataaacagatttcctcttcattctgaaagttcatcaaagaaagcaccaagaagcaaaaacaaaaccttggatccacttttgatgtcagagcccaagcccaggaccagctcccctagaggagataaagcagcctatgacattctgaggagatgttctcagtgtggcatcctgcttcccctgccgatcctaaatcaacatcaggagaaatgccggtggttagcttcatcaaaaaggaaaacaagtgagaaatttcagctagatttggaaaaggaaaggtactacaaattccaaaagatttcacttttaacactggcattccctgccctacttgctgtggtggtcttgtgaaaggtgatgggttttattcgttgggctttaaaagaaaaggtttggcagaactaaaaacaaaactcacgtatcatctcaatagatacagaaaaggcttttgataaaattcaacttgacttcatgttaaaaaccctcaacaaaccaggcgtcgaaggaacatacctcaaaataataagagccatctatgacaaaaccacagccaacatcatactgaatgagcaaaagctggagcattactcttgagaagtagaacaaggcacttcagtcctatttcaacatagtactggaagtcctcgccacagcaatcaggcaagagaaagaaataaaaggcaaccaaaaagaaaggaagtcgaagtatctctgtttgcagacgatatgattctatatctagaaaaccccatgatcttggccccaaaagctccctagatctgataaacaacgttcagctaactttcaggagacaaaatcaatatacaaaatatggtagcatttttatacaccaacgacatccaagctgagagccaaatcaagaatgcaatcctattcacaattgccacaaaaagaataaaatacctaggaatacagctaacccagggagatgaaagatctctacaacaaaaattacaaaacactgctgaaagaaatcagagatgacacaaatggaaaaacattccatacttatggataggaagaatcaatattgttaaaatggccatactacccaaagcaatttatagattcaatgctattcctatcaaactacccaattaacattcttcacagaatcagaaaaaaaaagcattaaaatttatttgaaaccaaaaaagagcccaaaaagccaaagcaatcctaagc

SEQ ID NO: 152126 - DNA, 662 bp, Homo sapiens
aaaatgaataatttttactgctgcatcaagaacattcttaagtgaaaccggtactccaaccccaatttgggtggtgatgaagaatacaattcagcgcttcttacagctttgctcgatccctcctaaggcttcagcagtgtctacacaccattgcttttacaccattggtacaaatgttgacatggtgcaaaaagcaagtaacatcttagtgtcattacgaaaatagttttgatctcacagatgccctgaaagagggacatccaggtttctgcccaccacattgtgaaaattgatgattctagataatacaaaatggcttctgttactgttctggtggtttaaaaacaacaaaaaacctcatttagttctctacctagaagagtgaattgcaactctcatcttgtgcttttacctgtgattttaaaaattgtaatcttgcctttgaaacaaaaatatgccaattcataataaagtctacatgagagtacatgtttggatttatatttctgtgcttctttcttttatataacataccatttcatatttgtgggcccagagtaaagagctcattctgttacagacactgaatagccttgtttttgtcagtagtcagctctgttttaaaacaattgcttgggtcctgctggctcaacttgcagttg

SEQ ID NO: 152127 - DNA, 477 bp, Homo sapiens; identical to SEQ ID NO: 5182

SEQ ID NO: 152128 - DNA, 2453 bp, Homo sapiens
tgggaagaaattcaagaacttaatgaagtcgcgagacatcggccacggtccacgttagttatgggaatccagcaagaaaacagacaaatcagagagttgcaacaagaaaacaaagaattacgtacatctctggaagaacatcagtcggccttggaacttataatgagcaagtaccgagaacaaatgtttagattgctaatggctagcaaaaaagatgatccgggtataataatgaagttaaaagagcagcactccaaggaactgcaagcacatgttgaccagataactgaaatggcagcagtaatgaggaaagccattgaaattgacgagcaacagggttgcaaggaacaagaacgaatatttcaacttgaacaagaaaacaaaggcttgagagagatccttcaaataactccgagaatcatttttgaacctaaggaaagatgatgcgtcggaaagtacttctttgtcagcattagtgaccaacagtgatttgagtctgaggaagagctgaagagtttctgagtctgtgagcttctttacatgggctccaaattggtcaaattaagtgaatgaatgaatgggaccagaaaattcaatcctttatttttttctctgtaaatatgtacagtgcacgggctatgagatagcaacaaaaaatgcatagttaatggtcatagactttattccaaaacataattggaaaatagaaactgagccattgccaaatggtaaagaaatgaaaagttttcacagtgactactgaatataccaagagcttttggcagtactgctggctttctgggtgattaattaggtaaacttgaatattcccagtaaatgtttgagaatgcataaaattataccaatttaaaaatataaatttttgccactgttttgtgaacggaggatttgtacgctaaatttcatccttatttggcgtcaaagttgatgcaaagtttatgtaccatgagacttctagtgattgcctactttcacatttatttaaatttttgtgaaagaaaatacagttttaaaggctataggaatgtgttatatgtaccttaaacagataatttaattttagcaatttatcataactgatacttagctaacaattgtccataacttgtttaagtgtaagaaataccatttcaggaatgaaaaagaaggaatactactttctaagaaagaagatcttataatagacatatttagtaggttaaactactcctttgaaagaataagttttggttcaaagtcaataatgaagacgagatttgtttttctcttctctggctgatttttaaggatattatgtagttcatttagttaacagaattgaaatgtttgatatggcaagataggtatggtaatttcaaagtgaattgggaattcctctggctcatagaacccttttttttttcctttaagtattcttgagatacaaaaaaaaaaagtaaatacaatttcaaaaaaaaaagttccggatctgtttttaagctccatctggtcctcataacctgcaagatttttcttaaaacctttcagctgaaagtgggggtaaaggtggagtaatctgtggatttgtttctgttgtcttttaaaatgtcaaatatataatatgtaatttttttaaaaaccaccagatacagaaatgtgctttaacatcagttgaaacctaaattttcttatgttgtggtgattgtattaaaaagggataaaagaagagtgtcaaacatggttaaatatattgtactcatttatgttgaatacgtattaaaattaagacaagtggaaaattatactttgagtatataatttgttaaatattactttatatggtaattttatgtataatttcatatattggtaaaattcaaaactacacttgagaatttttttatcttaagtttggggtgaatggggtggatgagactgattgaatagaaaagggctaatggcccaaacattatatagatttctttttttcagtcagaggccttatttgatattttataaataaatgacagtttttatttttaaactttttattgtttttgggaaagtattccttaatttaatgacacattcattcagatacttcttatccctgctaataaaggaaatctatttcaagctacaccattgagattaagtctgaggcagttcattgaggcagctctactataaaagcttacttgataaataattatttttgtaaacaagttgggttaacttattcttcgtctttttgcttggatatgaatttaaggtcttcatgtttaaagacatttactttgttatttagtgacacatttccatcctatttttttttttttttttggttgttgttaaacagaaccttaagtttatgtttgaggtatgtactgcataggaacctattttattattaaagatgaatgattaaaattggaaaaaaaaaaaaaaaaaaa

SEQ ID NO: 152129 - DNA, 902 bp, Homo sapiens
  misc_feature (1)...(902): n = a,t,c or g
tttcgtgccggtcggaggcggtcggcggaggtgtctaccccgccggtgatggcgttgaacgccactggcttcccggccttccgtccgctgcctccgtccgattctgcgtctgcttgctgaggaggcggattaggggggcgcggagtctcttcccttgagtgcataggtcccggttggtagagggtttgagtccgcatcgccacagctgaaggctgcgagggactaagagcagaatattaccttaggaattgagtggaccatttgggaagggcattttccgagcgctaaagctcttgttgaaagattaagagatcatgacgattgcagcagaatctcctgattgagcaaaccacagctcctcaacaagccgaggtagaagccatgaaacagtatcatggaagaaattcaagaacttaatgaagtcgcgagacatcggccacggtccaccgttagttattgggaatccagcaagaaaacagacaaatcagagagttgcaacaagaaaacaaagaattacgtacatctctgggaagaacatcagtccggccttgggaacttataatgagccaagtaccgagaacaaatggttaagattgctaatggctagcaaaaaaagatgatccggggtataataatgaagttaaaaggagcagcactcccangattgacattggtacatcgtaacaagtccgaaggattcttccttgatgcatctcgacacatccttgaagcacctcaacatggactggagagaaggcacttggaagcaaatcagaatgtacactaaataaacagtcaacttttggggtgtggatggaaggggggtccattttaaaagtgcttttacattgaatttccctcccagattagatcagcaaataaatgaaatttattaaaagaaa

SEQ ID NO: 152130 - DNA, 1295 bp, Homo sapiens
tttttttttcttttttaaaagttttattttagttttaattgacacataataattgtataccaaatagcaatttttaaaaatagggagacccaagagttaaaaacacaaagtttttccactgttctttgtaaaatttctcatactgaggaaactgtttttataaagcaaccatgtatcgttgccattacagtgtactggcatacttattaggacaattgacagggaaaaacaacttttgggcacaaggaatgccaatttattccttttttgggacacataaacacaaaatatccctggcagggccaaaaaaaaattgcaaaatttaaacgaccgatcatccttatctccaacatgaggggtacaacccctcccttaatagtttgggaaggtacctcgtattggctgggggccatacatccagtccaaatttaataaaatacattttaaaacattaccaggtctaataatatagaaacaaaaatcacaccattagtcaaatgaacaaatgcaaacattttcagccactagacgtagaaaggagcatgaatatgtcaatagcaaggcataagaaaatggttaatcaataacaagatctttcctttaattttacaaggaaaacttcttggagttgccaaacagtattgatacaatgccctcagcctccactttcttaaaatgaaagcagagctacccccttgctattgagcaagaaaatatcacagcacattcacaaaaggtcgttaggacagggtggagagggtgagccttgttaaacagtggattatattttcccacttgaagggtaggcagctttgccaggtaggcaagctctgatagaggctgggcacccagaacccttaaaacaacagacccatatagaaacatgtctgccttgaaaatccatcacctttggaaagcagcaaaatagaattttacagtaagaatgaaatatgttcctgctgccccagaaacgctggctgcattaaagccagctagttcactttataaaccattcaggattcaacagctaagaacaccaccaccaaaacataattggttcaacatttgggtcatcaccactctcttaatgtcccccccccctttttttttttgagacagagtttcgctcttgttgcccaggctggagtaatagctcactgcaccgtccacctcctgggttcaagcaattcattctgaatttcttaggatgaaagcatcatacccatatttatttgcacaatcgtgtgcgcgcatgtgtgtgtgtgtgtgtgtgtgtattattttcacagaaacta

SEQ ID NO: 152131 - DNA, 367 bp, Homo sapiens
gcgggacaacaccagccccatcagcgtgattctggtgagctcggggagcaggggcaataagctgctgttcaggtaccccttccagagaagccaggagcacccggcgtcccagacaagttttcagatgttattctggcaacaattttggcaaccaagtctgaaatgtgtggccaaaaatttgaactgaagattgataatgtgcgatttgttgggcacccaacactgctacagcatgctctggggcagatctccaaaacagatccttccccgaagagggaagcacctactatgattctttttaatgtggtgtttgcactgagggccaacgcagacccgtcagtgataaactgtctgcataacctgtccc

SEQ ID NO: 152132 - DNA, 615 bp, Homo sapiens
cgctgccagtactccacccgggaggccaagctgatcctgcgctccaggatgagtgtccgccatggctgatgaaatgaagtcctcagtccccattccatcacatcctgcccaagtgcaagctggccagggacctcaaggaagcttatgacagcctgtgcacgtcgggcgtagttcggcttcacatcaacagctggctggaggtgagcttctgcctgccccacaagatccactatgcggcctccagtctgatccccccagaggccatcgaacggagcctgaaagccatccgcccctaccatgccctgctgctgctcagtgatgagaagtccttgctgggtgagcttcctattgactgctcccctgccctagtgcgggtgatcaagaccacatctgctgtgaagaacctgcagcagctagcccaagatgcgcttcttcctcccaggctaccctgagcctttcctggcccagtcctcaccacagtccacagaagccacaaacaggctcatagccaagctgtgacctggaggaagagctagctccagacatgggttgatcacctagaggagctctggctaaggcacagttttctagaaataaaacatttattcggttttt

SEQ ID NO: 152133 - DNA, 468 bp, Homo sapiens
ctgtctcccaatgccagcgtatgtctgtactccccgctggccgagcagttctcccaccagttcccatctcatgacctgccgtccgttcttgccaagttctccttgccggtctccttgtcagaatttaggaatcccctggcccccgctgtgcaggagacccagctcatccagatggtggtgtggatgctgcagcgccggcttctcatccagctgcacacctatgtctgcctgatggcctcacccagcgaggaggagccccgtccgcgagaggacgacgtccccagcatggacaactccagcgcagagctacttcccagcggggactcgccactgaaccagaggatgacggagaacctgctggccagcctgtcggagcatgaacgcgcagccatcctcagtgtacccgcagcccagaaccctgaggacctccgcatgtttgccaggctccttcactacttccgcggccgc

SEQ ID NO: 152134 - DNA, 834 bp, Homo sapiens
caacgagaacacgcggcgctcccagctgctcatgctgtttgacaagttccgcagcgtgctggtggtgaccacccacgaggaccctgtcattgccgtcttccaggctctgctcccctgaggcctggcattgggtggatgcgggctggccgtggcccagtgaagcctgcagagccccgctgtccttgcccctggtggttccgctgtggggctgctgccctctgtgttcctacgcttccctccagtccttgccgcacgcgtaggcatctccacgctggaggggggcctgccaggactcctgtctctgggtgaggccgcatccttcaaggcccatgtgggctgtgcgtttctcagaccctccttctgtccctacacctgctccttggaccccccagtctgtggccaccctgaagaatgtgcagaaacacttgtgtggcctgtccctgtctctctgacagccttccacagtccacagaagccacaaacaggctcatagccaagctgtgacctggtcctgaccatctggggcacgaaggccttgggctgccctggtagggcttgaaaaccccttgacccttgcacacacttgttggggggaggcttggcccattgtgcaggaaccccaccctcggggggctttgggtttccacactgattgattctccccaggatccacaccgggcctggcgcttcgtactcaggcccccagctcttgtgttcctggagaagagctagctccagacatgggttgtcacctagaagactctggcttagggcccagtttctagaaataaacatttaattcgtttttaacaattaaaaaaacttgtctgggca

SEQ ID NO: 152135 - DNA, 671 bp, Homo sapiens
gacgccgattccaggttttcagaggtatttctgccacaattttggcaacccagtttgaaatgtgtggccaaaaatttgaactgaagattgataatgtgcgatttgttgggcacccaacactgcacaggcatgctctggggcagatctccaaaacagatccttccccgaagagggaagcacctactatgattctttttaatgtggggtttgcactgagggccaacgcagacccgtcagtgataaactgtctgcataacctgtcccgtcgtatcgccaccgtgctgcagcacgaggagcgccgctgccagtacctcacccgggaggccaagctgatcctggcgctccaggatgaggtgtccgccatggctgatggaaatgaaggtcctcagtccccattccatcacatcctgcccaagtgcaagctggccagggacctcagctttggctccccaaccagcagcgatgacatgaccctcaccagccccagcatggacaactccagcgcagagctacttcccagcggggactcgccactgaaccagaggatgacggagaacctgctggccagcctgtcggagcatgaacgcgcagccatcctcagtgtacccgcagcccagaaccctgaggacctccgcatgtttgccaggctccttcactacttccgcggccgc

SEQ ID NO: 152136 - DNA, 374 bp, Homo sapiens
  misc_feature (1)...(374): n = a,t,c or g
atgcttggggaaaaatccatcattgtgggaacccgaaaagccccccanggtggggtccctgcacagtgggcccatgcctcccacagggcacttcacaaatggaaggctgtcagagagacagggacaggcccacacaagtgtttctgcacattcttcagggtggccacagactggggggtccaaggagcaggtgtagggacagaaggagggtctgagaaacgcancanccacatgggccttgaaggatgcggcctcacccagagacaggagtcctggcaggcccccctccagcgtggagatgcctacgcgtgcggcaaggactggagggaagcgtaggaacacagnaggcagcagccccacagtcgnggncgagg

SEQ ID NO: 152137 - DNA, 1716 bp, Homo sapiens; identical to SEQ ID NO: 124436

SEQ ID NO: 152138 - DNA, 901 bp, Homo sapiens
gcggccgccaccaccttgggaggagattatgtacaacgagaacacgcggggctcccagctgctcatgctgttttgacaaagtttcgcagcgtgctggatggtgaccacgcacgaggaccctgtcattgccgtcttcccaggctctgctcccctgagccccaggcggagggcggaaaggctgctggggtgccgcaggtttggaaaggccccttggattccttggcttggggacaatgatgacctggacccttggccagaagagccctggccctccagcaaggcagcacctgctctgatgcacctgtgcacccctggccctcccagaccacctgggagcccgaagcttagcctgtaggtggccaagccagttccctactcttgggctgcggccacgttgaggctccgcatcagacagccaggggcaaggcactagtggacaaagccagcaaatgcggcgttcctgtgagcagataccctcaaccagccagctgtcaaaagtatttcaagataaaatcagggccaagcaaagcctttaagttcccgtccattctgtgattcccacgctgcttccagctcaccaggtggggtgcctgctgcccaccctgacccacctcagtagggaggagcaggaccctctacatccctgtgggtgcagggcacacgcccctcgttgtctcactgagcccccacagagccgcctgcaaatgagtcaaagcctggccgccctcatcaccacagccccgtgccctggctccttcacacagaacacatccaagtcccacatcctgacaaaaacatgacccctttgatcacttcctgccaaacctccctttcctcaccgactcctccgctgaccctaagtccccctgctgtgcccactgctccatccttggcaacctga

SEQ ID NO: 152139 - DNA, 3098 bp, Homo sapiens
  misc_feature (1)...(3098): n = a,t,c or g
tttcgtggcacgtgggccccctccgcctccggctccgttctcctcaggctccctccgcctccggctccgtcctcctctggccccctccgcccccggccccggccccacggcgggatgcgggacaacaccagccccatcagcgtgattctggtgagctcggggagcaggggcaataagctgctgttcaggtaccccttccagagaagccaggagcacccggcgtcccagacaagtaagccgcgtagcagatacgctgccagcaacacgggcgaccatgcctgatgagcaggacggcgattccaggttttcagatgttattctggcaacaattttggcaaccaagtctgaaatgtgtggccaaaaatttgaactgaagattgataatgtgcgatttgttgggcacccaacactgctacagcattgctctggggcagatctccaaaacagatccttccccgaangaagggaaagcaccctactatgattcttttttaatgttggttgtttgcactggagggccaacgcagacccgtcagttgataaactgtctgcataacctgtcccgtcgtatcgccaccgtgctgcagcacgaggagcgccgctgccagtacctcacccgggaggccaagctgatcctgggcgctccaggatgaggtgtccgctatggctgatggaaatgaatgatcctaagcccccattccatcacatcctgcgccaagtgcaagctggccagggacctcaaggaagcttatgacagcctgtgcacgtcgggcgtagttcggcttcacatcaacagctggctgggaggtgagcttctgcctgccccacaagatccactatgcggcctccagtctgatccccccagaggccatcgaacggagcctgaaagccatccgcccctaccatgccctgctgctgctcagtgatgagaagtccttgctgggtgagcttcctattgactgctcccctgccctagtgcgggtgatcaagaccacatctgcctgtgaaagaacctgcaggcagctagcccaagatgcggacctggccttcgctgcaggttttccagcttgcagctcatctgggtgtactggggcaaggccatcatcatctacccgctgtgtgagaacaacgtctaccatgctgtctccccaatgccagcgtatgtctgtactcccccgctgggccgagcagttcttcccaccagtttccattctcatggacctggccgtccgttcttgccaagttctccttgccggttttcctttgtcagaattttaggaatcccctggccccccgctgtgccaggagaacccagcttcattccagatggtggtgtggaatgctgcagcgccgggcttctcatccagctgcaacacctatgtcctgcctgatggcctcacccagcgaaggaggagccccgtccgcgaagaggacgacgtccccttcacttgcccgggtcggcggtcgcagcctcagcacgccccaacgccctcagctttggctccccaaccaagcagcgatgacatgaccctcaccaagccccaagcatggacaactccaagcgcagagctacttcccagcggggactcgccacttgaaccagaggatgacggagaacctgtttggcctagcctgtcggagcatgaacgcgcagccatcctcacgcgtacccgcagcccagaaccctgaggacaaaaacatgtttgcccaggcatccttcactacttccgcggccgccaccacctggaggagattatgtacaacgagaacacgcggcgctcccagctgctcatgctgtttgacaagttccgcagcgtgctggttggtgaccacccacgaggaccctgtcattgccgtcttccaggctctgctcccctgagcccaggcggagggcggaaggctcgctggggtgcgcaggtgggcgctcgcgtctccccaccccagggctccccccgtgctgaggctgagccctcttggccctgaggcctggcattgggtggatgcgggctgtccgtggcccagtgaagcctgcagagccccggctgtccttgcccctggtggttccgctgtggggctgctgcctgctgtgttcctacgcttccctccagtccttgccgcacgcgtaggcatctccacgctggaggggggcctgccaggactcctgtctctgggtgaggccgcatccttcaaggcccatgtgggctgtgcgtttctcagaccctccttctgtccctacacctgctccttggaccccccagtctgtggccaccctgaagaatgtgcagaaacacttgtgtggcctgtccctgtctctctgacagccttccatttgtgaagtgccctgtggccccctccccagcacctctgtctgccatgcgctttcttccttccccagggcttacccttgagcctttcctggcccaagtccttcacccacagtccacagaagccacaaaacaggctcatagccaagctgtgacctggtcctgaccatctgggcacggagggcctgggctggccctgctaggctggagaagccctgtcacctgtgcacatcttgctggtggaggcatggcccactgtgcaggaccccaccctcgggggctttcggctcccacactgatgattctccccagcatccacaccgggcctggcgctacgtactcaggcccccagctctcgtgtcctggaggaagagctagctccagacatgggttgatcacctagaggagctctggctaaggcacagttttctagaaataaaacatttattcgggtttggaaaggccccttggattcctggctggggacaatgatgacctggaccctggccagaagagccctggccctccagcaaggcagcacctgctctgatgcacctgtgcacccctggccctcccagccacctgggagcccgaagcttagcctgtaggtggccaagccagtccctactcttgggctgcggccacgtgaggctccgcatcagcagccaggggcgagcactagtggacaaagccagcaaatgcggcgttcctgtgagcagataccctcaaccagccagctgtcaaaagtatttcaagataaaatccaggccaagc

SEQ ID NO: 152140 - DNA, 806 bp, Homo sapiens
ccactgaagcgctcagatggctgtaacgacggccgacccacgcgtccgcccacgcgtccggacacaactgtgttcactagcaacctcaaacagacacgcatggtgcatctgactcctgtggagagagtctgccgttactgccctgtggggccaagcgtgaacctggatgaaagttggtggtaaggccctgggcaaggctgctgggtggtcctaccctgggaccccaaaaggtcctttgaagtcctttgggggaatctgtcccaactccctgaatgctgttaatggggcaaacccctaaaggtgaaaggcctcaatggcaaaagaaaaagtgctcgggtgccctttaagtgaatggcccctggctcacctgggacaaccctcaaagggcaccctttgccccacactgaagtgaacttgaactgtgacaaagctgcaccgtggatccctgaagaacttcagggctccttgggcaaacgtgcttggtctgtgtgcctggcccaatcaacttttggcaaaagaattcaaccccaacaagttgcaaggcttgcctaatcaagaaaagttggttggcttggtgttggctaaatgcccttggccccacaagtatcacctaaagctcgcctttcttgctgtccaatttctatttaaaggttcctttgttccctaagtccaactactaaactggggggatattatgaagggccttgagcatcttggattttgcctaataaaaaacatttattttcatcgcatacaagaataaaacaagcgcggccgattaagaggatacttcaggggcgcaagat

SEQ ID NO: 152141 - DNA, 952 bp, Homo sapiens
  misc_feature (1)...(952): n = a,t,c or g
caacacaggggcagtctccaggacctccacaccattaacaagatgagccttgtgctcccttgggctctagagaggaagcccctctgagccctcagcccctctttcctccctctcctaaagtaatttgatcctcaggaatttgttctgccctcatctggccctggccagctctgcatttgacaaatgccaggaagaggaaactgttgagaaaacggaactactggggaaagggagggctcactgagaacccatcccggttacccccgatcaccgcttggtcaccatgacccacattgttgcaaaccttttctcctgtcaacagccggccagcctcccaattacgagatgctcaaggaggagcaggaagtggctaagcctgggggcgccccaaaaaccgtgcttacccgaatgtccacgcgtgatcaacatccgcaacgagaacctcgtggcctgaccatgttcgtctggtccctgttcaaacaccctcttcatgaacacctgcttngcctgggcttcataagattcgccctactccgtgaaaagtctaagggacaggaaagatggttggcgacgtgaaccggggccccaaggcctaatgcctccaccgccaaagtgcctgaaaaatctgggccctgattttgggcatcttcaatgaccatttttgctcatcaatcatccccagttttgggtcgtcccaggcccagcgatagatcaggaggcatcattgaggcccaggagctctgcccgtgacctgtatcccacgtactctatcttccattcctcgccctgcccccagaggccaggaagctttgcccttgacctgtattccacttactccaccttccattcctcgccctgtccccacagccgagtcctgcatcagccctttatcctcacacgcttttctacaatggcattcaataaagtgtatatgtttctggtgcaaaaaaaa

SEQ ID NO: 152142 - DNA, 848 bp, Homo sapiens
tgctcccttgggctctagagaggaggcccctcttagccctcagcccctccttcctctctatcttaaagtaatttgatcctcaggaatttgttccgccctcatctggcccggccaaatcccgatttgacaaatgccaggaaaaggaaactgttgagaaaccgaaactactggggaaagggagggctcactgagtaaccatcccagtaacccgaccgccgctggtctttcgctggacaccatgaaatcacactgtccaaacccttttctttccctgtcaccagtggccagcccccccaactatgaagatgcttcaagggaggagccagcagttggctgtgctgggggcgcccccaaaacccctgctccccccgacgtccaaccgtgatcccacatccggcaagcgagaacctccggtgcccggaccaatgtcgtcctggtcccctgtttcaacacccttcttcaatgaaacccccggctgcctggggcttcaataagattcgccctactccgtgaaagtctagggacaggaaagatggttggcgacgtgaaccggggcgccagggcctatgcctcccccgccaaagtgcctgaacatctgggcccttgattctgggcatcctcatgaccattctgctcatcgtcatcccagtgctgatcttgccaggcctattggatagatcaggaggcatcactgaggccaggagctctgcccatgaccttgtatcccacgtactccaacttccattcctcgccctgccccccggagccgagtcctgtatcagccctttatcctcacacgcttttctacaatggcattcaataaagtgcacgtgtttctggtgctgctg

SEQ ID NO: 152143 - DNA, 1299 bp, Homo sapiens
  misc_feature (1)...(1299): n = a,t,c or g
ttttaataagttgatattttttccctgtgtagatttaaataatttcctttaaaagccgtaagctttggctgggcatggtggccttatgccctgtaatccccagcactttgggaggcctacgatgggtggatcaccctgaggtcaggagttcaagacccagtctggccaacatggtgaaatgccgtctctactaaaaatacaaaaattagctgggcatgatggcgagtgtctgtaatcccagctactcaggaggctgaggcgggagaatcacttgaacctgggaggcagaggttgcagtgagctgagatcgcgctactgcattccagcctgggcgcccgagatagcgccattgcactccagcctgggcgacctgaataaaactctgtctcaaaaaaaaacaaaaacggtaagcttttatatttaattaactgatacctttcactgtggcaatctccaagagggaagattttctaaattaggacattggtctttaccttaaaggaaggaaaattggtctatttcagtgtcttttttagcaagattgaccaaaaacaggtggtaaggtgtggaattttttacctgtcatgaaatactgtaatgcgcacctttgctaataaggaaatggtctccctttgaattatggggaagtttcttgtctgtgatatgggggtgtctgtgtacatatatgtatatttccttttttaatacagggataataatatgggggtcttgtccttccaccttttaagttcaggggaaccagtttgtccctgacccacacatatgtttatcagtgtaatgctttatggaggctttaggaaatgaggctcatggactcattaaaaaataataaaacatgatgctattttaaatattttcaaataaataatcctgaggatgtgtttcatactttagcatcaacgctgagttgtgcccctgtagaattgccattgnccctatacatgccaaaagacctattaagttaggatgaacctagattccccaattaccagtgaaattcctatccttgcaaatggctatagaataacttgcattttaaacgtgtatttgcacattttacatatgcctatgtggttgcctttggggttttctgtacagattgttttttgttattaaatggaaaaggcctgaattatgctcttatgtgaagtaaattgatataacctattgactgtattctgtgtattattccctcttttgggaccttctgtgtaaaagaaaatattacctaaattggttagatacaaagaaatcattaaaattattaatgtatatatg

SEQ ID NO: 152144 - DNA, 1938 bp, Homo sapiens
gcggccgcagtggcgtcctggagccctcctcaggtgagctggagctgcccggctcggcagcgggaagtgctgaagctgctgaaagatggcagaagaagtggtggtagtagccaaatttgattatgtggcccaacaagaacaagagttggacatcaagaagaatgagagattatggcttctggatgattctaagtcctggtggcgagttcgaaattccatgaataaaacagggttttgtgccttctacctatgtgggaaggggaaaacagtgctcggaaagcatctattgtgaaaaacctaaaggataccttaggcattggaaaagtgaaaagaaaacctagtgtgccagattctgcatctcctgctgatgatagttttgtttgacccaggggaacgtctctatggacctcaacatgcccgctttatgtgaaatttaacttacatggctgagagagaggatgaattatcatttgataaagggggacaaaggtgatcgtcatggagaaatgcagtggatggttggtggcgtggtacctacaatggacaagttggatggttcccttcaaactatgtaactgaagaaagtgacacgtcctttgggtgaccatgtgggttctctgtcagagaaattagcagcagtcgtcaataacctaaatactgggcaagtgttgcatgtggtacaggctctttacccattcagctcatctaatgatgaagaacttaatttcgagaaaaggagatgtaatggatgttattgaaaaacctgaaaatgacccagagtggtggaaatgcaggaagatcaatggtatggttggtctagtaccacaaaaactatggtaaccgctattgcagagtattcaattaacctcaggtttgggaaccttaaccttccagtgtggattcattaggccttacattcctggaaagtttgttggcaatccttggtattatggcaaagtcaccaggcatcaagcagaaatggcattaaatgaaagaggacatgaaggggatttcctcattcgtgatagtgaatcttcgccaaatgatttctcagtatcactaaaagcacaagggaaaaacaagcattttaaagtccaactaaaagatgactgtctactgcatttggcagcgtaaatcatgcaccatggaatgacttgtagaacattacaaaaacggcaccaaatttttacaacgtgaacaaaggagaaaaattatatcttgtcaagcatttatccatgatactgctgacccagaagtgactgctgtgtagctgtaatttgtcatgtaattgaattgaagactgagaaaatgttgggtccagtcgtgcttgattgggaaattggttgtttctaaatccatatggagaatttgaccattaagtatttttattataactcagcccatacatatatactatgtatgcagtgcatctgcatagaacagttccttatccttggccttctgttttatggtttttttctttgctgttttcccccttggcttctaatattacagttttgtattttgtaaacaaaaaatcaaataatggcatatcagaatctttatatggaagaaatcctttattgccctttcctttgtttccttgtaaaggcaccctgttctgttatggtttttcattatataaaattattatatctatatatgacatatgctaaaatttcttggagagtgttaatcttttctgtgactaaatagcaataataagtggaaaattagaaattatttccaggtattatatttgtcacaggccattgtaaataccaagtatattgtgtctgccataatttttaaaaatacattcattgtcttcagtcatacagcaagacacatgagacatagattagaaaacatgttgtacaattttaatttacaactgttgaaaataacacaccccttaatttttttccaaaaaaaaaa

SEQ ID NO: 152145 - DNA, 745 bp, Homo sapiens
atccttaattaaattaatccccccccccccccccccggacaactcggtggtggccactgcgcagacccagactttcgctcggtactcgtgcggcctcgcttcgcttttcctcccgcaaaccatgtcagaacaaacccgattatggcttgagatcggagaaattccgataaagtcggaaacttgaggaagacagagaccgcaagagaaaaattcccactgcccttcccaaagaaaccgattgaaccaggagaagccaagccaggcgaaatcgtaaatggaagcgtgcgcccgcccaatatgccactgtacattcccacaagcattgcccttccttattttaccttccttttagctgtcttaactttgtaagatgcaaagaggttggatcaagtttaaatgactgtgctgcccctttcacatcaaagaacctattgacaacggaaggccggcgcttggcctttcccatctgtctatctatctggctgggcagggaaagaaaagaacttgcatgttgggtgaaggaaaaaagtgggggtggaagaagtgggggtgggacggcagtgaaatctaggagtaaaaccaagctgggccccaaggtgttcctgcaggctggtaattgcagttttaattcagagtggccatttttttttttttgttttgttcaaatgattttaattattggaatgcacactcttttttaatatgcaaaataaaaaggtttaaaaggtaaaaaaaaaaaaaaaaa

SEQ ID NO: 152146 - DNA, 1720 bp, Homo sapiens
cccagtaggggcagcattttgctaaatgtaaaagatagccatttaaaactcatacatatacatgtgtatatacagttatatcaacactatttatatacatatatatctggagagcaatatttcattgcctttgaatatctatatatctactcccacaatatatactagagacatactgtgtgagtacatacgaaagcatatgtacacatgctctgacatgtatatatacacttttgtctgtgtgtgcataagagctttaaaggcacaatatatagggatgcaagttttctagagagctgcagcaaagttaatacagaatgtcacaaactgagaaaagtcaaaaggaaatatagcagaattcatcacacaggaattcatcaaagcagtttcatcatgagaaaaatgagttagttacagaattcaagaggctaacatgtgaccttgtatgctttccattaaaatgtaaatggtgaagttatgattaaactacaaagcaaataaaaatatgtaaatgacaaattaatgacagtaagtgtggaaataaacctaacactaatatcgatcataaaatcataattatgttcttttgtaatttaagtaaaatgtccccaaattattgagctaaaactttcaaatttgttttatttgaaggttggctttctgtttgtttttgagacaaagatgaatgcccaagtctcaaaattcctattgataatattaccaaaacttgtatccttctgggaaaatttcagagataaagatcctttaaaagaaataacagagaagttgatgaaatatgcttaagccagatgcttctggctagaagagacagaattaagggggaaaaaaaccacaatgatgtgtgattttttttttttaagtgatgaaagactgaccagtagaaggtggtgaagatgaagaatagtggaactggcaagtaagaactgttcagacaagcattcattgtgtaatatccataaacaaaactataatccaaaggacttccattttagtatgttctgatgatgtactctagactgtcacctcctctggcttacagaataatccagaactttccatagacattaatcttgcttaacaaaggctgtttacctattatacacacacatttttaagggaaatatatgtatatagctttatctatacacacacatatacatacgtgtatatatagatttatacaaatgtataaataaacataatacttttcaatctttccattgacagggcaagttcacattcagcaaagtgccaccacatcccatatacacatatctgtacagatatacacataagggtctgttttcaccccttccaaccgggaagaattttttcctagcaaatccccattaaccagcaactgaagggagaaatggcaccagtacaaactccccctcctttccatttgccatgccatatgtacaagaaatatgccagatcctaaaaacaaaatccccaaaacaagagtgaatgaaaccaggagatgctgcaaaaatacaactgtagaaaagaacagcatatagagctttcctagatcttcactatatctaagatgaagtaaatgatgctcaagagacaactacaaattcaggtatattatcagaagttgctttgacatatttcaaagtacatgattttttaagtattaaaaataaatgtcattggaacatttaataccaactctacttttgactatttc

SEQ ID NO: 152147 - DNA, 2056 bp, Homo sapiens
tagcggggaacgctgggaaactcccggcctccgccaccatcttgctttcctttaatccggcagtgaccgtgtgtcagaacaatcttgaatcatgaagcatactaacccagagcccggctctttctcgagattttattccctcaaagttgcccccaaagttaaagccacagctgcgccttgcaggagcaccgccacaacctcaggaccttgagtttaccaagttaccaaatggcttggtgattgcttctttggaaaactattctcctgtatcaagaattggtttgttcattaaagcaggcagtagatatgaggacttcagcaatttagggaaccacccatttgctgcgtctttacatccagtcttgacggacaaaaggagcttcatcttttcaagataaccccgtgggaattggaaggcagttgggtgggcaaattaagtgttgaccgcaacaaggggaaaacatgggcttatactggtgggaatgcctgccggggtgatgttgatattcctaatgggagttcctgctcattgttcaccacaggcaccagaatttcgttcgttggggaagtaggtgaaccttcagcctcagcttaaagattgacaaagctgtgggcctttcagaatcccgcagactcatggccattggaaatttgcatgcagcagctttaccgggaatgccttggctaatcccttgtattgtcctgactataggattggaaaagtgacagtcagaggagttacattacttcgttcagaaccatttcacaagtgcaagaatggctttgattgggacttggtgtgagtcatcctgttctaaagcaagttgctggaacagtttctcaacatgagggggtggggttggtttatctgggtggcaaagggccaactaccgtggaggtgaaatccgagaacagaatggagacagtcttgtccatgctgccttttgtagcaaaaagtgctgtcgcgggaagtgcaaagccaaatgcatttagtgttcttcagcatggtcctcggtgctggggccaccatgtcaagaggggcagcaacaaccaccagcccatctgcaccagggctgtttcccaggcaactcagcagcccatttgatgtttctgcatttaatgccaggtactcaggatctgggactctttgggatttaatactatctcccaaggccaccagctggctggagattgtatcaagggctgccctataatcaagtaaaaccaataaggtccaagaaacccttttttccaacccaaggtgtgtcagctgcccaagaacaaaggctgaaaagctgggatacccctaatggtccagtggaagtccttcctgaagtgttcccccggaagaaagtccgggtcccccggcctcctagttgcctggttccttacatgcccacccatcccacagtcccttccagccagatggattccagtggcttaatgcttgatatcataaatggcgggcaaagaagtttgttttctgggccagaagttcaatgggcagcaagtttggaaaatttggggacattacacctttttgtttgatggagttgtaattactggatggcacacattaccaggagagagctgaacgttctctcagcccagagcagcaaaccacatgaaagtcagaaagtctctaatataatcatttgtcttttttcccagtaagggtaaaataagggcataatgccaggtaaattattccccagctgacctaaaagtcaataaaacattctggtttaagtggttttcctacgtttttccccatgaggttaatcaacaagtatttattatgtgctgatatcttggttttaagatgccttaaaggagacagggatataattattgagtatagaagcatccagaaactattaaaattaaggctaagtggctatcggggtaaatagtgccagattactattggtggcgtttaagatgaaagcaagttcaaaatttgtcattttgggtgtcaacagctaaatggtctggtttttacccctgttttgcctttttttgcaataacattatttccaaaaaacataaaaaaaaa

SEQ ID NO: 152148 - DNA, 420 bp, Homo sapiens
ggcctttgagctgctgactttcagctggaacttgaagggaccccaaccctgagacactatggccctgacctcagacctggggaaacagataaaactgaaagaggtggaggggaccctcctgcagcctgcaactgtggacaactggagccagatccagagcttcgaggccaaaccagatgatctcctcatctgcacctaccctaaagcagcctcagggacaacgtggattcaggaaattgtggatatgattgaacagaatggggacgtggagaagtgccagcgagccatcatccaacaccgccatcctttcattgagtgggctcggccaccccaaccttctgtgcttgtactacgcagatgtttcctcttgagctattttaaaggtgtggaaaaagccaaagcaatgccctctccacggat

SEQ ID NO: 152149 - DNA, 1263 bp, Homo sapiens
atggccctgacctcagacctggggaaacagataaaactgaaagaggtggaggggaccctcctgcagcctgcaactgtggacaactggagccagatccagagcttcgaggccaaaccagatgatctcctcatctgcacctaccctaaagcagggacaacgtggattcaggaaattgtggatatgattgaacagaatggggacgtggagaagtgccagcgagccatcatccaacaccgccatcctttcattgagtgggctcggccaccccaaccttctgcccctctggctcctctggctttcgaagaagagaaaatggtcactagttattgtcccatggaagaaaccaatgcagatgatataacaacaagcatggagggctactggcagggtgaggggaacatggccaatgaaccgttcctggagctagtgggcttgggaatgggccctgcagcctgggctgtgtcatgcacactctccacgctgtgcttctccaccctgagtctgagcaaccatcgtggtattcctggcggaatctgcaggtgtgtgattaacaggaaagatcttcataatgttcaggccaccatgtctccagcagtgaaagtacttggagagacccttgaagaatgtttcctcttgagctattttaaaggtgtggaaaaagccaaagcaatgccctctccacggatactaaagactcacctttccactcagctgctgccaccgtctttctgggaaaacaactgcaagttcctttatgtagctcgaaatgccaaagactgtatggtttcctactaccatttccaaaggatgaaccacatgcttcctgaccctggtacctgggaagagtattttgaaaccttcatcaatggaaaagtggtttggggttcctggtttgaccacgtgaaaggatggtgggagatgaaagacagacaccagattctcttcctcttctatgaggacataaagagggacccaaagcatgaaattcggaaggtgatgcagttcatgggaaagaaggtggatgaaacagtgctagataaaattgtccaggagacgtcatttgagaaaatgaaagaaaatcccatgacaaatcgttctacagtttccaaatctatcttggaccagtcaatttcctccttcatgagaaaaggaactgtgggggattggaaaaaccacttcactgttgcccagaatgagaggtttgatgaaatctatagaagaaagatggaaggaacctccataaacttctgcatggaactctga

SEQ ID NO: 152150 - DNA, 2905 bp, Homo sapiens
ccaggaaagatgtgaaaaactctagctggtgaccgagaggaggagtagagtgtgcccttagttcatatgaactagagggagttggtatttgcacagcagtcagggtcacatgagtgatcatggtacagtgagaagttctccctcccagggccaggtcacagggtttgtttctgttcaatccggattcttccagtaaaagcttcaacttcccacactgaagctgagagcctcccaaagtgctggctacctgctgagcgcccccgtaactctgacacagtagtaatttgagcctctgcaattgccgtctgcttcctgtgaaagtcctttccgtgcccactgacccttgagtgggcctttgagctgctgactttcagctggaacttgaagggaccccaaccctgagacactatggccctgacctcagacctggggaaacagataaaacttgaaagagggtggaggggacccttctgcagcctgcaactgtggacaactggagccagatccagagcttcgaggccaaaccagatgatctcctcatctgcacctaccctaaagcagggacaacgtggattcaggaaattgtggatatgattgaacagaatggggacgtggagaagtgccagcgaagccatcatccaacaccgccaatcctttcatttgagtgggctcggccaccccaaccttctggtgtggaaaaagccaaagcaatgccctctccacggatactaaagacttcacctttccacttcagctggctgccaccgtctttctggggaaaacaactgcaagtttcctttatgttagcttcggaaattgccaaagactggtatggtttcctaatgaccattttccaaaggatgaaccacatgcttccctgaccctgttacctggaaagagtatttttgaaaccttcatcaatggaaaaagtgttttggggttcctggttttgaccacgtgaaaggaatggtggggagatgaaagacagacaccagatttctcttccttttctatgaggacataaagagggaccccaaggcatgaaattcgaaaaggtgatgcagttcatgggaaagaaggtggagtaaacagtgctagataaaattgtccaggagacctcatttgagaaaattaaagaaaatcccatgacaaatcgttctacagtttccaaattctatcttggacccagtcaattttccctcccttcatgagaaaaggaactgtggggggattgggaaaacccacttcactgttgccccagaatgagaggtttgatgaaatcctatagaagaaagatggaagggaacctcccataaacttctgcatggaactctgagcaagatgtaaataaaatttaaaaggtggatggcaagagtgcaaatactatcttcaatccttcagtcccagccagaagaatctctgaaagcatattgtgaatgtatacaatgtagtacaaacaatctctgtgatgattaacagtatgtcaccacttcattttttaaaaaaaggatcacgtctaatgcccattttcccaactattctttccaaagtaagatataaggtagcttaataaactaagtaaaacgtatgacttgagtacaataggattgttttaatccccattattctggaaagtgcatcctagtctcccagtctataacatcataataccttgaggtataagtccaaatattaggttatatctaatttaaaaacaaaatttctgtcatctgtcctggccattcaggcaactccagcctggggcttcaatcctgggagttctgtctggtcactatcagaaggaacactttgaggggaaaccctggtgcagccagccctgagggaaacatgggcctgagtgccctcactgggtgggtgggaataaaatggaagtgcacagaggagatgtcagaagaccaaaacttggtgaatagtcccagtgctaggtcatataggaaacagaaagcatgacagtggccttttgggaacccaagttacgtcctggtgaaagcagaaaggaggagacaggatggctgtcaacaacgtcagcatgggcatggctcccaggcatggaggtaattgggtcttggcttcaatgccacccttttgggaagccctaaaccaagtgaggtgttcttttcccttgcttcccatatttgtcccagttgcagccctgttgttatgtatttactcttcaatttcttatttatacctctcacttcaattgttgaatttctttggggtttcagttcttcatgccatatttgactcctagtacctaatgcagtgcctggcacacagcaagtgcccccttgaagaacttgtagaggggagtaaaaaaagtgccatgggataaatgactgcagcaaatccacaaattttgaactttgaccccttttcttttagtccccaaatagtggcattcccatagctgagggtagtaggagcagttcacccctgggagcagacaataagaggaagaatgaagccaactaaaattctgaatgctttttgttggatttccgtagggtattttttttaaaaatagggtcttgccaatgttgcccaggctggtcttaactgactgctttttaattattaccatgcactggcaattccaaacaatgtcagtggttaaaatgcttctccctgaaaaagagaaaaaaaaaaggaaaaaaagaaaagaaaagtgaaaagaaaaactcttaattggcctaagttctaaataatagaataggaaccactgagttttaactatatgtatatgagcttcaaataagcacctttttattatgtaaataaataaaagttatctgtatccccactgcattgtaaaatttttgttgttttgtttcatgtcttattcacctttgtatggaaattaattcagaaaccccaagcatag

SEQ ID NO: 152151 - DNA, 833 bp, Homo sapiens; identical to SEQ ID NO: 145489
  misc_feature (1)...(833): n = a,t,c or g

SEQ ID NO: 152152 - DNA, 1712 bp, Homo sapiens
  misc_feature (1)...(1712): n = a,t,c or g
gctagtgcgttacttacctcgactcttagcttgtcggggacggtaaccgggacccggtgtctgctcctgtcgccttcgcctcctaatccctagccactatgcgtgagtgcatctccatccacgttggccaggctggtgtccagattggcaatgcctgctgggagctctactgcctggaacacggcatccagcccgatggccagatgcccaagtgacaagaccattggggggaggagatgactccttcaacaccttcttcagtgagacgggcgctggcaagcacgtgccccgggctgtgtttgtagacttggaacccacagtcattgatgaagttcgcactggcacctaccgccagctcttccaccctgagcagctcatcacaggcaaggaagatgctgccaataactatgcccgagggaacttacaccattggcaaggagatcattgaccttgtgttggaccgaattcgcaagctggctgaccagtgcaccggtcttcagggcttcttggttttccacagctttggtgggggaactggttctgggttcacctccctgctcatggaacgtctctcagttgattattgcaagaaatccaaggctggagttctccatttacccgggcaccccaggtttgcacagctgtagttgaaccctacaactacattctcaccgaccacaccacccctggagcactctgattgtgccttcatggtagacaatgaggccatctatgacatctgtcgtagaaacctcgatatcgagcgcccaacctacactaaccttaaccgccttattagccagattgtgtcctccatcactgcttccctgagatttgatggagccctgaattttacccttacgaatttcgggaccaaactggttcctttccccccgaatcccacttcccttctgcccaataatgccccctgttcattttgcttgagaaaggcctcccatgaacagcttttctgtaagcagagatcacccaaatgctttgctttgagcccagcccaaccagattggtgaaatggtgaccctcgcccatgggtaaaatcatggccttgctgccttgttgctaccggtggtgacgtggttcccaaaagatgtcaaatgctgcccattgcccacccatcaaaacccaagcgcagccatccagtttgtggattggtgccccactggcttcaaggtttggcatcaactaccagcctccccactgtggtgcctggtggaaacctggcccaaggttaccagagaagctgtgtgcatgctgagcaaacaccacagcccatttgctgaggcctgggctcgccctggacccacaagttttgacctgatgttatgccaagcgtgcccttttgttcactggtacctgggtgcaggggatggaggaaggcgagttttcagagggccgtgaaagatagggctgcccctttagaaaggattatgagaaggtttggtgtggattctgttgaaggagagggtgaggaagaaggaaaaggaatactaattatccattccctttttgggnccctgcagcatgtcatgctcccagaatttcagcttcagcttaactgacagatgttaaagctttctggttagattgttttcacttggtgatcatgtcttttccatgtgtacctgtaatatttttccatcatatctcaaagtaaagtcattaacatcaaaaaaaaaaaaaaaaaagggcggccg

SEQ ID NO: 152153 - DNA, 1781 bp, Homo sapiens
  misc_feature (1)...(1781): n = a,t,c or g
gctggagctcaaggatccttaattaaatttatcccccccccccgaggttctcttacatcgaccgcctaagagtcgcgctgtaagaagcaacaacctctcctcttcgtctccgccatcagctcggcagtcgcgaagcagcaaccatgcgtgagtgcatctccatccacgttggccaggctggtgtccagattggcaatgcctgctgggagctctactgcctggaacacggcatccagcccgatggccagatgccaagtgaccaaaaccattgggggaaggagatgattccttcaacaccttcttcagtgagacgggggctggcaagcatgtgccccgggcagtgtttgtagacttggaacccacagtcattgatgaagttcgcactggcacctaccgccagctcttccaccctgagcaacttatcacaggcaaagaagatgctgccaataactatgcccgagggcactacaccattggcaaggagatcattgacctcgtgttggaccgaattcgcaagctggcccgaccagtgcacggggtctccagggcttcttggttttccacagccttggtgggggaaactgggttctggttccacctcccccctgccttcaacttgggggggggggggnggggaaacgtctctcagttgattatgggcaagaagtcccaagctgggagttctctatttacccgggcgcccccaggtttccacagcctgtagttgagccctacaacttccatcctaccaacccaacacccaccctgggagcactctgattgtgcccttcatgggtagacaatgaggccatctatgacatctgtcgtagaaacctcgatattgagcgtccaacctatactaacctgaataggttaataggtcaaattgtgtcctccatcactgcttccctgagatttgatggagccctgaatgttgacctgacagaattccagaccaacctggtcccctatccccgcatccacttccctctgggccacattatgccccctgtcatttttgctgaagaaagcctaccatgaaccagctttcctgtagcagagatcacaaatgctttgctttgagccagccaacccagatgggtgaaatgtgaccctcgccctggttaaatacatgctttgctgccctgttgtacccgtggtgacgtggttccccaaagaatttcatttctgccattgcccaccatcaaaacccaagcctaaccatccattttttggattggtcacccactgacttcaagttggtcatcaactaccagcctcccactgtggtgcctggtggagcacctgaccaaggtacagagagctgtgtgcatgttgagcaacacccacagccattgctgaggcctgggctcgcctggaccacaagtttgacctgatgtatgccaaacgtgcctttgttcactggtacgttggggaggggatggaggaaggtgagttttcagaggcccgtgaggacatggctgcccttgagaaggattatgaggaggttggtgtggattctgttgaaggagagggtgaggaagaaggagaggaatactaaaggttaaaacgtcacaaaggtgctgcttttacagggaagcttattctgttttaaacattgaaaatgttgtggtctgatcagttaatttgtatgtagcagtgtatcgctctcatatacaattagctgacctatgctctaaaacatgaatgcctttgttacagacccaagctgtccatttctgtgatgggttttgaataaagtatttccctgtcttaaatga

SEQ ID NO: 152154 - DNA, 655 bp, Homo sapiens
  misc_feature (1)...(655): n = a,t,c or g
ttaataaatatttgctagtattattccaaagaatgttcatgacattttcgacattcaaacactataaaaggtaaatcatttttattgccacaaattgataaattgttgtgaaaaaaagagaaactggcacacatgaaataacacaaacataagaagaatataagacccaaaatagatttgaattaaggtctcccaggctggattgcagtggggcgatctcagctcactgcaacctctgcctcccaggttcaaggcaattctcatgcctcaagcctcgaagtaggctgggattacaggcatgcaccaccatgcctgggataatttttgtattttatttagtaggagatgggggttttgccatgttggccagggctggccttngtaactcttgacccaagtgatctgcccgccctggcctccccaaagtgctggggattatagggtgtcagcctgtgcccctggcctaaactctgactttttgaaaagggtttcttaaactttatttttaaacaatcaaccaataagtatttcactgtgcacctattagtatgtctaacacaatgctaagtaaggggaattatgagaagattataagcttatcacgtgatcttgtctttaaatagtttataacctagctacctatgattatgaagac

SEQ ID NO: 152155 - DNA, 454 bp, Homo sapiens
ggcaccactgtgaatattctcctctgaaccactagagggcaggccaggcaggccaggcggggcccgtgcagcttgtggccaagaaggagctggcaaggaccggcgctgctggagactgacccagccctctggctgaggacatgcagcggctcctaaatgtagagaatttggccacaaccaaattgatgctggctggaaccagaggccagaaagcctggccttgtccccatgtgggagccctgtcctcagccctcttgtccccttgagctcagtgaattcccaccaggtgcccacagctcctggacttcaaattctatatattgagagagttggagagtatatcagagatatttttggaaaggagttggtctatgcaatgtcagtttggaatcttcttgaaagtttaatgtttttattaggagatttaaagaaaataaaggtctacaatatcaaa

SEQ ID NO: 152156 - DNA, 3133 bp, Homo sapiens
gtgcgggatcggaattccatttttcagatgggaaaagtgaggctcagagaaaggaatctggaacgatgaaggtgatgattgtgcctgtggccaagaccgggagaaccctggatccctacaccttccccacccctggaatgtcactatacatatctgacttcttctgatgttgcctttgaccctaaagtcaatatgataaagtaacaagaagctgggacagaggaacaaacacagcccactcaagcagtggtggcaacattctgttagaaaggaggggagtcaaagaaaaaaacacccctccgcccatctccttatcacctccctaaagacagaggagaacatggacaccctccatcctgatagacatgccatgtggtcagtttgtgcggtaaacaggaaaaaaaaaaaacctaaagatattgtagacctttattttacttttaaatctcctaatattatctttataactttcaagaaggattccaaactgacattgcatagaccaactcctttccaaaaatatctctgatatactctccaactctctcaatatatagaatttgaagtccaggagctgttgggcacctggtggggaattcactgagactcaaggggacaagagggctgaaggacaggggctccccacatgggggacaaagggccaggcgtttctgggcctcctgggttccaggccagcatcaaatttggttgtggccaaaattctcagtccaatcaccctgggcccagggcctgggcgtggggaggatgtgggcaggctctgtctccttctggggttcctggtctggagggagtctccccaacacgcgccaaaggctggctgttttccgcccaaagccccagaaactttgaatgagaggcaaatctaccctgaatgcacctccctcataggctgggtgagagtcacgcagacacagaagggcaggacagaactccccatcttctgggggccaattcgtctggacacttgtgcggtcagcttcctttttaaagtgccagtatcggtggggcaggaagggacttctcaggggctgagcagagccttctccagcgcgagcaaacactctgttcccgcctcggcaggcaccttctaacattcattttctaagggttaggtgagtaaaacaacaacaacaaatgctggaaatgctctgttcccaatgccagggagttccaagaccaagaagcccaactctcaccagcgggggcagatggggagctagggaaggaaccctcccagcctggggagggcacctgcacccctcccagagagagaagcccccatcccggccccccagctgggccccagcgctgctggaaccagccggcaggtggggcagaaaagcagcacctcccctcaccagggcgaggaggcaatattgaaccgtgaactcaagaagaaagacggaaagaaaaaatgaaaaaagctacagggctaagtaaacaccagcctgctgggtttatacaaaatgagtgaaatttaaaaggggcaggagagtttgtccacgggactggctggcagccagaacccaccttcaagcaaattacaaggacttgggggaaagtgctgagagcagaggctttagtagggggcagggccagactgctccccactgggaaagcacaccccttaaaggagcccttcccccttgcccagaacgggggatgcttccagaggaaggctgaggcttttctggtaaggaagccagcttcggaccaggccagccacagtccacctgcctctctggcatccgccccagcctgggtagctgacccctggggcagtaaaggactttgcttgctccaaccttcctgcaggaaaaccaactgtttaggacaccaggcctgggcagagggcacggtcggtgctcagacctttctcagcacgggtctcagacctgagctggagctaactggaggaagaggcagcacccgttcccgccgggctgctggaccctgggcctctgactgcacagcaggcagtgaccaggagtccttgggaaggagctcagggaaggggaggtgaggggccagtgggactgtgctgggggtgagcatgtgcaaagtgcaggctgcaaggcagcgggaggacatttgccggggggaggcaggggtctcgatctggagtgtgggtggggtctgaggtcatggctcccaggaagaggccgccagcaggtcccccaggacacaaggaagggacagctgaagcagtaagcagtcagacagtcacaggtggcaggattccggaggcggtctggccccaccaccaccagggcaagggaacaacggagcaagagccctgctgctaagacgtgaccaaagccagtgctcctggagtgagtggggacacaggtagagaggccccctccagccacaggcatctcctaacatttaaggagctgctgcatgtcccttcagccagagggctgggtcaagtctccagcagcgccggtccttgccagctccttcttgcccacaagctgcacgggcccgcctggcctgcctggcctgccctctagtggttcagaggagaatattcacagtggtgcctgggccttggtgggccaggagggtcccagcatggatgggaggggcaatggaatgatgctacggggagtgtggactggagtgcatggaggaggcatggatgagatgtggcgcagaggtgatctgaaggggaaagttcctcatggaatgatacaggtctggactccagagaaagcaggactcttctccagcccggactcctgctcctcaatggctttcaatcacaactggctcgtagaccccagaagagaccctggtggcaagctggatgccgctcagcgtggcagagccatcgcggctcacgaacagccggaggttgctgtcctcggtgttgctgccatctgtgaagtcctggctctgcacgatcttctccacgatggcatccgcatcgatccgcgtgtcgtccacccaggtcgggtggctctccaccgagtccttcttccgcctgaaagagcgatcggacagatgcaggggccggggtggccgcggcggcttctccgggggccggtgctcccgctcactgccctcagggccctccacggtcatgccaaggcccccagaggcgctg

SEQ ID NO: 152157 - DNA, 2796 bp, Homo sapiens
aacaaaagtttccagactgaagcccagaagggaatcctgcaaatcgtgatactgataatcctccactcaggcccctttttctaccagccacttcagtagggtctcaggtgcaaagggattctgcagagggagtgagggcaggctcatatgcaacactgtgattagaaaagatgtaaggcacctgagctaagttgtcagcacaccccccaaagccaagggacctgttagaaatccgggactccttgatccagatctgaagtttcatccattaatgtgtcacttgaattgaggctttagaattcttgaaaatcggtgttccttactcagcagacacactcccacccacacccacagccacacatacattggggccctcaagcctgaggtgccatccagccttatgtagggtcatggtacagatcagatccatggcacacgattacaataggaagaagtgaaaagttgtttttattgtttatatattaatccaagcaggcatctgatggacctgtggaattagaaataccagcagacatttccaaggggtaggtgcacaaggtcaacagaacttaaactacagtgatcttcccttagatccttttctactcgaggtgaaatagctcaaaagacaaggatgccttgtagtccagggctaacccctgtagcctcctacggcaattaacacaggaaggaaaggccttcctcccttccaggcactggggctcaacaggtggactgagtgtttgggtagtgtaccatttcccaatcctaaataagaagcaaagcccagacttctgcctttgaatgaactgaagcctacaggggacagggagtgggtcccaagggttcttcaaattctgtttttgtttttttcccaaaacttcctaatactattgtctgccctagggttgtaggggaatgctgggttaggtttgcttgaacagacactgtgtttccagcaagggtttgtggtaatcttcaaaatccccaggtctcagcccaaaagctttgccagttcaccctgactcccagggaacagggcctcctttcgaggtcgaggcacttgggttcttcgcccttgcttcttcccagtgagaactgtttcctcctacttctacaagcattgcacttgcccagctgagagcactgactcaggcggggcaacccctcacccaagtaaaccagggggcattcagcatgcccctctgggttcttgaccccagagagaggggggacttgaaaattaaaccctcttttttgctcttgtggggctgggcccacttgggctttcaacatgaggcgctttgggctttgggctgtgccttcattgaggagaggggaggggagagagaggcttttctggggccagagatgttttcttggggagggtttgcccacccttgtccttgaacccatcaattttggccaggggaaccacaggggtgtaaggtggaagacactgcgggaaggccccacgtgaaaagtggccagccttagctcctactttccaaaaagagaaaccagtggttccagtgacccctgaagccattcctgtgtgccaggagggagctccccctggaacagccaagtccatccactgccctcctgaaatacacacaaaggaggcctgccctgtccccgggaaagaagaaaacgttccagggaagagaaagatctggtcaaagaaaagggacagacagggtagagcccaggaatcaagaatccagggtagtgaagagattccctaacacctgccccccaggcagttctatactttaggtctagatgttaaacagagaccccccttcctccctcaaaaaaaaaatggagtgcaaggggcaacaaacactgtggcagagaagccttcctaagtttttaactcaatttccaaggagaaactgggaactaattaatggaatggacctaaatatctaagtttattttaattaagactcccaataactcacttcagtaaccttcctcaaagcccctggcaacgtgttctcagatcccttcctatgtgaagttcgctcttagaagctgcctatagatcctgtccctcagcctctccatctcatgtccagcagtggagaggaaattggcatcccaactaattcctcctctccttcagagttttttccaaacatccctctttgggaagggaaatactctaatagtttaacgttctaagcaatgtatatatgtatatatattttatttttgacccgacttcacctccttaaatccttccctttttttggatgtttggaaatgccacagccatcttattactatgaggggaagaaccaatatcctgaagatggcagagcagaaagaggaaagaactgtaatgagcagctcatggaatactcaaaattccatgagctcccgtttttaccaattctggaaacacccaacttcaagacttcttgatatatgaactaagaaatctccttgttattaaagaaaaaaagaaaagaaaacccttccccagcagagaccacttttactacaaacttaaaatgtcttttctttatcctcggcctcaactatatgttgcggcattgaattagcattgccaaaccccgcagccactttttaccccgagccaggagagaaaggaagcatgctatgtggtggggcttgaagtcctcattaggtaggcagctgtatgtttgatcatggcgagaggttcctcttgcttcgcttccctcatccttgccttcatacatgctaactctctcccccgacaatttacctgctttagaagctttgtgtcaaatgaagttgcttttc

SEQ ID NO: 152158 - DNA, 788 bp, Homo sapiens
ggcacgagcccacgctcatccagtcttccttgtgaccggcagtccactgtgcgcaacgctgcagccatacagagggacaactcgaagttagaactagcaccttggtcttgttggaataagcagatctgagtagagccagctgcagtcttatggttgtttagcagaagttattcttcttagcagagaatattatacggtcattttccagaactgtaaaaactctatcatttgttttaaaccagatgatgtgcttcatttctgtctttgacgtcttcagtttcttctcccctggctttacctcctttgttatcagtttgtgctttggttttgctgccaaccttataggcttaggtttggcggcaaaggcactagactctggtgccttcttttccttcgttgtcttaagcccttcttttcctctgccctcatgccctcaccacttcactcttttgaaggtcataatgaacacaaggtcagagatcccttttttggcgccaagcaccctgggcttttttgagatggagtctcactgtgtcacccaggcagtggcgcgaatctgcccactgcagcctccatctccctggttgaagcaattttcctgtctcggcctcctgagtagctgggactacaggtgcaagccacgacaactggctaatttttctgtttttagtagagacggggtttcaccatgctgatcagggtggtctcaaattctgacctcaaataatccacccacttgggcttccaaagtggttagggttacagtgtgagccctgcggctggctttc

SEQ ID NO: 152159 - DNA, 1030 bp, Homo sapiens
tgaacagccatgccaacatacgtttgtttattaattattatataaactactaccattagctgggagacattcctggagccccattcctccagcccccttatgcctctataagcacaaaattccctctagtaaatatctttctgcttaaaatacctagactggtgctggacacggtggcttaatgcctgtaatccctagccattttgggaggccgtggcgggcagatcacctgaggtcaggagttcgagaccagcctggccaacatgggtgaaaccctgtctctactaaaaatacaaaaattggctgggcgtgatggcgggcacctgtaatcccaggctacttaggaagggctgaggcagggagaatcgcttgaacccgggagggcagagggagccagacggtgccactacattccagccgggggcgacagagtgagactctgtctcaaaaaaaaaaaattaaattaaattaaaaaataaaatatctagactgatttctatttcctgccctgaaacacagcagaacagaagcaaagagatttgggagacaaagggactagaccacagcagatgctgtttgtacatgacaatccaacctggctcctccttctgagttctgcgcacatggattgggtggtgaccgaggtggaaaggcttatctttgagaatcaattatttactctttaaatgtttcctaggcccttctgggccagggtcaaagccctataaagatgaacctgacagaatccatgccttgctatgtcaaaagaggaagatgtacaaaaaaacaaacaaccacagtacatttctaaaagggccagaaaagagaaatgacaaagtcatgacagctcagtagccttgaaagaaacaaaaatccacattggtgatactttccctgggcaatgtttatgtctatttctagatgaacttccaggttcaagcctcaagttaaatcacttacttcccaccctccccattctaactcttaaccaacctcatcgttaatcagacaaatcctaactacaacccct

SEQ ID NO: 152160 - DNA, 1164 bp, Homo sapiens
atgtcttcttttgagaagtgtctgttcatgtcctttgcccactttttgatggatgcagaaaaggcctttgacaaaattcaacaacccttcatgctagaaaccctcaataaattaggtattgatgggacgtatttcaaaataataagagctatctatgacaaacccacagccaatatcatgctgaatgggcaaaaactggaagcattccctttgaaaactggcacaagacagggatgccctctctcaccactcctattcaacatagtgttggaagttctggccagggcaattaggcaggagaaggaaataaagggtattcaattaggaaaagaggaagtcaaattgtccctgtttgcagacgacatgattgtatatctagaaaaccccattgtctcagcccaaaatctccttaggctgataagcaacttcagcaaagtctcaggatacaaaatcaatgtacaaaaatcacaagcattcttatacaccaataacagacaaacagagagccaaattatgaatgaactcccactcacaattgcttcaaagagaataaaatacctaggaatccaacttacaagggatgtgaaggacctcttcaaggagaactacaaaccactgctcaaggaaataaaagaggatacaaacaaatggaagaacattccatgctcatgggtaggaagaatcaatatcgtgaaaatggccatactgcccaaggtaatttacagattcaatgccatccccatcaagctaccaatgcctttcttcacagaattggaaaaaactactttaaagttcatatggaaccaaaaaagagcccacatcgccaagtcaatcctaagccaaaagaacaaagctggaggcatcacgctacctgacttcaaactatactataaggctacagtaaccaaaacagcatggtactggtaccaaaacagagatatagatcaatggaacagaacaaaggacatgaacagacacttctcaaaagaagacattcatgcagccaaaaaacacatgaaaaaatgctcatcatcactggccatcagagaaatggacatcaaaaccactatgagatatcatctcacaccagttagaatggcaatcattaaaaagtcaggaaacaacaggtgctggagaggatgtggagaaataggaacactttga

SEQ ID NO: 152161 - DNA, 1380 bp, Homo sapiens; identical to SEQ ID NO: 128874

SEQ ID NO: 152162 - DNA, 938 bp, Homo sapiens
atgattatctcaatagatgcagaaaaagcctttgacaaaattcaacaacccttcatgctaaaaactctcaataaattaggtattgatgggacgtatttcaaaataataagagctatctatgacaaacccacagccaatatcatactgaatgggcaaaaactggaagcattccctttgaaaactggcacaagacagggatgccctctctcactctgcacttcctttcattgccaactggggagagcttcagaaaggaggaacataagcattgggatgcacgaggagactttctaaagacacagaataaacaatgcaattatccaatagcaggttctaaaacatgggtaaaaagaagagagaatgacagttttggaaactggatatactctgtattcagcaattgccttgtaatagacttcaagagtgagaaaaaagaatcccttaataatagtttctgcaaatgtgtgaaagctgagtgtgaggagaaaaagttgttttcaggaactaggagctggttcacctttaaaaagaaaatcagctgcctctggcaaaatggaattgcagcattgtcctggatggtaatttgcactagtaaatttatcaccaacctggcaggggagatgctgaagacaaaagcttttatctctcaccttgatccttggggatgccaattttatttgctggttctgctaccggtggagggtgtccaggttctcggtgtcttgaacataaattggacaaaacgtacaaagaaagaaagaatgaagcaactaaagcagagatttattgaaatcagaaacatactccacaagtttgtacttgacctcatctgtaagcctactgttgagcagaaaaacatgtaccagttaccaatgccaggtgaagattccaactatctggaggatagacaaggtcatcataatgccagccacctgtaa

SEQ ID NO: 152163 - DNA, 1183 bp, Homo sapiens
atgaagctgaaaaggaacaatgagatgtctggcaaagccctggaccctagagaaggtttttgtgatgcctcttatgaaatacaaactaccatcagagaatactataaacacctctatgcaaataaactagaaaatctggaagaaatggatacattcctcgacacatacactctcccaagactaaaccaggaagaagttgaatctctgaatagaccaataacaggagctgaaattgtggcaataatcaacagtttaccaaccaaaaagagtccaggaccagatggattcacagccgaattctaccagaggtacaaggaggaactggtaccattccttctgaaactattccaatcaatagaaaaagagggaatcctccctaactcattttatgaggccagcatcatcctgataccaaagccgggcagagacacaaccaaaaaagagaattttagaccaatatccttgatgaacactgatgcaaaaatcctcaataaaatactggcaaaccgaatccagcagcacatcaaaaagcttatccaccatgatcaagtgggcttcatccctgggatgcaaggctggttcaatatacgcaaatcaataaatgtaatccagcatataaacagagccaaagacaaaaaccacctgattatctcaatagatgcagaaaaagcctttgacaaaattcaacaacccttcatgctaaaaactctcaataaattaggtattgatgggacgtatttcaaaataataagacagacacttctcaaaagaagacatttatgcagccaaaaaacacatgaaaaaatgctcattatcactggccatcagagaaatgcaaatcaaaaccacaatgagataccatctcacaccagttagaatggcaatcattaagaagtcaggaaacaacaggtgctggagaggatgtggagaaataggaacacttttacactgttgctgggactgtaaactagttcaaccattgtggaagtcagtgtggcgattcctcagggatctagaactagaaataccatttgacccagccatcccattactgggtgtatacccaaaggactataaatcttgctgctataaagacacatgcacacatgtttattgtggcattattcacaatagcaaagacttggaaccaacccaaatgtccaacaatgatagactggattaa

SEQ ID NO: 152164 - DNA, 1392 bp, Homo sapiens; identical to SEQ ID NO: 117941

SEQ ID NO: 152165 - DNA, 432 bp, Homo sapiens
atgagtgaactcccattcacaattgcttcaaagagaataaaatacctaggaatccaacttacaagggatgtgaaggacctcttcaaggagaactacaaaccactgctcaaggaaataaaagaggatacaaacaaatggaagaacattccatgcccatgggtaggaagaatcaatatcgtgaaaatggccatactgcccaaggtggctaccattaccgtgctcactttacaggtgaggttcagagatttatgtaacatgccaaaggtcacacagctggacacagcagaaccaagattcaaatctgcacagctgagtgttctacatgtttatgtcgtatggcccctgaaagaattcgtatttgaagctctgggtaagtggttaggaaaggaccagctgcaggcaacaatgcgagtgtgccttatttcctcaact

SEQ ID NO: 152166 - DNA, 452 bp, Homo sapiens
atgagtgaactcccattcacaattgcttcaaagagaataaaatacctaggaatccaacttacaagggatgtgaaggacctcttcaaggagaactacaaaccactgctcaaggaaataaaagaggatacaaagaaatggaagaacattccatgctcatgggtaggaagaatcaatatcgtgaaaatggccatactgcccaagataatttacagattcagtgccatccccatcaagctaccaatgactttcttcacagaattggaaaaaactactttaaagttcatatggaaccaaaaaagagcctgcatcgccaagtcaatcctaagccaaaagaacaaagctggaggcatcacactacctgacttcaaactataccacaaggctacagtaaccaaaacagcatggtactggtaggcattaccttttcaaaaaagattccttcatttaattag

SEQ ID NO: 152167 - DNA, 1404 bp, Homo sapiens
atggggcaacatgacaagcagcagtacttggaggtgcaaagcaacaagataatagccatctggatttctgatgatcatgaagacatcatatctgaactggggtgtctgcatatccctgagaggcaaaaaatgtctatattgtttccgtccagcgcgacttccgggtgggcgcgggctcagcgcgacttccgggtgggcgcgggctcggcgcgccccgcactcttgagcggtcggctggcgccgccggccctgggcagtgagaggcttagcacccgggccagcagctgcggagggctcccgcgcgccaccccgaggggacgggcgccacctcctgctacgcggcacccggtcccgtcaaccgcccaacggctgaggagtgcggcagcgcgccagagactggcgggcagctccgcccgcggccgggatgcactaggcaaagccagctgggctcctgagtccgtgttggaagttctggccagggcagtcaggcaagagaaagaaataaagggcattctattaggaaaagaggaagtcaaattgtccctgtttgcaggtgatatgattgtatatttagaaaaccccatcatctcagcccaaaatctccttaacaaaatcaatgtacaaaaatcacaagcattcttatacaccagcaacagacaaacagagagccaaatcctgagtgaactcccattcacaattgcttcaaagagaataaaatacctaggaatccaacttacaagggatgtgaaggacctcttcaaggagaactacaaaccactgctcaaggaaataaaagaggatacaaacaaatggaagaacattccatgctcatgggtaggaagaatcaatatcgtgaaaatggccatactgcccaaggtaatttacagattcaatgccatccccatcaagctaccaatgcctttcttcacagaattggaaaaaactactttaaagttcatacggaaccaaaaaagagcccgcatcgccaagtcaatcctaatccaaaagaacaaagctggaggcatcacactacctgacttcaaactatactacaaggctacagtaaccaaaacagcatggtactggtaccaaaacagagatatagatcaatggaacacaacagagccctcaaaaataatgccgcatatctacaactatctgatctttgacgaacctgagaaaaacaagcaatggggaaaggattccctatttaataaatggtactgggaaaactggctagccatatgtagaaagctgaaactggatcccttccttacaccttttacaaaaatcaattcaagatggattaaagacttaaatgttagacctaaaaccataaaaaccctagaagaaaacctaggcattaccattcaggacataggcatgggcaaggacttcatgtaa

SEQ ID NO: 152168 - DNA, 510 bp, Homo sapiens
atgttggaagttctggcctgggcagttaggcaggagaaggaaataaagggtattcaactaggaaaagaggaagtcaaattgtccctgtagctgatgagcaacttcagcaaagtctcaggttacaaaatcagtgtgcaaaaatcacatgcatttgtatacaccaataacagacaatcagagagccaaatcatgagtgaactcccattcacagttgctacaaagagaataaaatacctaggaatccaacttacaagggatgtgaaggacctctttaaggaaaactacaaaccactgctcaacgaaatacaagaggacacaaacaaatggaagaacattccatgctcatgggtaggaagaatcaatatcgtgaaaatggccatactgcccaaggtaatttatagattcaatgccatccccatcaagctaccaatgactttcttcacagaattggaaaaaactaaagttcatatggaatcaaaaaaagagcccatattgccaagacaatcctaa

SEQ ID NO: 152169 - DNA, 2055 bp, Homo sapiens
atgattatctcaataggtgcagaaaaagcctttgacaaagttcaacaacccttcatgctaaaaactctcaataaattaggtattgatgggacgtatttcaaaataataagagctatctatgacaaacccacagccaatatcatactgaatgggcaaaaactggaagcattccctttgaaaactggcacaagacagggatgccctctctcaccactcctattcaacatagtgttggaagttctggccagggcaatcaggcaggagaaggaaataaagggtattcaattaggaaaagaggaagtcaaattgtccctgtttgcagacgacatgattgtttatctagaaaaccccatcgtctcagcccaaaatctccttaagctgataagcaacttcagcaaagtctcaggatacaaaatcaatgtacaaaaatcacaagcattcctatacaccaacaacagacaaacagagagccaaatcatgagtgaactcccattcacaattgcttcaaagagaataaaatacctaggaatccaacttacaagggatgtgaaggacctcttcaaggagaactacaaaccactgctcaaggaaataaaagaggatacaaacaaatggaagaacattccatgctcatgggtaggaagaatcaatatcgtgaaaatggccatactgcccaaggtaatttacagattcaatgccatccccatcaagctaccaatgactttcttcacagaattggaaaaaactactttaaagttcatatggaaccaaaaaagagcccgcatcgccaagtcaatcctaagccaaaagagcaaagctggaggcatcacactacctgacttcaaacttgcagacaacatgactgtatatctggaaaaccccatcgtctcagcccaaaatctccttaagctgataagcaacttcagcaaagtctcaggatacaaagtcagtggacaaaaatcacaagcattattatacaccaataacagacaaacagagagccaaatcatgagtgaactcccattcacaattgcttcaaagagaataaaatacctaggaatccaccttacaagggatgtgaaggacctcttcaaggagaactacaaaccactgctcaaggaaataaaaaaggatacaaacaaatggaagaacattccatgctcatgggtaggaagaatcaatatcgtgaaaatggccatactgcccaaggacatcatccaggagaacttccccaatctagcaaggcaggccaacattcagattcaggaaatacggaaaacaccacaaagatattcctcgagaagagcaactccaagacacataattgtcagattcaccaaagttgaaatgaaggaaaaaatgttaagggccgccagagagaaagcatcacaccacacctattccaaaattgaccccatacttggaagtaaacctctcctcagcaaatgtaaaagaacagaaattataacaaactatctctcagaccacagtgcaatcaaactagaattcaggattaagaatctcactcaaaactgctcaactacgtggaaaccaaacaacctgctcctgaacgactactgggtacataacgaaatgaaggcagaaataaagatgttctttgaaaccaacgagaacaaagacacaacataccagaatctctgggacacattcaaagcagtgtgtagagggaaatttatagcaacaaatgcccataagaggaagcaggaaagatccaaagttgacaccctaacatcacagttaaaagaactagaaaagcaagagcaaacacattcaaaagctagcagaaggcaagaaataactaaaatcagagcagaactgaaggaaatagagacacagaaaacccttcaaaaaattaatgaatccaggagctggttttttgaaaggatcaacaaacttgacagacctctagcaagactagtaaagaaaaaaagagagaagaatcaaatagatgcaataaaaaatgataaaggggatatcaccaccaatcccacagaaatacaaactaccatcagagattattacaaacacctctag

SEQ ID NO: 152170 - DNA, 762 bp, Homo sapiens
atgaacattgatgcaaaaatcctcaataaaatactggcaaaacaaatccagcagcacatcaaaaagcttatccaccatgatcaagtgggcttcatccctgggatgcaaggctggttcaatatacgcaaatcaataaatgtaatccagcatataaacagaaccgaagacaaaaaccacatgattatctcaatagatgcagaaaaggcctttgataaaattcaacaacccttcatgctaaaacctctcaataaattaggtatcgatgggacgtatttcaaaataattagagctatctatgacaaatccacacccaatatcatactgaatgggcaaaaactggagctgatgagcaacttcagcaaagtctcaggttacaaaatcagtgtgcaaaaatcacatgcatttgtatacaccaataacagacaatcagagagccaaatcatgagtgaactcccattcacagttgctacaaagagaataaaatacctaggaatccaacttacaagggatgtgaaggacctctttaaggaaaactacaaaccactgctcaacgaaatacaagaggacacaaacaaatggaagaacattccatgctcatgggtaggaagaatcaatatcgtgaaaatggccatactgcccaaggtaatttatagattcaatgccatccccatcaagctaccaatgactttcttcacagaattggaaaaaactaaagttcatatggaatcaaaaaaagagcccatattgccaagacaatcctaa

SEQ ID NO: 152171 - DNA, 1150 bp, Homo sapiens
gccactgccacctcacttccaacaagctcagagaacttctctggagaagccttatgttctctgaaacctttacctaaacagcttcccaagagactcatcaggaaagttcagcatgaaaatggccaagagctctctaaagtcctcagaccctaccctatcattggtgtaagggtctggggtaaaggcttgagaaatccacaagattttgccaatctgaattcaacaaactgtctatatggctacaccttccaacagaaacccagaaatgcccctttcccttggaagcatataaacagagccaaagacaaaaaccacatgattatctcaatagatgcagaaaaagcctttgacaaaattcaacaacccttcatgctaaaaactctcaataaattaggtattgatgggacgtatttcaaaataataagagctatctatgacaaacccacagccaatatcatactgaatgggcaaaaactggaagcattccctttgaaaactggcacaagacagggatgccttctctcaccactcctattcaacatagtgttggaagttctggccagggcaattagacaggagaaggaaataaagggtattcacttaggaaaagaggaagtcaaattgtccctgtttgcagacgacatgattgtatatctagaaaaccccatcatctcagcccaaaatctccttaagctgataagcaacttcagcaaagtctcaggatacaaaatcaatgtacaaaaatcacaagcattcttatacaccaacgacagacaaacagagagccaaatcatgagtgaactcccattcacaattgcttcaaagagaataaaatacctaggaatccaagttacaagggatgtgaagcacctcttcaaggagaactacaaaccactgctcaaggaaataaaagaggatacaaacaaatggaagaacattccatgctcatgggtaggaagaatcaatatcatgaaaatggccatactgcccaaggtaatttacggattcaatgccatccccatctcatttaattggtatggagtacagccagggcactaacattgttaaaagctcccctgatgattctaagatgtttgctgttacagcattaaggacgtgggcagcagctgtcaatcctggcacactatga

SEQ ID NO: 152172 - DNA, 1383 bp, Homo sapiens
atgggagactttaacaccccactatcaacattagacagatcaacgagacagaaagtcaacaaggatacccaggaattgaactcagctctgcaccaagcggacctaatagacatctacagaactctccaccccaaatcaacagaatatacatttttttcagcaccacaccacacctattccaaaattgaccacatagttggaagtaaagctctcctcagcaaatgtaaaagaacagaaattataacaaactatctctcagaccacagtgcaatcaaactagaactcaggattaagaatctcactcaaaaccgctcaactacgtggaaactgaacaacctgctcctgaatgactactgggtacataacgaaatgaaggcagaaataaagatgttctttgaaaccaacgagaacaaagacacaacataccagaatctctgggacgcattcaaagcaataattgaatctctgatattccataacagagctgaaattgtggcaataatcgatagtttaccaaccaaaaagagtccaggaccagatggattcacagctgacttctaccagaggtacaaggaggaactggtaccattccttctgaaactattccaatcaatagaaaaagagggaatcctccctaactcattttatgaggccagcatcattctgataccaaagccgggcagagacacaaccaaaaaagagaattttagaccaatatccttgataaacattgatgcaaaaatcctcaataaaatactggcaaaacgaatccagcagcacatcaaaaagcttatccaccatgatcaagtgggcttcatccctgggatgcaaggctggttcaatatacgcaaatcaataaatgtaatccagcatataaacagagccaaagacaaaaaccacatgattatctcaatagatgcagaaaaagcctttgacaaaattcaacaacccttcatgctaaaaactctcaataaattagcccaaaatctccttaagctgataagcaacttcagcaaagtctcaggatacaaaatcaatgtacaaaattcacaagcattcttatacaccaacaacagacaaacagagagccaaatcatgagtgaactcccattcacaattgcttcaaagaaaataaaatacctaggaatccaacttacaagggatgtgaaggacctcttcaaggagaactacaaaccactgctcaaggaaataaaagaggatacaaacaaatggaagaacattccatgctcatgggtaggaagaatcaatatcgtgaaaatggccatactgcccaaggctatgctgtgtctggatgtggcctatcccacagatgacacaaggtggtacaaactttatacccagaaatggacccactttagctag

SEQ ID NO: 152173 - DNA, 937 bp, Homo sapiens
atggatacattcctcaacacatacactctcccaagactaaaccaggaagaagttgaatctctgaatagaccaataacaggatctgaaattgtggcaataatcaatagcttaccaagcaaaaagagtccaggaccagatggattcacagccaaattctaccagaggtacaaggaggaactggtaccattccttctgaaactattccaatcaatagaaaaagagggaatcctccctaactcattttatgagggcagcatcattttgataccaaagccaggcagagacccaccaaaaaaagagaattttagaccaacatccttgatgaacattgatgctaaaatcctcaataaaattctggcaacccgaatccagcaacacatcaaaaagcttatccaccatgatcaagtgggcatcatccctgggatgcaaggctggttcaatatacccaaatcaataaatgtaatccagcatataaacagagccaaagacaaaaaccacatgattatctcaatagatgcagaaaaggcctttgacaaaattcaacaacccttcatgctaaaaacactcaataaattaggtattgatgggacgtatttcaaaataataagagctatttatgacaaacccacagccaatatcatactgaatgggcaaaaactggaagcattccctttgaaaactggcacaagacagggatgccctctctcaccactcctattcaacatagtggtggaagttctggccagggcaattaggcaggagaagaaaataaagggtattcaattaagaaaagaggaagtcaaattgtccctgtttgcagacgacatgattgtatatctagaaaaccccattgtctcagcctgaagactgtgtggtgataagatcacagcgcaagtgccatgttcctcttgacatctctctaaagagacatgtgtag

SEQ ID NO: 152174 - DNA, 1554 bp, Homo sapiens
gccactgccacctcacttccaacaagctcagagaacttctctggagaagccttatgttctctgaaacctttacctaaacagcttcccaagagactcatcaggaaagttcagcatgaaaatggccaagagctctctaaagtcctcagaccctaccctatcattggtgtaagggtctggggtaaaggcttgagaaatccacaagattttgccaatctgaattcaacaaactgtctatatggctacaccttccaacagaaacccagaaatgcccctttcccttggaagcatataaacagagccaaagacaaaaaccacatgattatctcaatagatgcagaaaaagcctttgacaaaattcaacaacccttcatgctaaaaactctcaataaattaggtattgatgggacgtatttcaaaataataagagctatctatgacaaacccacagccaatatcatactgaatgggcaaaaactggaagcattccctttgaaaactggcacaagacagggatgccttctctcaccactcctattcaacatagtgttggaagttctggccagggcaattagacaggagaaggaaataaagggtattcacttaggaaaagaggaagtcaaattgtccctgtttgcagacgacatgattgtatatctagaaaaccccatcatctcagcccaaaatctccttaagctgataagcaacttcagcaaagtctcaggatacaaaatcaatgtacaaaaatcacaagcattcttatacaccaacgacagacaaacagagagccaaatcatgagtgaactcccattcacaattgcttcaaagagaataaaatacctaggaatccaagttacaagggatgtgaagcacctcttcaaggagaactacaaaccactgctcaaggaaataaaagaggatacaaacaaatggaagaacattccatgctcatgggtaggaagaatcaatatcatgaaaatggccatactgcccaaggtaatttacggattcaatgccatccccatccaaaatctccttaagctgataagcaacttcagcaaagtctcaggatacaaaatcaatgtacaaaaatcacaagcatttttatacaccaacaacagacaaacagagagccaaatcatgagtgaactcccattcacaattgcttcaaagagaataaaatacctaggaatccaccttacaagggatgtgaaggacctcttcaaggagaactacaaaccactgctcaaggaaataaaagaggatacaaacaaatggaagaacattccatgctcatgggtaggaagaatcaatattgtgaaaatggccatactgcccaaggtaatttacagattcaatgccatccccatcaagctaacaatgactttcttcacagaattggaaaaatctactttaaagttcatatggaaccaaaaaggagcccgcatcgccaagtcaatcctaagccaaaagaacaaagctggaggcatcacactacctgacttcaaactatactacaaggctacagtaaccaaaacagcatggtactggtactaa

SEQ ID NO: 152175 - DNA, 3545 bp, Homo sapiens
atggatacattcctcaacacatacactctcccaagactaaaccaggaagaagttgaatctctgaatagaccaataacaggatctgaaattgtggcaataatcaatagcttaccaagcaaaaagagtccaggaccagatggattcacagccaaattctaccagaggtacaaggaggaactggtaccattccttctgaaactattccaatcaatagaaaaagagggaatcctccctaactcattttatgagggcagcatcattttgataccaaagccaggcagagacccaccaaaaaaagagaattttagaccaacatccttgatgaacattgatgctaaaatcctcaataaaattctggcaacccgaatccagcaacacatcaaaaagcttatccaccatgatcaagtgggcatcatccctgggatgcaaggctggttcaatatacccaaatcaataaatgtaatccagcatataaacagagccaaagacaaaaaccacatgattatctcaatagatgcagaaaaggcctttgacaaaattcaacaacccttcatgctaaaaacactcaataaattaggtattgatgggacgtatttcaaaataataagagctatttatgacaaacccacagccaatatcatactgaatgggcaaaaactggaagcattccctttgaaaactggcacaagacagggatgccctctctcaccactcctattcaacatagtggtggaagttctggccagggcaattaggcaggagaagaaaataaagggtattcaattaagaaaagaggaagtcaaattgtccctgtttgcagacgacatgattgtatatctagaaaaccccattgtctcagcgccagctgcttttctgcaaagtctgtggagcagtactatggctggaacattggaaaaaggagagccgctgagtggcaaagagcaatgacaatgcgaaaagtcttacaagaaatcctggagaagaatccgagatttcaccacctgactcccctcaaaaccaagcacatcgctcactggtgccgctgtcatggctacaccccaccggaccctgagagcctgaggaatgacggggactccatcgaggacgtgctgacccagatcgacagcgagcccgaccatgggtctcttggagacggaaagtcctcttccgttggccccacagctgttgtaacactgcttgcctgtcatttagagtgcccatcatcattctcctctgctgacaacctctgccgcaaactggaggacctgcaacagttccagaaaagggaacccgagaatgaggaggaggtggacatcctcagcctctccgagccagtgaagataaacatcaagaaggagcaggaagagaaacaagaggaagtcaagttctacctgccaccaaccccagggtctgaatttattggggatgtcacacagaagggaggtatgcttgtttggagagaggctgtttctaaagcagcgatacgaacaaacggctttcttctgcttttccagattgggatcaccctgcagcccgtggcactccacaggaacgtgtatgcgtccgtggtggaggacatgatcctgaaggctacagaacagctggtgaatgatatcctgagacaggctttggcagttggataccagacagcttctcacaacaggtattactatctctgcagtctgtggtgtgaggcttacacctctttcctaacagttgaattgcccatgaaggtgttttatacttacatcaatccagtaggagatggaggatcaaagacatgtgatacaatggtttttaatcatcctgctatcaagaaatttttggaatcaccatctaggtcatcatctcctgccaatcagagagcagaaacaccatcagccaatcattcagaaagtgattctttatctcagcacaatgacttcttatctgacaaagataataacagcaatatggatatagaggaaagactctcaaacaacatggagcagagaccaagccgaaatactggaagggatacttctagaattactggctcccataaaacagaacagcggaatgctgatctcacagatgagacttcacgactttttgtaaagaaaacaatagtagtgggcaatgtgtccaagtatatacctccggataagagggaagaaaatgaccagtcaactcataagtggatggtatatgtccgagggtcccgtagagaacccagcattaatcattttgtcaagaaggtttggttcttccttcatcctagctataaaccaaatgaccttgtggaagttaggtacaagatagtggtgactagatatgtgctaggctcagggcgtgataaagggactgtgaagatgagcacggggccttggctttgggaaaccaaaaaggtcttcctgcccttgagaataaaatacctaggaatccaacttacaagggatgtgaaggacctcttcaaggagaactacaaaccactgctcaaggaaataaaagaggatacaaacaaatggaagaacattccatgctcatgggtaggaagaatcaatatcgtgaaaatggccatactgcccaagactgagaggggtgaggaagcttcagaggaaaagtatgaagctagcagatgttggttcgtgaggtttaaggaaggatgccgtctccataacatacagttgcaaggtgaagcagcaagtgctgatggagaagctgcagcaagttatccagaagatccagctaagatcattgatgaaggtggctacaccaaacaacatattttcactgtatatgttgtcggtggctatgatgggcaaaacagacttagcagcgtagaatgttatgattccttttcaaatcgatggactgaagttgctccccttaaggaagccgtgagttctcctgcagtgactagctgtgtaggcaaactgtttgtgattggtggaggacctgatgataatacttgttctgataaggttcaatcttatgatccagaaaccaattcttggctacttcgtgcagctatcccaattgccaaaaggtgtataacagctgtatccctaaacaacctgatctatgttgccggtggactgaccaaggcaatatactgttacgatccagttgaagattactggatgcacgtacagaatacattcagccgtcagagaggagagcttggtgtttttgtggtgccaagtgcaggattcccagctagcactgaagctgaacgacacactccgttttatgctttgccatcttcattggaaagaacacccaccaaaatgactacatcccagaaagttaccttttgttcccatggcaattcagctttccagccaatagcatcaagctgcaaaattgttccacaaagtcaggttcctaatcctgagtcacctggaaaatccttccagcccatcaccatgagctgcaagattgtgtcagttcttctaagcagtgttatgtttaacaaaaggaagtttatcactgttgattggcaaagctgtcacaaggcaaaaacaaagctcattcatacggaaatgaatggaggagataaatga

SEQ ID NO: 152176 - DNA, 889 bp, Homo sapiens
atgtgggaactgccagctgctgaagccatagcagtcccctgttcactctcgctaatacctgtccctaaaaatccatacacactattggagaaacagcaccttatagtggacagtgattcagagcatattcagccatgtagagaatcttgcccatgcctcctgaggtactgccacctagctgcttaaaagggatgtgaaggacctcttcaaggagaactacataccactgctcaacgaaataaaagaggatacaaacaaatggaagaacattccatgctcatgggtaggaagaatcaatatcgtgaaaatggccatactgcccaaggtaatttatagattcaatgccatctccatcaagctaccaatgactttcttcacagaattggaaaaaactactttaaagttcacatggaaccaaaaaagagcccacattgccaagacaatcctaagccaaaagaacaaagctggaggcatcatgctacctgacttcaaactatactacaaggctacagtaacccaaacagcatggtactggtaccaaaacagagatatagaccaatggaacagaacagagccctcagaaataataccacacatctacaaccatctgatttttgacaaacctgacaaaaacaagaaatggggaaaggattccctatttaataaatggtgctgggaaaactggctagccatatgtagaaagttgaaactgaatcccttccttacaccttatacaaaaattaattcaagaaggattaaagacttaaatgttagacctaaaaccataaaaaccctagaagaaaacctaggcaataccattcaggacataggcatgggcaaggacttcatgtcattactaaatgacatgtcatttaccgaatgtaaatga

SEQ ID NO: 152177 - DNA, 1077 bp, Homo sapiens
atggataaattcctggacacatacactctcccgagactaaaccaggaagaagttgaatctctgaataggccaataacaggagctgaaattgtggcaataatcaatagcttatggaacagaacagagccctcaaaaataatgccacatatctacaactatctgatctttgacaaacctgacaaaaacaggaaatggggaaaggattcgctatttaataaatggtgctgggaaaactggctagccatatatagaaagctgaaactggatcccttccttacaccttatacaaaaattaattcaagatggattaaagacttaaatattagatctaaaaccataaaaaccctagaagaaaacctaggcaatactattcaggacataggcatggggaaggacttcatgtctaaaacaccaaaaccaatggcaacaaaagccaaaattgacaaatgggatctaattaaactaaagagcttctgcacagcaaaagaaactcacagctcatggaggcctgcctgcctctgtaggctccacctctgggggcagcgcacaggcaaacaaaaggacagcagtaacctctgcagacttaaatgtccctgtctgacagctttgaagagagcagtggttctcccagcatgcagctggagatctgagaaggggcagactgcctcctcaaaacaaagctggacggagaatgactttgacgagctgagagaagaaggcttcagacgatcaaattactccgagctacgggaggacattcaaaccaaaggcaaagaagttgaaaactttgaaaaaaatttagaagaatgtataactagaataaccaatacagagaagtgcttaaaggagctgatggagctgaaaaccaaggctcgagaactacgtgaagaatgcagaagcctcaggagccgatgcgatgaattggaagaaagggtatcagcgatggaagatgaaatgaatgaaatgaagcgagaagggaagtttagagaaaaaagaataaaaagaaacgagcaaagcctccaagaaatatgggactatgtgaaaagaccaaatctacgtctgattggtgtaccttaa

SEQ ID NO: 152178 - DNA, 1170 bp, Homo sapiens
atggatacattcctcgacacatacactctccaaagactaaaccaggaagaagttgaatctctgaatagaccaataacaggctctgaaattgtggcaataatcaatagtttaccaaccaaaaagagtccaggaccagatggattcacagccgaattctaccagaggtacatggaggaactggtaccattccttctaaaactattccaatcaatagaaaaagaggggatcctccctaactcattttatgaggccagcatcattctgataccaaagctgggcagagacacaaccaaaaaagagaattttagaccaatatccttgatgaacattgatgcaaaaatcctcaataaaatactggcaaagcgaatccagcagcacatcaaaaagcttatccaccatgatcaagtgggcttcatccctgggatgcaaggctggttcaatatatgcaaatcaataaatgtaatccagcatataaacagagccaaagacaaaaaccacatgattatctcaatagatgcagaaaaagcctttgacaaaattcaacaacgcttcatgctaaaaactctcaataaattaggtattgatgggacgtatttcaaatggaagaacattccatgctcatggataggaagaatcaatattgtgaaaatggccatactgcacaaagcactttatagattcaatgccatccccatcaagctaccaatgactttcttcacagaattggaaaaaactactttaaagttcatatggaaccaaaaaagagcctgcattgccaagtcaatcctaagccaaaagaacaaagctggaggcatcacgctacctgacttcaaactacactacaaggctacagtaaccaaaacagcatgggggccctatgatagagcattgactttggaatcagacagacctgatgtgtgctgtgctaccttccaggtatgtgaccctgcaagactcttcaattctatgaaagatgagataagtgaagaagctacagaagaaaagtttgcagctggcagacttggttcagggtttaaggaaagatgtctccataacataaaagggcaaggagaagctacaagagctggtatagaagctgaagcaagttttacagaagatctagctaagataactgatgaacgtggcacactaaacagattttcaatttag

SEQ ID NO: 152179 - DNA, 1401 bp, Homo sapiens
atgagtgaactcccattcacaattgcttcaaagagaataaaatacctaggaatccaacttacaagggatgtgaaggacctcttcaaggagaactacaaaccactgctcaaggaaataaaagaggatacaaacaaatggaagaacattccatgctcatgggtaggaagaatcaatatcgtgaaaatggccataatgcccaaggtaatttacagattcaatgccatccccatcaagctaccaatgcctttcttcacagaattggaaaaaactactttaaagttcatatggaaccaaaaaagagcccgcatcgccaaggcaatcctaagccaaaagaacaaagctggaggcatcacactacctgacttcaaactatactacaaggctacagtaaccaaaacagcatggtactggtaccaaaacagagatatagatcaatggaacagaacagagccctcaaaaataacgccgcatatctacaactatctgatctttgacagacctgagaaaaacaagcaatggggaaaggattccctatttaataaatggtgctgggaaaactggctagccatatgtagaaagctgaaactggatcccttccttacaccttatacaaaaattaattcaagatggattaaagacttaaatgttagatctaaaaccataaaaaccctagaagaaaacctaggcaataccattcaggacacaggcatgggcaaggacttcatgtccaaaacaccaacagcaatggcaacaaaagacaaaattgacaaatgggatctaattaaactaaagagcttctgcacagcaaaagaaactaccatcagagtgaacaggcaacctacaaaatgggagaaaatttttgcaacctactcatctgacaaagggctaatatccagaatctacaatgaactccaacaaatttacaagaaaaaaacaaacaaccccatcaaaaagtgggcgagggacatgaacagacacttctcaaaagaagacatttatgcagccaaaaaacacatgaaaaaatgctcattatcactggccatcagagaaatgcaaatcaaaaccacaatgagataccatctcacaccagttagaatggcaatcattaagaagtcaggaaacaacaggtgctggagaggatgtggagaaataggaacacttttacactgttgctgggactgtaaactagttcaaccattgtggaagtcagtgtggcgattcctcagggatctagaactagaaataccatttgacccagccatcccattactgggtgtatacccaaaggactataaatcttgctgctataaagacacatgcacacatgtttattgtggcattattcacaatagcaaagacttggaaccaacccaaatgtccaacaatgatagactggattaa

SEQ ID NO: 152180 - DNA, 1413 bp, Homo sapiens
atgagtgaactcccattcacaattgcttcaaagagaataaaatacctaggaatccaacttacaagggacgtgaaggacctcttcaaggagaactacaaaccactgctcaaggaaataaaagaggatacaaacaaatggaagaacattccatgctcatgggtaggaagaatcaatatcgtgaaaatggccatactgcccaaggtaatttacagattcaatgccatccccatcaagctaccaatgcctttcttcacagaattggaaaaaactactttaaagttcatatggaaccaaaaaagagcccgcattgccaagtcaatcctaagccaaaagaataaagctggaggcatcacactacctgacttcaaactatactacaaggctacagtaaccaaaacagcatggtattggtaccaaaacagagatatagatcaatggaacagaacagagccctcagaaataacgccgcatatctacaactatctgatctttgacaaacctgagaaaaacaagcaatggggaaaggattccctatttaataaatggtgctgggaaaactggctagccatatgtagaaagctgaaactggatcccttccttacaccttatacaaaaatcaattcaagatggattaaagacttaaacgttagacctaaaaccataaaaaccctagaagaaaacctaggcaataccattcaggacataggcatgggcaaggacttcatgtctaaaacaccaaaagcaatggcaacagaagacaaaattgacaaattggatctaattaaactaaagagcttctgtacagcaaaagaaactaccatcagagtgaacaggcaacctacaaaatgggagaaaatttttgcaacctactcatctgacaaagggctaatatccagaatctacaatgaactcaaagaaatttacaagaaaaaaacaaacaaccccatcaaaaagtgggcaaaggacatgaacagacacttctcaaaagaagacatttatgcagccaaaaaacacatgaaaaaatgctcatcatcactggccatcagagaaatgcaaatcaaaaccacaatgagataccatctcacaccagttagaatggcaatcattaaaaactcaggaaacaacagctgcctgagaaacacattcagatctgtgcccagcgactcggcagtcattgcacaaggcacaggaacacaccctcggggagacacacctagtcacaaagcaggggtcctggttgtggggatgtccttccctgaagagccggtcctacaagacagaagtgatgacttttctttagctcatggcagtaaacaggggaactctgtcctttgtgttggacagtggaagacacagggcccttgttccaggaacgagcagtatcggcccatcacaggccccggttcacactga

SEQ ID NO: 152181 - DNA, 2249 bp, Homo sapiens
atggatacattcctcgacacatacactctcccaagactaaaccaggaagaagttgaatctctgaatagaccaataacaggctctgaaattgtggcaataatcaatagtttaccaaccaaaaagagtccaggaccagatgggttcacagctgaattctaccagaggtacaaggaggaactggtaccattccttctgaaactattccaatcaatagaaaaagagggaatcctccctaactcattttatgaggccagcatcattctgataccaaagccgggcagagacacaaccaaaaaagagaattttagaccaatatccttgatgaacattgacgcaaaaatcctcaataaaatactggcaaaccaaatccagcagcacatcaaaaagcttatccaccatgatcaagtgggcttcatccctgggatgcaaggctggttcaatatacgcaaatcaataaatgtaatccagcatataaacagagccaaagacaaaaaccacatgattatctcaatagatgcagaaaaagcctttgacaaaattcaacaacgcttcatgctaaaaactctcattaaattaggtattgatgggacgtatttcaaaataataagagctatctatgacaaacccacagccaatatcatactgaatgggcaaaaactggaagcattccctttgaaaactggcacaagacagggatgccctctctcaccgctcctattcaacatagtgttggaagttctggccagggcaatcaggcaggagaaggaaataaagggtattcaattaggaaaagaggaagtcaaattgtccctgtttgcagacaacatgattgtttatctagaaaaccccatcgtctcagcccaaaatctccttaagctgataagcaacttcagcaaagtctcaggatacaaaatcaatgtacaaaaatcacaagcattcttatacaccaacaacagacaaacagagagccaaatcatgagtgaactcccattcacaattgcttcaaagagaataaaatacctaggaatccaacttacaagggatgtgaaggacctcttcacatctgtgatatcgcaggtgtgggtagggagtctcgacacatcattgatactgcagttgtgggtagggagtctcgacatatctgtgatattgcagttgtgggtagggagtctcgacacatctgtgatatcgcagttgtgggtaagaagtctggacacatctgtgatatcgcagttgtgggacattgccttcctgagccatgtgcctggaatgctcagttagaagtcacaggtttccttggccacactcatgcaaaggatgagctcccatggacttgggcagctccaaccttgtggctctgcagggtacagctctcatggctgctttcacagactggcattgaatgcctgtggctcttccagtgcacagtgcaagctgctggtggatctacctttctggggtctggacggtggccttcttctcacagctgcacgaggccattccccaggggcactctgtgtgagggttccaaccccacatttcccctccatgctgccctagtagagcttctccatgagggctctgaccctgcagcagacttctgcctggaaatcccagctgataagaacttcagcaaagtctcaggatacaaaatcaatgtgcaaaaatcacaagcattcttatacaccaataacagacaaacagagagccaaatcatgagtgaactcccattcacagttgcttcaaagagaataaaatacctaggaatccaacttacaagggacgtgaaggacctcttcaaggagaactacaaaccactgctcaatgaaataaaagagggtacaaacaaatggaagaacattccatgctcatgggtaggaagaatcaatatcgtgaaaatggccatactgcccaagagaaccaaaagaggccacgaccggtttgaggtgtcgctcacgacctgcattcagcgtttacccccgattatgatgcctcggctggcatttatcttcggcctcatggcgaatggcaaccagtacgggtgccggttccggtggtcagcatgccctgggaactgggataatgggcggcatgatatcggccattattctggctatttacttcgtgccgctgttctttgtgctggtgcgcggccgcttcccgttgaagccgcccccggaataagcaataaaaaatgcgcacatggcaatgtgtcgcctttttcaactttccgattaagaacctgctaa

SEQ ID NO: 152182 - DNA, 1575 bp, Homo sapiens
atgaacactgatgcaaaaatcctcaataaaatactggcaaaccgaatccagcagcacatcaaaaagcttatccaccatgatcaagtgggcttcatccctgggatgcaaggctggttcaatatacgcaaatcaataaatgtaatccagcatataaacagaaccaaagacaaaaaccacatgattgtctcaacagatgcagaaaagacctttgacaaaattcaacaacccttcatgctaaaaactctcaataaattaggtattgatgggacgtatctcaaaataataagagctatctatgacaaacccacagccaatatcatactgaatgggcaaaaactggaagcattccctctgaaaactggcacaagacagggatgccctctctcaccactccataaattcctcgacacatacactctcccaagactaaaccaggaagaagttgaatctctgagtagtccaataacaggatctgaaattgtggcaataatcagtagcttacgaacgaaaaagagtccaggaccagatggattcacagccgaattctaccagaggtataaggaggaactgaataaaatacctaggaatccaacttacaagggatgtgaaggacctcttcaaggagagctacaaaccactgctcaaggaaataaaagaggatacaaacaaatggaagaacattccatgctgatgggtaggaagaatcaatatcgtgaaaatggccatactgcccaagaattggaaaaaactactttaaagttcatatggaaccaaaaaagagcctgcatcgccaagtcaatcctaatccaaaagagcaaagctggaggcatcacactacctgacttcaaactatactacaaggctacagtaaccaaaacagcatggtactggtaccaaaacagagatatagatcaatggaacagcacagagccctcagaaataatgccgcatatctacaactatctgatctttgacaaacctgagaaaaacaagcaatggggaaaggattccctatttaataaatggtgctgggaaaactggctagccatatgtagaaagctgaaactggatcccttccttacaccttatacaaaaatcagttcaagatggattaaagacttaaacgttagacctaaaaccataaaaaccctagaagaaaacctaggcaataccattcaggacataggcatgggcaaggacttcatgtctaaaacaccaaaagcaatggcaacaaaagccaatattgacaaatgggatccaattaaactaaagagcttctgtacagcaaaagaaactaccatcagagtgaacaggcaacctacaaaatgggagaaaattttcgcaacctactcatctgacaaagggctaatatccagaatctacaatgaactcaaacaaatttacaagaaaaaaaacaaacaaccccatcaaaaaatgggcaaaggacatgaacagacactcctcaaaagaagacatttatgcagccaagaaacacatgaaaaagtgctcatcatcactggccatcagagaaatgcaaatcaaaaccacaatgagataccatctcacaccagttag

SEQ ID NO: 152183 - DNA, 4083 bp, Homo sapiens
atgaaagttaaagtactgtccctcctggtcccagctctgctggtagcaggcgcagcaaacgctgctgaagtttacaacaaagacggcaacaaattagatctgtacggtaaagtagacggcctgcactatttctctgacaacaaagatgtagatggcgaccagacctacatgcgtcttggcttcaaaggtgaaactcaggttactgaccagctgaccggttacggccagtgggaatatcagatccagggcaacagcgctgaaaacgaaaacaactcctggacccgtgtggcattcgcaagtctgaaattccaggatgtgggttctttcgactacggtcgtaactacggcgttgtttatgacgtaacttcctggaccgacgtactgccagaattcggtggtgacacctacggttctgacaacttcatgcagcagcgtggtaacggcttcgcgacctaccgggacactgacgtgttcggtctggtaccgactcgattgcatccggcccgcgtgtgctgtgctctacgcgaactgaaagacgcaggcgcagatcgtatctggtacatcgccgatgcgttccgtgcgggcctgtctgtggacggcgtcttcaacctgaccaacattgaccgctggttcctgcatataaacagagccaaagacaaaaaccacatgattatctcaatagatgcagaaaaagcctttgacaaaattcaacaacccttcatgctaaaaactctcaataaattaggtattgatgggacgtatttcagaataataagagctatctatgacaaacccacagccaatatcatactgaatgggcaaaaactggaagcattccctttgaaaactggcacaagacagggatgccctctctcaccgctcctattcaacatagtgttggaagttctggccagggcaatcaggcaggagaaggaaataaagggtattcaattaggaaaagaggaagtcaaattgtccctgtttgcagacgacatgattgtttatctagaaaaccccatcgtctcagcccaaaatctccttaaactgataagcgacttcagcaaagtctcaggatacaaaatcaatgtacaaaaatcacaaacattcttatacaccaataacagacaaacagagagccaaatcatgagtgaactcccattcacaattgcttcaaggagaataaaatacctaggaatccaacttacaagggatgtgaaggacctcttcaaggagaactacaaacctctgctcaaggaaataaaagaggatacaaacaaatggaagaacattccatgctcatgggtaggaagaatcaatatcgtgaaaatggccatactgcccaaggtattttatagattcaatgccatccccatcaagctaccaatgactttcttcacagccagctgcttttctgcaaagtctgtggagcagtactatggctggaacattggaaaaaggagagccgctgagtggcaaagagcaatgacaatgcgaaaagtcttacaagaaatcctggagaagaatccgagatttcaccacctgactcccctcaaaaccaagcacatcgctcactggtgccgctgtcatggctacaccccaccggaccctgagagcctgaggaatgacggggactccatcgaggacgtgctgacccagatcgacagcgagcccgaccatgggtctcttggagacggaaagtcctcttccgttggccccacagctgttgtaacactgcttgcctgtcatttagagtgcccatcatcattctcctctgctgacaacctctgccgcaaactggaggacctgcaacagttccagaaaagggaacccgagaatgaggaggaggtggacatcctcagcctctccgagccagtgaagataaacatcaagaaggagcaggaagagaaacaagaggaagtcaagttctacctgccaccaaccccagggtctgaatttattggggatgtcacacagaagggaggtatgcttgtttggagagaggctgtttctaaagcagcgatacgaacaaacggctttcttctgcttttccagattgggatcaccctgcagcccgtggcactccacaggaacgtgtatgcgtccgtggtggaggacatgatcctgaaggctacagaacagctggtgaatgatatcctgagacaggctttggcagttggataccagacagcttctcacaacaggtattactatctctgcagtctgtggtgtgaggcttacacctctttcctaacagttgaattgcccatgaaggtgttttatacttacatcaatccagtaggagatggaggatcaaagacatgtgatacaatggtttttaatcatcctgctatcaagaaatttttggaatcaccatctaggtcatcatctcctgccaatcagagagcagaaacaccatcagccaatcattcagaaagtgattctttatctcagcacaatgacttcttatctgacaaagataataacagcaatatggatatagaggaaagactctcaaacaacatggagcagagaccaagccgaaatactggaagggatacttctagaattactggctcccataaaacagaacagcggaatgctgatctcacagatgagacttcacgactttttgtaaagaaaacaatagtagtgggcaatgtgtccaagtatatacctccggataagagggaagaaaatgaccagtcaactcataagtggatggtatatgtccgagggtcccgtagagaacccagcattaatcattttgtcaagaaggtttggttcttccttcatcctagctataaaccaaatgaccttgtggaagttaggtacaagatagtggtgactagatatgtgctaggctcagggcgtgataaagggactgtgaagatgagcacggggccttggctttgggaaaccaaaaaggtcttcctgcccttgagaataaaatacctaggaatccaacttacaagggatgtgaaggacctcttcaaggagaactacaaaccactgctcaaggaaataaaagaggatacaaacaaatggaagaacattccatgctcatgggtaggaagaatcaatatcgtgaaaatggccatactgcccaagactgagaggggtgaggaagcttcagaggaaaagtatgaagctagcagatgttggttcgtgaggtttaaggaaggatgccgtctccataacatacagttgcaaggtgaagcagcaagtgctgatggagaagctgcagcaagttatccagaagatccagctaagatcattgatgaaggtggctacaccaaacaacatattttcactgtatatgttgtcggtggctatgatgggcaaaacagacttagcagcgtagaatgttatgattccttttcaaatcgatggactgaagttgctccccttaaggaagccgtgagttctcctgcagtgactagctgtgtaggcaaactgtttgtgattggtggaggacctgatgataatacttgttctgataaggttcaatcttatgatccagaaaccaattcttggctacttcgtgcagctatcccaattgccaaaaggtgtataacagctgtatccctaaacaacctgatctatgttgccggtggactgaccaaggcaatatactgttacgatccagttgaagattactggatgcacgtacagaatacattcagccgtcagagaggagagcttggtgtttttgtggtgccaagtgcaggattcccagctagcactgaagctgaacgacacactccgttttatgctttgccatcttcattggaaagaacacccaccaaaatgactacatcccagaaagttaccttttgttcccatggcaattcagctttccagccaatagcatcaagctgcaaaattgttccacaaagtcaggttcctaatcctgagtcacctggaaaatccttccagcccatcaccatgagctgcaagattgtgtcagttcttctaagcagtgttatgtttaacaaaaggaagtttatcactgttgattggcaaagctgtcacaaggcaaaaacaaagctcattcatacggaaatgaatggaggagataaatga

SEQ ID NO: 152184 - DNA, 3957 bp, Homo sapiens
atggataaattcctcgacacatacaccctcccaagactaaaccaggaagaagttgaatctctgaatagatcaataacaggctctgaaattgtagcaataatcaatagcttaccaaccaaaaaaagtccaggaccagatggattcacagccgaattctaccagaggtacaaggaggagctggtactattacttctgaaactattccagtcaatagaaaaagaagcaaccctccctaactcattttatgaggccagcatcatcctgataccaaagcctggcagagacacaacaaaaaaagagaattttagaccaatatccttgatgaacattgatgcaaaaatcctcagtaaaatactggcaaaccaaatccagcagcacatcaaaaagtttgtccaccatgatgaagtgggcttcatccccaggatgcaaggctggttcaatatacacaaatcaaaaaacgtaatccagtatataaacagaaccaaagacaaaaactacatgattatctcaatagatgcagaaaaggcctttgacaaaattcaacaactcttcatgctaaaaactctcagtaaattaggtattgatgggacgtatctcaaaataataagagctatctatgacaaacccacggtcaaaatcatactgaatgggcaaaaactggaagaattccctttgaaaactggcacaagacagggatgccctctctcaccactcctattcaacatagtgttggaagttctggccagggcaattaggcaggagaaggaaataaagggtattctattaggaaaagaggaagtcaaattgtccctgtttgcagatgacatgatcgtatatctagaaaaccccatcgtctcagcccaaaatctccttaagctgataagcaacttcagcaaagtctcaggatacaaaatcaatgtgcaaaaatcacaagcattcttatacaccaataacagacaaacagagagccaaatcatgagtgaactcccattcacaattgcttcaaagagaataaaatacctaggaatccaatttacaagggacgtgaaggacctcttcaaggagaactacaaaccactgctcaatgaaataaaagaggatacaaacaaatggaagaacattccatgctcatgggtaggaagaatcaatatcgtgaaaatggccatactgcccaagcctccgctgctgatacccaggcaaacagggtcgggagtggacctccagcaaactccaacagacctgcagctgagcgtcctgactgttagaaggaaaattaacaaacagaaaggacatccacaccaatacctcatctggacgtcaccatcatcaaagaccaaaggaaggcagctcctcgccagcaacagaacaacgaatggaaaggaaattagaccagaggattgaaaaggagaagtcagcagttgctgctggaggagaatctgatacacagcagagaataaaatacctaggaatccaacttacaagggatgtgaaggacctcttcaaggagaactacaaaccactgctcaaggaaataaaagaggatacaaacaaacggaagaacattccatgctcatgggtaggaagaatcaatatcgtgaaaatggccatactgcccaaggtaatttacagattcaatgccatccccatcaagctaccaatgactttcttcacagaattggaaaaaactactttaaagttcatatggaaccaaaaaagagcccgcatcgccaagtcaatcctaagccaaaagaacaaagctggaggcatcacactacctgacttcaaactatactacaaggctacagtaaccaaaacagcatggtactggtaccaaaacagagatatagatcaatggaacagaacagagccctcagaaataacgccgcatatctacaactatctgatctttgacaaacctgagaaaaacaagcaatggggaaaggattccctatttaataaatggacatgggaaaactggctagccatatgtagaaagctgaaactggatcccttccttacaccttatacaaaaatcaattcaagatggattaaagacttaaacgttagacctaaaaccacaaaaaccctagaagaaaacctaggcattaccattcaggacataggcatgggcaaggactccatgtctaaaacaccaaaagcaatggcaacaaaagacaaaattgacaaatgggatctaattaaactaaagagcttctgcacagcaaaagacactaccatcagagtgaacaggcaacctacaaaatgggagaaaattttcgcaacctactcatctgacaaagggctaatatccagaatctacaatgaactcaaacagatttacaagaaaaaaacaaacaaccccatcaaaaagtgggtgagggacatgaacagacacttctcaaaagaagacatttatgcagccaaaaaacacatgaaaaaaatgctcaccatcactggccatcagagaaacgcaaatcaaaaccacaatgagataccatctcacaccagttagaatggcaatcattaaaaagtcaggaaacaacagggacatagatgaaggtgtaaaccatcattctcagcaaactatcacaaggacagaaaaccagtcactgcatgttctcactcatacgtgggagttcaacaatgagaacacatggacacagggtggggaacatcacacgctggggcctgtcatgggatatgtctttatcagcagtgtgaaaatggaccaatacactaaattggtatcagaagagtggggtgttgctgaaaatcaagctaccaatgcctttcttcacagaattggaaaaaactactttaaagttcatatggaaccaaaaaagagcccgcattgccaagtcaatcctaagccaaaagaataaagctggaggcatcacactacctgacttcaaactatactacaaggctacagtaaccaaaacagcatggtattggtaccaaaacagagatatagatcaatggaacagaacagagccctcagaaataacgccgcatatctacaactatctgatctttgacaaacctgagaaaaacaagcaatggggaaaggattccctatttaataaatggtgctgggaaaactggctagccatatgtagaaagctgaaactggatcccttccttacaccttatacaaaaatcaattcaagatggattaaagacttaaacgttagacctaaaaccataaaaaccctagaagaaaacctaggcaataccattcaggacataggcatgggcaaggacttcatgtctaaaacaccaaaagcaatggcaacagaagacaaaattgacaaattggatctaattaaactaaagagcttctgtacagcaaaagaaactaccatcagagtgaacaggcaacctacaaaatgggagaaaatttttgcaacctactcatctgacaaagggctaatatccagaatctacaatgaactcaaagaaatttacaagaaaaaaacaaacaaccccatcaaaaagtgggcaaaggacatgaacagacacttctcaaaagaagacatttatgcagccaaaaaacacatgaaaaaatgctcatcatcactggccatcagagaaatgcaaatcaaaaccacaatgagataccatctcacaccagttagaatggcaatcattaaaaactcaggaaacaacagctgcctgagaaacacattcagatctgtgcccagcgactcggcagtcattgcacaaggcacaggaacacaccctcggggagacacacctagtcacaaagcaggggtcctggttgtggggatgtccttccctgaagagccggtcctacaagacagaagtgatgacttttctttagctcatggcagtaaacaggggaactctgtcctttgtgttggacagtggaagacacagggcccttgttccaggaacgagcagtatcggcccatcacaggccccggttcacactga

SEQ ID NO: 152185 - DNA, 6092 bp, Homo sapiens
atgattatctcagtagatgcagagaaggcctttgacaaaattcaacaacccttcatgctaaaaactctcaataaattaggtattgatgggatgtatttcaaaataataagagctatctatgacaaacccacagccaatatcatactgaatgggcaaaaactggaagcattccctttgaaaactggcacaagacaaggatgccctctctcaccactccttttcaacatagtgttggaagttctggccagggcaattaggcaggagaaggaaataaagggtattcacttaggaaaagaggaaatcaaattgtccctgtttgcagacgacatgattgtatatctagaaaaccccattgtctcagcccaaaatctccttaagctgataagcaacttcagcaaagtctcaggatacaaaatcaatgcacaaaaatcacaagcatttctatacaccaataacagacaaacagagagccaaatcatgagtgaactcccattcacaattgcttcaaagagaataaaatacctaggaatccaacttacaagggatgtgaaggacctcttcaaggagaactacaatccactgctcaatgaaataaaagaggatacaaacaaatggaagaacattccatgctcatgggtaggaagaatcaatatcgtgaaaatgggccatactgcccaagaattggaaaaaaactactttaaagttcatatggaaccaaaaaagagcctgcatcgccaagtcaatcctaagccaaaagaacaaagctggaggcatcacactacctgacttcaaactatactacaaggctacagtaaccaaaacagcatggtactggtaccaaaacagagatatagatcaatggaacagaacagagccctcagaaataatgccacctatctacaactatctgatctttgacaaacctgagaaaaacaagcaatggggaaaggattccctatttaataaatggtgctgggaaaactggctagccatatgtagaaagctgaaactggatcccttccttacaccttatacaaaaatcaattcaagatggattaaagacttaaatgttagacctaaaaccataaaaaccctagaagaaaacctaggcattaccattcaggacataggcttgggcaaggacttcatgtctaaaacaccaaaagcaatggcaacaaaagccaaaattgacaaatgggatctaattaaactaaagagcttctgtgcagaaaaagaaactaccatcagagtgaacaggcaacctacaaaatgggagaaaatttttgcaacttactcatctgacaaagggctaatatccagaatctacaatgaactcaaacagatttacaagaaaaaaacaaacaaccccatcaaaaagtgggtgaaggacatgaacagacacttctcaaaagaagacatttatgcagccaaaaaacacatgaagaaatgctcatcatcactggccatcagagaaatgcaaatcaaaaccactatgagatatcatttcacaccagttagaatggcaatcattaaaaagtcaggaaacaacagggacatggatgaaattggaaaccatcattctcagcaaactatcgcaatgacaaaaaaccaaacaccgcatgttctcactcataggtgggaactgaacaatgagaacacatggacacaggaaggggaacatcacacactggggcctgttgtgggaaacttgaaactgctgagaaagcccaaaatctccttaagctgataggcaacttcagcaaagtctcaggatacaaaatcaatgtacaaaaatcacaagctttcttatacaccaacaacagacaaacagagagccaaatcatgagtgaactcccattcacaattgcttccaagagaataaaatacctaggaatccaacttacaagggatgtgaaggacctcttcaaggagaactacaaaccactgctcaaggaaataaaagaggatacaaacaaatggaagaacattccatgctcatgggtaggaagaatcaatatcgtgaaaatggccatactccccaaggtgatttacagattcaacgccatccccatcaagctaccaatgactttcttcacagaattggaaaaaactactttaaagttcatatggaaccaaaaaagagcccgcatcaccaagtcaatcctaagccaaaagaacaaagctggaggcatcacgctacctgacttcaaactatactacaaggctacagtaaccaaaacagcatggtactggtaccaaaacagagatatagaccaatggaacagaacagagccctcagaaataatgccacatatctacaactatctgatctttgacaaacctgacaaaaacaagcaatggggaaaggattccctatttaataaatggtgctgggaaaactggctagccatatgtagaaagctgaaacttgatcccttccttacaccttatacaaaaattaattcaagatggattaaagacttacctgttagacctaaaaccattaaaaccctagaagaaaacctaggcattaccattcaggacataggcatgggcaaggacttcatgtctaaaacaccaaaagcaatggcaacaaaagccaacattgacaaatgggatctaattaaactaaagagcttctgcacagcaaaagaaactatcatcagagtgagcaggcaacctacaaaatgggagaaaattttcacaacctactcatctgacaaagggctaatatccagaatctacaatgaactcaaacaaatttacaagaaaaaaacaaacaaccccatcaaaaagtgggtgaaggacatgaacagacacttctcaaaagaagacacttatgcagccaaaaaacacatgaaaaaatgctcaccatcactggccatcagagaaatgcaaatcaaaaccacaatgagataccatctcacatcagttagaatggcgatcattaaaaagtcaggaaacaacagcaaaaaggtgcaaagtgaagcagcaagtgctaatgtagaagcagaagcaagttatcaggaagatctagctaagatcattgatgaaggtggctacactggaaaaccaattcttaatgtagacgaaacagccttatattggaagaagatgccatctaggacttccatagctaaagtgctataactgagtcttcaaaaggacattccactgttccatcaggccagctgcttcagaatggtggagaacatgtgttggaagttctggccagggcaattaggcaggagaaggaaataaagggtattcaattaggaaaagaagaagtcaaattatccctgtttgcagatgacatgattgtatatctagaaaaccccattgtctcagcccaaaatctccttaagctgataagcaacttcaccaaagtctcaggatacaaaatcaatgtacaaaaatcacaagcattcttatacaccaacaacagacaaacagagagccaaatcatgagtgacctcccattcacaattgcttcaaagagaataaaatacctaggaatccaacttacaagggatgtgaaggacctcttcaaggagaactacaaaccactgctcaaggaaataaaagaggagacaaacaaatggaagaacattccatgctcatgggtaggaagaatcaatatcgtgaaaatggccatactgcccaaggtaatttacagattcaatgccatccccatcaagctaccaatgactttcttcacagaattggaaaaaactaatttaaagttcatatggaaccaaaaaacagcctgcatcgccaagtcaatcctaagccaaaagaacaaagctggaggcatcacactacctgacttcaaactatactacaaggctacagtaaccaaaacagcatggtactggtaccaaaacagagatatagatcaatggaacagaacagagccctcagaaataacgccgcatatctacaactatctgatctttgacaaacctgagaaaaacaagcaatggggaaaggattccctatttaataaatggtgctgggaaaactggctagccatatgtagaaagctgaaactggatcccttccttacaccttatacaaaaatcaattcaagatggattaaagacttaaacattagatctaaaaccataaaaaccctagaagaaaacctaggcattaccattcaggacataggcatgggcaaggacttcatgtctaaaacacaaaaagcaatggcaacaaaagccaaaattgacaaatgggatctaattaaactcaagagcttctgcacagcaaaagaaactaccatcagagtgaacaggcaacctacaaaatgaaaaataataagagctatctatgacaaacccacagccaatatcatactgaatgggcaaaaactggaagcattccctttgaaaactggcacaagacagggatgccctctctcaccgctcctattcaacatagtgttggaagttctggccagggcaatcaggcaggagaaggaaataaagggtattcaattaggaaaagaggaagtcaaattgtccctgtttgcagacgacatgattgtttatctagaaaaccccatcgtctcagcccaaaatctccttaagctgataagcaacttcagcaaagtctcaggatacaaaatcaatgtacaaaaatcacaagcattcttatacaccagcaacagacaaacagagagccaaatcatgggtgaactcccattcacaattgcttcaaagagaataaaatacctaggaatccaacttacaagggatgtgaaggacctcttcaaggagaactacaaaccactgctcaaggaaataaaagaggagacaaacaaatggaagaacattccatgctcatgggtaggaagaatcaatatcgtgaaaatggccatactgcccaaggtaatttacagattcaatgccatccccatcaagctaccaatgactttcttcacagaattggaaaaaactactttaaagttcatatggaaccaaaaaagagcccgcattgccaagtcaatcctaagccaaaagaacaaagctggaggcatcacactacctgacttcaaactatactacaaggctacagtaaccaaaacagcatggtactggtaccaaaacagagatatagatcaatggaacagaacagagccctcaaaaataatgccacatatctacaactatctgatctttgacaaacctgacaaaaacaggaaatggggaaaggattcgctatttaataaatggtgctgggaaaactggctagccatatatagaaagctgaaactggatcccttccttacaccttatacaaaaattaattcaagatggattaaagacttaaatattagatctaaaaccataaaaaccctagaagaaaacctaggcaatactattcaggacataggcatggggaaggacttcatgtctaaaacaccaaaaccaatggcaacaaaagccaaaattgacaaatgggatctaattaaactaaagagcttctgcacagcaaaagaaactcacagctcatggaggcctgcctgcctctgtaggctccacctctgggggcagcgcacaggcaaacaaaaggacagcagtaacctctgcagacttaaatgtccctgtctgacagctttgaagagagcagtggttctcccagcatgcagctggagatctgagaaggggcagactgcctcctcaaaacaaagctggacggagaatgactttgacgagctgagagaagaaggcttcagacgatcaaattactccgagctacgggaggacattcaaaccaaaggcaaagaagttgaaaactttgaaaaaaatttagaagaatgtataactagaataaccaatacagagaagtgcttaaaggagctgatggagctgaaaaccaaggctcgagaactacgtgaagaatgcagaagcctcaggagccgatgcgatgaattggaagaaagggtatcagcgatggaagatgaaatgaatgaaatgaagcgagaagggaagtttagagaaaaaagaataaaaagaaacgagcaaagcctccaagaaatatgggactatgtgaaaagaccaaatctacgtctgattggtgtaccttaa

SEQ ID NO: 152186 - DNA, 4192 bp, Homo sapiens
atggacattgatgcaaaaatcctcaataaaatattggcaaagcgaatccagcagcacatcaaaaagcttatccaccgtgatcaagtgggtttcatccttgggatgcaagactggttcaacatacaaaaatcaataaacgtaatccatcatataaacagaaccaaagacaaaaaccacatgattatctcagtagatgcagaaaaggcctttgacaaaattcaacagcccttcatgctaaaaactctcaataaattaggtattgatggaacgtatctcaaagtaacaagagctatctatgacaaacccacagccaatatcatactgaatgggcaaaaactggaagcattccttttgaaaactggcacaagacagggacgccctctctcaccactcctattcaacatagtgttggaagttctggccagggcaatcaggcaggagaaaaaaataaagggtattcaattaggaaaagaggaagtcaaattgtccctgtttgcagatgacatgactgtatatttagaaaaccccatcatctcagaccaaaatctccttaggctgataaacaacttcagcaaagtctcaggatacaaaatcaatgtgcaaaaatcacaagcattcttaaacaccaataacagacaaacagagagccaaatcatgagtgaactcccactcacagttgcttcaaagagaataaaatacctaggaatccaaatgcttaaccaggaagaagttgaatctctgaatagaccaataacaggagctgaaattgtggcaataatcaatagtttaccaaccaaaaagagtccaggaccagatggattcacagccgaattctaccagaggaattcggtagaggaggaactggtaccattccttctgaaactattccaatcaatagaaaaagagggaatcctccctaactcattttatgaggccagcatcattctgataccaaagccgggcagagacacaaccaaaaaagagaattttagaccaatatccttgatgaacattgatgcaaaaatcctcaataaaatactggcaaaacgaatccagcagcacatcaaaaagcttatccaccatgatcaagtgggcttcatccctgggatgcaaggctggttcaatatacgcaaatcaataaatgtaatccagcatataaacagagccaaagacaaaaaccacatgattatctcaatagatgcagaaaaagtctttgacaaaattcaacaacccttcatgctaaaaactctcaataaattaggtattgatgggacgtatttcaaaataataagagctatctatgacaaacccacagccaatatcatactgaatgggcaaaaactggaagcattccctttgaaaactggcacaaaacagggatgccctctctcaccactcctattcaacatagtgttggaagttctggccagggcaattaggcaggagaaggaaataaagggtattcaattaggaaaagaggaagtcaaattgtccctgtttgcagacgacatgattgtatatctagaaaaccccattgtctcagcccaaaatctccttaagctgataagcaactttagcaaagtctcaggatacaaaaaaaaaatcaatgtacaaaaatcacaagcattcttatacaccaataacagacaaacagagagccaaatcatgagtaaactcccattcacaattgcttcaaagagaataaaatacctaggaatccaacttacaagggacgtgaaggacctcttcaaggagaactacaaaccactgctcaaggaaataaaagaggatacaaacaaatggaagaacattccatgctcatgggtaggaagaatcaatatcgtgaaaatggccatactgcccaagataggatattgtgtgcaagacacaacctctgccaatactacccttgttcatcagaccacaccttcacatgtaatgccaccaaatcaccaccaattagcatttaattatcaagaattagaacatttacagactgtgaaaaacatttcacctttacaaattctgcctccctcaggtgattctgaacagctctcagatggcataactgtgatgcatccatctggtgatagtgacacaacgatgttagaatctgaatgtcaagctcctgtacagaaggatataaagattaagaatgcagattcatggaaaagtttaggcaaaccagtgaaaccatcaggtgtaatgaaatcctcagatgagctcttcaaccaatttagaaaagcagccatagaaaaggaagtaaaagctcggacacaggaactcatacgtaagcatttggaacaaaatacaaaggaactaaaagcatctcaagaaacccacagggatcttgggaatggattgactgtagaatctttttcaaataaaatacaaaacaagtgctctggagaagagcagaaagaacatcagcagtcatcagaagctcaagataaatccaaactctggcttctcaaagaccgtgatttagcaaggcagaaagaacaagagaggaggaggagagaagcagaagggcagtgggccccgccgccgcctcccaatggcgaggctgcgggattgcctgccccgcctgatgctcacgctccggtccctgctcttctggtccctggtctactgctactgcgggctctgcgcctccatccacctgctcaaacttttgtggagcctcggcaaggggccggcgcagaccttccggcggcccgccccgggagcaccctccccgcgtgcctgagcgacccctccttgggcacccactgctacgtgcggatcaaggattcagggttaagatttcactatgttgatggcgctggcatctgcttggcttctggggaggcttcgggaagcttctaatcatggcagaaggcaaaggacttcaaattgcacaatatttttagggctgctggaggctaaaaggagaaaggacaaatttatcccaccagttaatgataattttgattaccttgatctcctacattatgtgctgtgcatgctaaatagttttgttattgctgaagttaatgcactcttgcttaaggggttgaatgagtttggggatgcctatggctctaaattccctaaattctcatcaccggggaagggatctgcagttgaaaggctgagtgcccaggaccaaggaagcttcttctaccagagcagtggcctttcaaacaggatcctgtccattcactttgcagctactcatccatataccatgtggctttttgttggtttagccacagaagaagatggtgatttaacttccgtttcctctgagagttcttccactttggatgcttcagcaaccaaagtgttggaagttctggccagggcaattaggcaggagaaagaaataaagggtattcaattaggaaaagaggaagtcaaattgtccctgtttgcagatgacatgattgtatatctagaaaaccccattgtctcagcccaaaatctccttaagctgataagcaacttcagcaaagtctcaggttacaaaatcaatgtacaaaaatcacaagcattcttatacaccaataacagacaagcagagagccaaattatgagtgaactcccattcataattgcttcaaagagaataaaatacctaggaatccaacttacaagggatgtgaaggacctcttcaaggagaactacaaaccactgcttaaggaaataaaagaggatacaaagaaatggaagaacattccatgctcatgggtaggaagaatcaatatcgtgaaaatggccatactgcccaagccataccaccattgccaatgtgaatgcatgcatatagaggtcagcagcccttctcaccctctgtgctgccactgctgtgaatgcctgcatagaggccagcaaccctgtgcccaccagtgccccaccccagcctatgagcaagcaccccaccatgctgctgctactggcacaaacaaacaagcacagatcctagtgccactgcctgatgcaatgctttggctggccctactcgttacagtgttgtggccagcagtcctggaacacatcagcccctccaatgcacagtttcctaaccttgagggaccagagaacaaagctcgacatccaataccagtcccccagaggtacagcatgcaacttaggggtgccaacctgtgccttggcctcctaaaatcctccacaaatgaagccagttga

SEQ ID NO: 152187 - DNA, 4582 bp, Homo sapiens
atgttggaagttctggcctgggcagttaggcaggagaaggaaataaagggtattcaactaggaaaagaggaagtcaaattgtccctgtttgcagacaacatgactgtatatctggaaaaccccatcgtctcagcccaaaatctccttaagctgataagcaacttcagcaaagtctcaggatacaaagtcagtggacaaaaatcacaagcattattatacaccaataacagacaaacagagagccaaatcatgagtgaactcccattcacaattgcttcaaagagaataaaatacctaggaatccaccttacaagggatgtgaaggacctcttcaaggagaactacaaaccactgctcaaggaaataaaaaaggatacaaacaaatggaagaacattccatgctcatgggtaggaagaatcaatatcgtgaaaatggccatactgcccaaggacatcatccaggagaacttccccaatctagcaaggcaggccaacattcagattcaggaaatacggaaaacaccacaaagatattcctcgagaagagcaactccaagacacataattgtcagattcaccaaagttgaaatgaaggaaaaaatgttaagggccgccagagagaaagcatcacaccacacctattccaaaattgaccccatacttggaagtaaacctctcctcagcaaatgtaaaagaacagaaattataacaaactatctctcagaccacagtgcaatcaaactagaattcaggattaagaatctcactcaaaactgctcaactacgtggaaaccaaacaacctgctcctgaacgactactgggtacataacgaaatgaaggcagaaataaagatgttctttgaaaccaacgagaacaaagacacaacataccagaatctctgggacacattcaaagcagtgtgtagagggaaatttatagcaacaaatgcccataagaggaagcaggaaagatccaaagttgacaccctaacatcacagttaaaagaactagaaaagcaagagcaaacacattcaaaagctagcagaaggcaagaaataactaaaatcagagcagaactgaaggaaatagagacacagaaaacccttcaaaaaattaatgaatccaggagctggttttttgaaaggatcaacaaacttgacagacctctagcaagactagtaaagaaaaaaagagagaagaatcaaatagatgcaataaaaaatgataaaggggatatcaccaaccgatcccacagaaatacacactaccatcagagaatactataaaaacctctacgcaaagaaactagaaaatctagaagaaatggataaattcctggagacatacaccctcccaagaccaaaccaggaagaagttgaatctctgaatagaccaataacaggatctgaaattgtggcaataatcaatagcttaccaaccaaaaagagtccaggaccagatggattcacagccgaattctaccagaggtacaaggaggaactggtaccattccttctgaaactattccaatcaatagaaaaagaaggaatcctccctaactcatttgatgaggccagcatcatcctgataccaaagctgggcagagacacaaccaaaaaagagaattttagaccaatacccttgatgaacactgatgcaaaaatcctcaataaaatactggcaaaccgaatccagcagcacatcaaaaagcttatccaccatgatcaagtgggcttcatccctgggaatgcaaggctggttcaatatatgcaaatcaataaatgtaatccagcatataaacagaaccaaaggcaaaaaccacatgattatctcaatagatgcagaaaaggcctttgacaaaattcaacaacccttcctgctaaaaactctcaataaattaggtattgatgggacgtatctcaaaataataagagctatctatgacaaacccatagccaatatcatactgaatgggcaaaaactggaagcattccctttgaaaactggcacaagacagggatgccctctctcaccactcctattcaacatagtgttggaagttctggctagggcaattaggcaggagaaggaaataaagggtattcagttacaaaaagaggaagtcaaattgtccctgtttgcagacgacatgattgtatatctagaaaaccccactgtctcagcccaaaatctccttaagctgataagcaacttcagcaaagtctcaggatacaaaatcagtgtgcaaaaatcacaagcattcttctacaccaacaacagacaaacagagagccaaatcatgagtgaactcccattcacaattgcttcaaagagaataaaatacctaggaatccaacttacaagggatgtgaaggacctcttcaaggagaactacaaaccactgctcaaggaaataaaagaggatacaaacaaatggaagaatattccatgctcatgggtaggaagaatcaatattgtgaaaatggccatactgcccaagcctccgctgctgatacccaggcaaacagggtcgggagtggacctccagcaaactccaacagacctgcagctgagcgtcctgactgttagaaggaaaattaacaaacagaaaggacatccacaccaatacctcatctggacgtcaccatcatcaaagaccaaaggaaggcagctcctcgccagcaacagaactatactacaaggctacagtaaccaaaacagcatggtacgggtaccaaaacagagatatagatcaatggaacagaacagagccttcagaaataatgccgcttacctacaactatctgatctttgacaaacctgagaaaaacaagcaatggggaaaggattccctatttaataaatggtgctgggaaaactggctagccatatgtagaaagctgaaactggatcccttccttacaccttatacaaaaatcaattcaagatggattaaagatttaaacgttagacctaaaaccataaaaaccctagaagaaaacctaggcattaccattcaggacataggcgtgggcaaggacttcatgtccaaaacaccaaaagcaatggcaacaaaagccaaaattgacaaatgggatctaattaaactaaagagcttctgcacagcaaaagaaactaccatcagagtgaacaagcaacctacaacaggggagaaaattttcacaacctactcatctgacaaagggctgaatatccagaatctacaatgaactcaaacaaatttaaaaatacctaggaatccaacttacaagggatgtgaaggacctcttcaaggagaactacaaaccactgctcaaggaaataaaagaggatacaaacaaatggaagaacattccatgcccatgggtaggaagaatcaatatcgtgaaaatggccatactgcccaaggtggctaccattaccgtgctcactttacaggtgaggttcagagatttatgtaacatgccaaaggtcacacagctggacacagcagaaccaagattcaaatctgcacagaatcccatccagaataacagtatatttagttatcaagcctctttaggctccttgtggctacgacagtttctcagactttctattgtgatgccctggacagttttgaagggtattggtcagctgagtgttctacatgtttatgtcgtatggcccctgaaagaattcgtatttgaagctctgggtaagtggttaggaaaggaccagctgcaggcaacaatgcgagtgtgccttatttcctcaactgtaagaaattccagcatgtctagagagcaatcagggactctggcttctcaagagactctcagcatggaagccttcctgaaagccctgtgtggaggtggacccaatttatgcacctctatagatccactcaatctcttctttcctgtggtagtaaattcccagatcctcctgtctcatcctcagataccagcaattgcagaaacctactcagaggagaagtgcttaaaggagctgaaaaccaaggctcgagaactacgcgaagaatgcagaagcctcaggagccgatgcgatcaactggaagaaagggtatcagcaatggaagatgaaatgaatgaaatgaagcgagaagggaagtttagagaaaaaagaataaaaagaaacgaacaaagcctccaagaaatatgggactatgtgaaaagaccaaatctacgtctcattggtgtacctgaaagtgacggggagaatggaaccaagttggaaaacactctgcaggatattatccaggagaacttccccaatctagcaaggcaggccaacattcggattcagaaaatacagagaatgccacaaagatactcctcgagaagagcaactccaagacacataattgtcagattcaccaaagttgaaatgaaggaaaaaatgttaagggcagccagagagaaaggtcgggttaccctcaaagggaagcccatcagactaacagcagatctctctgcaaaaactctacaagccagaagagagagggggccaatattcaacactcttaaagaattttcaacccagaatttcatatccagccaaactaagcttcataagtga

SEQ ID NO: 152188 - DNA, 681 bp, Homo sapiens
gcccccatcagcctccttgtgcaaactgggcccccatgccacagtctggctttccctccatctgccccaggacaagagcaagaaggacatcagttgcccagtcatgtgatcccctgccatcttgccttaggaacagccttcccccagccagcagccatggctggctggggcgttagccaagccacctactgccaggaattggagcctcagttccctcctgtgtcaagtagctaactgcagcagctggactgagggcagagtctgtgggtgcagagaccctgcatgtaggccctaggcaggaagctggcttctgggagaggagtgagaacgtgcagggcctgcctagcttgcgtgcttgaggaaggtggcattccgtgcttgcctccttgaggagggtggcattctgtgtcttctgcttatgaagcgcctttcttaagcagaagacacagaatgccaccctcctcaagtgaccaaatgctattaatttccatcctttagcaggctgggccctaggcaggaagctggcttctgggagaggagtgagaacgtgcagggcctgcctagcttgcgtgcttgaggaaggtggcattccgtgcttgcctccttgaggagggtggcattctgtgtcttctgcttatgaagcgcctttcttaaagtttggcaataaatccatttttatgg

SEQ ID NO: 152189 - DNA, 2141 bp, Homo sapiens
  misc_feature (1)...(2141): n = a,t,c or g
ttttttttccataaaaatggatttattgccaaactttaagaaaggcgcttcataagcagaagacacagaatgccaccctcctcaaggaggcaagcacggaatgccaccttcctcaagcacgcaagctaggcaggccctgcaacgttctcactccctctcccnaagaagcccagcttccctccctaagggcccagcctgtctaaaggatggtaaattaatagcatttggtcacttgaggtggccccaaagctacttgcctacccaccaggggcccaggggagagtggctggggcctcaacctgtgaccttacatgcagggtctctgcacccacagactctgccctcagtccagctgctgcagttagctacttgacacaggagggaacttgaggcttccaattccctggcagtaggtggcttggctaacgccccagccagccatggctggctggtgggggaaggctgttcctaaggcaagatggcaggggatcacatgactgggcaactgatgtccttcttgctcttgtcctggggcagatggagggaaagccagactgtggccatgggggccccaagtttgcaaaaaggaaggctgaatgggggctcccggaaccaagtgcattgctgctcacctctgctccggcccccacgcagcccagagaagacatctgccccctcctgatccttgactactacctcaagaacaaagtgacagtacaataacgataacgaaggcattgacctgtgcaagcaggcctcagtggggttggggaacagggcagaaaggccagggcatgttgcttgtgaccccccccctttctcctctttcaattaaacaaaagtgcaacatgcaagaaatctgggcaagggtcctatcggaagctgctctcaccccagaggcccccagggagagtggctggacctcgggaacccagggcctctgcaccctaacaagctctgcccctcaagtcccagctgctgccagccacgatggaaaactggatgtgccccctaaaatccagggacaatgtgggggaagaggctgggaagaggacccagggtgccagggatggacccaggaaagggaaagaagaaaatgtctcttctcctagaaagttacaggagagccagcccatctggggcttgaaggcggggaagtggcttcggattccaacatacccctatcagcatttgaagaaatgactgggatacgggacctgtttcggctgagaaggacccacagagatccagataaatccccatctgaggaggcacagaagttggtggggattctcttttgaaggctgacatgatcattccaagtaagtttttctaatgtggacatcagagccactctgggatccacctcttcagaaatatccaaggctggtcactatccaggggcagagacatagaatagggggccccttaaattcctcttccactcttgaatcctccagacctaagccctccaatcatagctcactgagaggaaggggctgcagaaaatgtccttgttttgcaaaaaaaggaaacagggcccaaagagagagaggccacacagcttaatgtcctcctcacaaagaggcctctcatctccctcaagaggctccagttgggtctttcgttcccttccttttttaggtatgatcttagagcctggacccaaggcctctgcagctactcaaaataagtgggaggaggggctggctttgaggctgcccttagccatgaaggctctttgtcctaggaatagctggagatgggagctgcagggggctcagctgtgctgtattcagaagtcaggaatgtaagctactggggatggggaacagagatgatgtcattcccagaaaccccaagtgccgcccccaaagccctggggcagtttggaacgaccacacaaacacataggtcccagcgtgtgtgctcccagccccagccccagcccagaggccaggccagatagccaggcagtagccctgggtggcacctggcacctctggccagagcagagtaggaaggacgccaggagtctcttcgggtcatggccaaaccctgacatgcccaatggccctcctgcagccattgctgtagaagcagaagcacatttctcagcagggctgggccggacgcgtggg

SEQ ID NO: 152190 - DNA, 342 bp, Homo sapiens
  misc_feature (1)...(342): n = a,t,c or g
ggcacgagttaatttattgtgattcacagattttgatggggaaatacaggatcccaggtcatgactactgtcttaaacactgccctgctacctcccaaaccgagccccatgctccccatcaagcattatgccatcccgccaccaagctactcccacacccgtagccacccatccccagcccaacagcaaaccttgagtcagcgccaccagcctctgcacctctcctcctctgcctccactctgcccagctgggggaagctcatgcaccacctgaataatataccccagagnnnnnnnnnnnnnnnnnnnnnnnactctcatggtcgctgcccaggccagccg

SEQ ID NO: 152191 - DNA, 577 bp, Homo sapiens
ttgagaaaacagggtcacaatacctgccttgccaacgtggtgaggaccagcggagaagatgaaagggttatattccaaagcccacaaggttgaagatgcacacccgtgacacagcctcaggatgtcctgacgacatgtgccaaggtggtcatacgttttagggagacatgagacatcaatcaacacatgtaagatgaacattggttcagtctggaaaaggccgggcaacgccaagcaaacgtgggacaactcgcagccaggagaaagcttccaggtcacagatgaagagcatctgtatacatccagaatcctgtggagcaactcataacccatgaggaatggaagccgacagacagactcatccccaggacagatggttctcactacatctcataaagcttcttagaagatcttacaggattgagcaaccagccagccacagcaggggccaactggataacacgtctttgcacaggctctccctctgtccctgtcaccctccccttttcctaaccttgttccttgggattatgttttgaaataaattattcagagaaatgaaaaaaaaaaaaaaaaa

SEQ ID NO: 152192 - DNA, 1161 bp, Homo sapiens
  misc_feature (1)...(1161): n = a,t,c or g
tgcacanccgtgacacagcctcaggatgtcctgacgacatgtgccaaggtggtcatacgttttagggagacatgagacatcaatcaacacatgtaagatgaacattggttcagtctggaaaaggccgggcaacgccaagcaaacgtgggacaactcgcagccaggagaaagcttccaggtcacagtatttttgacttaccacgtgtttattgggacgtaaccccttcctaagatgaagagcatctgtatacatccagaatcctgtggagcaactcataaacccatgaggaatgggagccgacagacagactcatccccaggacagatggttctcactacatctcataaagcttcttagaagatcttacaggattgagcaaccagccagccacagcaggggccgactggataacacgtctttgcacaggctctccctctgtccctgtcaccctccccttttcctaaccttgttccttgggattatgttttgaaataaattattcagagaaatgaagccaaagctgacccattagccaatagctaggttctgtgatgacagggcttctgggctataatcgtttactgagaagccagcgttcctgaggggataatggctcgttccattcagctgcagcataggagtgagggcagggcattagcagaagataacaccagaaacgtgctctgggggctgttgatgactttctgtgccaaaccttagacatttagcctttattctgtaggtgatgggaagccagtgccagtggtgggtttgagcagggaaccagcaaccagtggtgggtttgagcagggagccagcaatactcaagctctgcttggatggaggccagtcaggaaggagttagggcaggaggaccagtcagggaggagacttagggcaggaggaccactcagggaggagacttagggcaggaggaccggtcagggaggagacttagggcaggaggactggtcagggaggagacttagggcaggaggactggtcagggaggagttagggcaggaggactggtcagggaggagacttagggcaggaggactggtcagggaggagacttagggcaggaggactggtcagggaggagttagggctggagaacgggtcagggaggagttagggcagggggaccggtcagggag

SEQ ID NO: 152193 - DNA, 1326 bp, Homo sapiens
catattttatcattcatcatagaaaaaaagctttaatattttttaatagaatacagaagaaaattgtgttgccagagagattgtttgcctgcctttgaacaaattaacaacacctgtttgcaaacaaaagaatttccagaatggagtcaaaccctttattctctgttcaggacccagcccattcatgtcttttgtatacagtatcaaacacatagtaggtgctgaataagtatctgctgactgaatggggtgcctcttttatccctatcctttatttcccaaccctaaactggatcttgatccattggggaaaatatccccacccatccattcctagagtagccctgtctctttcaacagtctttgatacataacattggtttagagacatatgcctgaagggaaaagagggagggtttcaggcaagagaaagaactctcaaaagcaggggcacagagactaggcagaaacaaaaagatctaagacagagagagagagtaactgaaacacaggtgcagagcgggaacaactgtgggagacagggacagaaaaaccaagtcagagaaacttaaaacgcacaccattggagataaagagataaaagggctgggccagaatgaacatcttgaagtttctactcagctttaatgttatctgatagaaaaaatggcagagagagaggaagacacggcctaagcaggaggataaagagacaaaggaagttagtagaggcagaggcagccagccaggcgtgcctagccgggaagcctggtcctaccccggcctcacacccacgggggatgggctcccatgcccactttcggctcctaccttaagtccagccaccctcttcccctacccgcccctaaagatctccaaaccactcggcaaatcaaatcctctctccccaacatcctccgtgaagcattctcggtgctccagcccgcactcagctcttcccctctcaactcctaaagccacacccccctcccctaaccacagggcagggctgttttcgagtttgcccttggctcctatgagcacatcttgactcctgcaaaagaactgtgtgcttgtcagggctccagcccctacctcctatattccagtattcttcatgacaccagcccaatgcccggtcttcctaagtgctcagtgaatactttagggcctgcccggccctatagtgctcgcgggggcctcagccgtcccctggagattttgccaggctggccacgctgagaccgtctcatggtctaagggcggcctctgccggccaggaggggacccgcacgcgggacagctcgcggccggaagggcgcgcct

SEQ ID NO: 152194 - DNA, 1359 bp, Homo sapiens
atggggataaagaatagcaagcgaggatccctccccctggctgctcctgcgctgctgaagcctgacacactctggtcctgtatatttggtgaaggggatttgggagaagaggacatgcccccagaccctcaggcaccatctccagctatccttcctcctaatcatgcctttggactctggcccttccgttacacccaaacccatccacaggaggccgccgccgaccccgccgccgcctaccatccggaaccaccaccgctgatcctagcaggcgtgcgcttccgctccaaccccgcacttccggagaacgggaagggggcgtggcgtggcgacggagtcgcggagggacacgccgcgttgtgggttctcggcctgaggtgcgagagaagcgtgaccgcggccctggctgctcggacccgggaacatgatggtcgctggagagaaggcgctgagaagggaccacggcggcgctgggtcgtgcgagccatccaaactccaaggctgggcaaggcactgatccactgctggacgacccggggcagcctctgggtgaacagcagcgtgtccgccggcagcgaacgagaccagcgagccgaccatgcggctgcacagacttcgtgcgcggctggcgcggtggcctgtgggcttctgctgcttcttgtccggggccaggcctgggtgaaaaagcaaaatctgtctccagaaacaagaaccaaagagctcgtggtgtccctcatgccattacctcatcctgggcaagggcacaacttggcttccagggcaaaggccaggactcagccagtcccatccggacccacacacggggcaggtgctggggagtcttgtccatgtgaagggcgccaagccggggtccaaaccttcctgggaattccatttgccaagccacctctagtccgctgcgatttgcaccccctgagccccctgaatcttggagtggtgtggggatggaaccacccatccggccatatctacacgccggcccatagccatgaaggctctaacctgccgcactggagacaagcacgcaaccggcaactgggctacctggaccaagtggctgcactacgctgggtccagcagaatatccccactttggaggcaaccctgaccgtgtcaccatttttggcgagtctgcggtggcacgagtgtgtcttcgcttgttgtgtcccccatatcccaaggaccttccacggagccatcatggagagtggcgtggccctcctgcccggcctcttgccagctcagctgatgtcatctccacggttcccgggcccctgtgtcttctacgagttccagcatcagcccagctggctcaagaacatcaggccacgcacatga

SEQ ID NO: 152195 - DNA, 697 bp, Homo sapiens; identical to SEQ ID NO: 124378

SEQ ID NO: 152196 - DNA, 2310 bp, Homo sapiens
gtatccacccgtccgctccaaggctgggcaaggcactgatccactgctgttcttttccggggcagcctctgggtgaacagcagcgtgtgcgccggcagcgaaccgagaccagcgagccgaccatgcggctgcacagacttcgtgcgcggctgagcgcgggggcctgtgggcttctgctgcttcttgtccggggccagggcccaggactcagccagtcccatccggaccacacacacggggcaggtgctggggagtcttgtccatgtgaagggcgccaatgccggggtccaaaccttcctgggaattccatttgccaagccacctctaaggtccgcttgcgatttgcacccccttgaagcccccttgaatcttggagtggtgtgagggatggaaccacccatccggccattgtgtctacaggacctcaccgcagtggaagtcagagtttcttagccagttcaacatgaccttcccttccgactccatgtctgaggactgcctgtacctcagcatctacacgccggcccatagccatgaaggctctaacctgccggtgatggtgtggatccacggtggtgcgcttgtttttggcatggcttccttgtatgatggttccatgctggcttgccttgggagaacgtggtggtggtcatcatccagttaccgcctgggggtgtcctgggcttcttcagcactggagacaagcacgcaaccggcaactggggctacctggaccaagtggctgcactacgctgggtccagcagaatatcgcccactttggaggcaaccctgaccgtgtcaccatttttggcgagtctgcgggtggcacgagtgtgtcttcgcttgttgtgtcccccatatcccaaggactcttccacggagccatcatggagagtggcgttgcccttccttgcccggcctcattgccagctcagctgattgtcatctccacggtggtggccaacctgtctgcctgtgaccaagttgactctgaggccctggtgggctgcctgcggggcaagagtaaagaggagattctttgcaattaaacaagccttttcaagatgatccccggagttggtgggatgggggtcttccttgcccaggggacccccagggagttgttggcctctgccgactttcagcctgtccctagcattgttggtgtcaacaacaatgaattcggctggcttcatccccaaggtcattgaggatcttattgataacccagaagggaaattgggacaagagagggcctcccagggttgttctgcagaaaatgttaacgctgctgatgttgcctcctacatttggtgacctgctgagggaggtgtacattggggacaatggggatccccagacccttccaaagcgaaagttcccagaagatgatggcggactcccatgtttgtgatccctgcactccaagtagcacattttcaagtgttccccgggcccctgtgtaccttcctacgagttcccagcattcagcccagctggctcaagaacatcaggccacccgcacatgaaggcagaccatggtgaatgagcttccttttgttttcagaagtttctttcgggggcaactacattaaattcactgaggaagaggagcagctaagcaggaagatgatgaagtactgggccaactttgcgagaaaatgggaacccccaatggcgagggtctgcccacactggccgcctgttcgaccagggaggagcaattaccttgcagctgaaccttacagcctgcggtggggccggggctctgaaaggcccaccaggctcccagttctggaaagaaagcgctgccccaaaagatccagggagctcgaggagcctgaagagagacacacagagctgtagctccctgtgccggggaggagggggtgggttcgctgacaggcgaagggtcagcctgctgtgccccacacaacacccactaaggaggaaagaagtttgatttcctttcatttcattttggcctttcatttcatacttccgtccagaagttgattccttcattcacttcgccattcattcatacttccgtccatccattcagaaaccggyatttattaagaatttactcaggcatgatggcccatacttgtaatcccagctattgggaaggatgagatgggaggatggcttgaggccagaggtttgagaccgaccagccagggcaacacagtgagaccccttctcaaaaaaaaaaaaaaaaaaagagagagtgtgtgattagaagctaaataggaaagttttgagcttcaagtcagtgaggagtaaaaaagatttttaaaaagcaa

SEQ ID NO: 152197 - DNA, 824 bp, Homo sapiens
gtgtccaaacagttctccaggaagcgcctcagaggtaggatgtgcccgatcggggcagtccagtctgttaagaagtcttccacgatgtgatggatggccgtgggccgaggcaggggccagtgtgcagggcggaacctcacctcctgttcggtggggaggtatctatagtagtagatgacaggatgaagaaagttagactgccaggcatcttctgtgtgccccacagaccggtcatcaaagaagacgtccttgtcggggccagagaaatttctgccatattccatgttgatgacgaagagcccgtgctttgccttcctccctgtgagtgtctccagctgggccagcatctgtatggggaactcctccaggtactcaaaggccgtggaattcctgggagaacagcaacgcgggggaggccctcagtgctgtgggtagagcccagaagcctcattcacgcgccgcacgatggagctggtcagctgtgtgatggggagctcagtggcggtccaggtgacgctgtggtgccggtgctccaggagccggtgaacagcacgcactgtgtatcggaatccgtggatgaagcccccagcacttaccccggtagtccaccgagtggctggcagtacccaggataaacagaccccggcttcctttggattcgtagctagctcgaatcagcgggtacttcttgccgaatgcatttcccgagttaagtctgagggacttattgaaaatggagaagtcaaagttccagcccaggcagcggattacccggtcatagggcacgcgcatggcaaagttgtcattctcgtccggaatacatc

SEQ ID NO: 152198 - DNA, 1619 bp, Homo sapiens
tttaggaaccaaattcatcatcattatcacacaaaggcatttggaaatgtcaccttacacatggtgagcacatatgggtgccagcccgagacagcaggataagtttcacaaaacttgaccaggcaggttagaagcaaggcatggttcaggatggcagagggcagggagacagaagggagtaggatgggagagaagagccagctggaagatgagtcagggggtgcaactggggagagcagctctgaatcctgcttctcagtgagaaagttgctaagatggctttgcagggagctgtcctatcgctgctcgagatcagcctgctgggcctattgatgataagcagggctgaccctcttgggctctgtagctaagcccaaaccctgctgaaaatggggcggggaggttgaggcagtgtgtggcaagtgacacagacggggactcccagctgggggtccctggaattacttgacatcccacagctggtgtcttcagcagtcatctggggcaacaatcccacctgcccgttgtggttgttgaggatatcagagcttttgttttaaagcgcttgccacaaactcttaagatgcggatgggtttcccctgtgaagcactccacaggcgggatgcaggcccatctgaggaggggcttggaaggaagaggagcacttgagacggtgcagaactgggctggcctggggctcagcgacactcccatttgcagacaaactgggctggggaaggcagctcccacctggcagaggatgcccttctgccccctgacaggagggaggagaccaccgcatccccgacttttcagccctcacgttgccatctggtggctttgctgcagacactgccatgatctgagtggtctttggcaatcacgcattggcgggagtgtgaggttgcggggaaagagggactgaccatgggcctaggtggggaggcctggccactgtgcccacagcttaggaagggacagtcagagctcctctttgttgctatcgacggactgacccagaggcccttggagccagggggaacctaagtggctcttggctcgccaagctgctggctgctgtcctccaggcgcctgcctgtgggggcatagtcccgcaggagcctgctctccactctgtgctgccaaaggctctcggtactcacgagtccctgcatcctcaggtacccctgctggcaaaagggtggcaacttctggcgcgtgagggcgaacaggaagcaggactctgcatagaagcttcgcaaatcggtgtcccaaacagttctcccaggaagcgccctcagaggtaggatgtgcccgatcggggcagtccagtctgttaagaagtcttcccacgatgtgatggatggccgtgggccgaggcaggggccagtgtgcagggcggaacctcacctcctgtttccttcaacaggatgacatcggccagcacaccgaacatctggtagagcccagaagcctcattcacgcgccgcacgatggagctggtcagctgtgtgatggggagctcagtggcgggccaggtgacgctgtggtggcggtgctccaggagccggtgaacagcacgcactggaacagccagagggaggaacggcacgctgca

SEQ ID NO: 152199 - DNA, 2247 bp, Homo sapiens
atggctgcctacaaattggtgttgatccagcatggcgagagcatgtggaatccggagaaccgcttcagcagctggtacaacaccgacctgagcccagcgggccataaggaggcgaagtgtggcaggcagcactctgggggtctgatcggtctcaataaagcagaaactgctgcaaagcatggtgaggcccaggtgaagatctggaggcactcctatgatgtcccaccacctctaatggagcccgaccatcctttctacaacatcagtaaggatcgcaggtttgcaaacctcactgaagatcagctaccctcctgtgagagtctgaaggacactattgccaaggctctgcccttttggaatgaagaaatagttccccagatcaaggaggggaagcagccaaaatacccttttgaaaagcgccttgaagtcgtgaatcactacttcacaactgatgatggttacaggatcatctcggcacgttttggtgtcccccgaacccaggtcaggacatgggttgccctctatgaaaaacatggagaaaaaggtttaattcccaaacctaaaggcgttagtgctgatccagagttgcgtattaaggtcgtgaaagctgtgatcgagcagcacatgtcccttaatcaggctgctgctcactttatgcttgctggtagtggttctgtagccaggtggctgaaggtctatgaagagcgcggagaagctggtttacgcgcgctcaagattggcaccaaaagaaacattgcaatatcagttgatccagaaaaagcggcatcagcattggagctgtcaaaagaccgacgcattgaggatcttgaaaggcaagttcgatttcttgaaacgcggcttatgtatctaaaaaagctgaaagccttagctcatcccacgaaaaaggctgcggagataccgcgcagtacgttttattatcatctaaaggctctcagcaagcctgacaagtatgcggacgttaaaaagcgtattagtgagatttatcacgagaatagaggccgatacggataccgtagggtaacgctgtctcttcatcgagaagggaaacagattaaccataaagctgttcagcgcctgatgggaaccctctcacttaaagcagcgattaaggtcaagcgataccgctcttacagaggagaggtagggcaaaccgcccctaatgttctccaaagagatttcaaggctacgcggccaaacgagaagtgggttaccgatgttactgaatttgcagtcaatgggcgcaagctgtatttgtctccagtaatagatctcttcaacaacgaagttatttcttacagcctttcggaaagaccagtgatgaacatggttgagaatatgctcgatcaggcattcaaaaagcttaatcctcacgagcatcctgttctgcactctgaccagggatggcagtatcgtatgagaagatatcaaaatatccttaaagaacatggtattaaacaaagcatgtccagaaaaggcaattgtctggataatgctgtggtggagtgtttctttggaaccttaaagtcggagtgtttttatcttgatgagttcagtaatataagcgaactgaaggatgctgttacggaatatattgaatactacaacagcagaagaattagcctgaaattaaaagacctatatgcctcgtgtttaactgtccaactttttggggtcagtacactggagggcctctctgaagaggctatcatggagctgaacctgcccactggtattcccgttgtctatgaattggacaagaacttgaaacccatacagttcctgggggatgaagagaccatgcgtaaagccatggaagctgtggctgcccaggtggaagatgaatataacctctatggtgatgtgacaactgtttcttccctgaccccagagaagctggctccagaagtcaaagaaaatgttcctgaaaggctaaatatccttttgcaagttggtggaagatctaggaccaatcttaatcgcgttagagttccaattcacaagcatccctcaataagggatcccaattcacaagcatccctcaataagttaacagacaaaatggattctctgtggctcaaaagtaaaaacagacccaaggggccatggaagggtgagggagcagtcaagctcttcgtgtccttagagaatgctgcaaaacctgtttttctgcaaccaagtcaaagaagagttcctggaaacaacggcagctgggaattccccagttga

SEQ ID NO: 152200 - DNA, 551 bp, Homo sapiens
acaatgggaataccagtcggcaggttcaagctccatgatagcctcttcagagagaccctccagatgcttgacaatgccccggaggctgttgccatgggctgcaatcagtacacgtttcccctccttgatctggggaactatttcttcattccagaagggcagagctctggcaatagtatccttcagactctcacaggagggtagctgatcttctgtgaggtctgcatacctgcgaaccttactgatgttgctgtagaaaggatggtcgggctccatcggaggtggtgggacaatccataggagcgcctccagatcttcacctgggcctcaccatgctttgcagcagtttctgctttattgagaccggttagacccccatagtgccgctcattgaggcgccaagtcctcaccactggcagccacatctgatcaatggcatctagcactgtccagagggtccggatcgctatataaatgcactgaggtgaagcagatgtcaaactcatagccagcatctcgtagcgcctgcccgccgccttcgcctcctcgtg

SEQ ID NO: 152201 - DNA, 3200 bp, Homo sapiens
atggctgcctacaaattggtgttgatccagcatggcgagagcatgtggaatccggagaaccgcttcagcagctggtacaacaccgacctgagcccagcgggccataaggaggcgaagtgtggcaggcagcactctgggggtctgatcggtctcaataaagcagaaactgctgcaaagcatggtgaggcccaggtgaagatctggaggcactcctatgatgtcccaccacctctaatggagcccgaccatcctttctacaacatcagtaaggatcgcaggtttgcaaacctcactgaagatcagctaccctcctgtgagagtctgaaggacactattgccaaggctctgcccttttggaatgaagaaatagttccccagatcaaggaggggaagcaggtactaattgcagcccatggcaacagccccccgggcattgtcaagcatctggagggcctctctgaagaggctatcatggagctgaacctgcccactggtattcccgttgtctatgaattggacaagaacttgaaacccatacagttcctgggggatgaagagaccatgcgtaaagccatggaagctgtggctgcccaggtggaagatgaatataacctctatggtgatgtgacaactgtttcttccctgaccccagagaagctggctccagaagtcaaagaaaatgttcctgaaaggctaaatatccttttgcaagttggtggaagatctaggaccaatcttaatcgcgttagagttccaattcacaagcatccctcaataagggatcccaattcacaagcatccctcaataagaccagggaagatagaaaggtagaagccatcatgcatgcttttgaaaacttagagaaaagaaagaagcggcgggatcagcccttggaacagagcaactctgatgtagagattactacaaccacctcagagactcctgttggtgaagagacaaaaactgaagcccctgaatctgaagttagcaactctgtttcaaatgttaccatcccaagcaccccacagagtgttggtgtgaatacccggaggtcttcccaagcaggggatattgctgcagaaaaactagtccccaagccacctccagcaaagccttctaggccccggccgaagagtcgaatttctcggtacaggaccagttcagcccaaagactaaagcgtcagaagcaggccaatgcacagcaggcagaattgtcacaagctgccttggaagagggaggaagtaacagtttagtaactcctactgaagctggaagtctagacagttcaggagaaaacaggccattaacagggtctgacccaactgtggtgtcaattactggatcccatgtcaaccgtgctgcatctaaataccccaaaaccaaaaagtatctagttacagaatggttgaatgacaaagcagagaagcaagagtgccctgttgagtgccctttacgtatcacaacggatccaactgtactggcaacgaccctaaacatgttaccaggtcttatccattccccggttaatttgcaccacccccaaacactacattcgctttggctcaccctttatccctgagagacgtcgaaggccccttctgcctgatggcacattcagctcctgtaagaagcgctggataaaacaagccttagaagaagggatgactcaaacatcatctgtaccccaagagactagaactcagcacctataccaaagcaatgagaatagtagctcttctagtatctgcaaagacaatgcagacttgttgagcccattaaagaaatggaagtctcgctatctgatggagcagaatgtcaccaagttacttcggcctctgtctccagtcacaccaccccctcccaaattcaggctcaaagagtccccagctggccacacctggctcatctcacccaggaggaagaggagtgtcgaaatggatacaggcctcatgttttcaccagtcaacatctcttactactgctagtcgctgcaacactcctctacagtttgagctttgtcaccgaaaagacctggatttggcaaaagtaggataccttgactccaacactaacagctgtgctgatagaccttccctactcaactcaggtcattctgacctggctcctcatccctccctcggacccacttctgagactggtttcccaagcagaagtggagatggacatcagaccctcgtgagaaactcagaccaggcatttcggacagagttcaacttgatgtatgcctactcccctttgaatgctatgcctcgagcagatggactgtatcgaggatctcctctagtgggggatagtttatgcctttacatttggatgggggatattgttcccctgcagaaggattttccagcagatatgaacatggcttaatgaaagacctctctcgtggatccttgtcacctggcggtgaaagggcctgtgaaggagtcccatctgccccccagaacccaccacagaggaaaaaagtatccctgctggagtaccgaaaacggaaacaagaagctaaggaaaattctgctggtgggggaggtgactctgcacagagcaaaagcaagtctgcaggagctgggcaaggcagcagtaactccgtttccgacactggtgcccatggtgtgcagggatcctcagcccgaactccatcttcccctcacacaaaattcttcccatctcattcctctatgtcccatttggaggcggtaagcccatcagattccagaggcacttcttcatctcactgcagacctcaagagaatatcagcagtaggtggatgggttcccacatcagtagaacgactccgagaaggagggagcatccccaaggtcctccgaagcagcgtgagggtggcccaaaagggagagccctctcccacatgggagagtaacatcacagagaaagactcagaccctgcagatggagaaggcccagagacattaagctcagcactctcttaaaggagcaacagttttacagccctttccagatacagctaccagactcgttggccccatttacggggacaccagggtattttagcagccagccacattctggaaacagcactggcagcaatcttccaaggaggagctgcccttctagtgctgctagccctaccctgcagggaccctcagactcgccaacctcagattcagtttctcagtccagcacaggaactctga

SEQ ID NO: 152202 - DNA, 1412 bp, Homo sapiens
  misc_feature (1)...(1412): n = a,t,c or g
gatgtgcgggnggnnnngggccctaatacctccgaaactgaaacgtccgcanggcacgaggcatttggaggcggtaagcccatcagattccagaggcacttttttatctcactgcagacctcaagagaatatcagcagtaggtggatggttcccacatcagtagaacgactccgagaaggagggagcatccccaaggtcctccgaagcagcgtgagggtggcccaaaagggagagccctctcccacatgggagagtaacatcacagagaaagactcagaccctgcagatggagaaggcccagagacattaagctcagcactctctaaaggagcaacagtttacagcccttccagatacagctaccagctcctgcagtgtgatagtcctcggacagaatcacaaagcctccttcagcagagttcctcccccttcagaggacattcctacacagtctccaggatacagttatcgaactactgcactgagacctggaaaccccccctctcacgggtcttcagaatcatccctctcttccacgtcctattccagccccgcccaccctgtgtccacagactcgttggccccatttacggggacaccagggtattttagcagccagccacattctggaaacagcactggcagcaatcttccaaggaggagctgcccttctagtgctgctagccctaccctgcagggaccctcagactcgccaacctcagtattcagtttctcagttccagcacaggaactctgagnttccacctcctttcctcagaaattctaggtcgtcattggccatcagacttacggactaatcagtctgcccagtgctggggcagtcagctggttaccagggcctccagggtatctgcggtttccaattcacagcactaccccacaccgtgggagtggggttttccacccagtaccgaattcccagcccacttcaagggtcaaggagtcaagactcaagacggggacttttcctagggcttctgggatttgggggcaaacagaactgaatgagcccatagctggctttccttccagctgcctctgggaacccctaggcccgagcatattgcctgaggaacgggggggtacaagggtgcccagaggattgggtcctggtggacaagaaaacaagaacttgtggtcacacattgggcctctggccttggagaaagcctgtaaattctttgtcttgaagcagaagactataaagaagtttctccctgctgtcaagggtacattgttgacaagcaaatggggtttcggctagtaccggttctaagtgctatgagttgtggtgataacctccgtctcccatccttgcctgtagcccgtagatcacttgtgcagtgaggacatccttttaaatttaaaaaaaaaaaaaaaaaagtcgagc

SEQ ID NO: 152203 - DNA, 414 bp, Homo sapiens
gctgaaaacacaattctgagtttaatgttttctggaaagagctgggggagcttaagcagcgagtgtggcgctctgcttccgggcacgcccacagcaactcggcttcagagtctgacccgcagaagttctttaaagagagggacttagggaccccagatcccggcagccaggcccagagagggaagcaggattgggacgtgtacttcctcttgactctggtctcaggactgaggctcacaggagcctgagaaacagacaagcgggagtttctagccccttccagctctcccctgctctgaagcctagaaaaagcccctctcaggctactggtcagaggcctggatgagggcagtgggggcagaaggggtctggatcagccttgctgccaaccaacacaacacacgtggaagcggt

SEQ ID NO: 152204 - DNA, 502 bp, Homo sapiens
  misc_feature (1)...(502): n = a,t,c or g
gaaaacacaattctgagtttaatgttttctggaaagagctgggggagcttaagcagcgagtgtggcgctctgcttccgggcacgcccacagcaactcggcttcagagtctgacccgcagaagttctttaaagagagggacttagggaccccagatcccggcagccaggcccagagagggaagcaggattagtcaaaaccaggtgggggatggggggaaggaaganaggcancgggggtttgggggcccancgggtancaagagtgaccctgggcatcaacatggggtgaggtggagaggggctatggggttcctggagatcaaagtctggtcctgcaattgccacaggggctattgcctctcctgccacccagctcctgagagtgaatcctgacacgggtgattgggacgtgtacttcctcttgactctggtctcaggactgaggctcacaggagcctgagaaacagacaagcgggagctttctagccccttccagctctcc

SEQ ID NO: 152205 - DNA, 1387 bp, Homo sapiens
cattctatgggatggaaggagcatgtagaccgtggaggacacacaaaaggaatggtatttgtgtctttacagccagcctgctggctcccaagagagaggccttttcagttgagactctgcttaatagaagatccactgttaaggctctgtggccaggggaggggccgggggcaggaaactacctctggcttaattcttttaagccacgtaggaactttcttgagggataggtggaccctgacatccctgtggccttgcccaagggctctgctggtctttctgagtcacagctgcgaggtgatgggggctggggccccaggcgtcagcctcccagagggacagctgagccccctgccttggctccaggttggtagaagcagccgaagggctcctgacagtggccagggacccctgggtcccccaggccttgcagatgtttctatgaggggcagagctcctggtacatccatgtgtggctctgctccacccctgtgccaccccagagccctggggggtaggtctccatgcctgccacccctggcatcggctttctgtgccgcctcccacacaaatcagccccagaaggccccggggctttggctttctgttttttataaaacacctcaagcagcactgcagtctcccatctcctcgtgggctaagcatcaccgcttccacgtgtgttgtgttggttggcagcaaggctgatccagaccccttctgcccccactgccctcatccagggcctctgaccagtagcctgagaggggctttttctaggcttcagagcaggggagagctggaagggggctagaaagctcccgcttgtctgtttctcaaggctcctgtgaagcctcagtcctgagaccagagtcaagaggaagtacacatcccaatcacccgtgtcaggattcactctcaggagctgggtggcaggagaggcaatagcccctgtggcaattgcaggaccagctggagcagggttgcgggtgtctccgcggtgctcttcgccctgcccatggccaccccagactctgatctccagggaaccccattagcccctcttcaacctcacccccatgtttgatgccccagggtcactcttgcttacccgctgggcccccaaacccccgctgcctctcttccttccccccatcccccaccctggttttgactaatcctgcttccctctctgggcctggctgccgggatctggggtccctaaagtccctctctttaaagaacttctgcgggtcagactctgaagccgagttgcttgtgggcgtgcccggaagcagagcgccacactcgctgcttaagctcccccagctctttccagaaaacattaaactcagaattgtgttttcagcaaaaaaaaaaaaaaaaa

SEQ ID NO: 152206 - DNA, 636 bp, Homo sapiens
ttttttttttttttttctgggtgcaaggaacattttattccataactgtctccaccgaagccgcagaagcaaagccaggagcagaatccattctgccagcgctgggctctggggaaacaattggggcccccacaaggggggcaagaaggaaggggcctcccgactccttggtcctgcctggggtgctcctgtccctctttttgtgggggggaacctaccccaccctccccctcccacctcagccacagaggaacaaggggagacaaactgagggctcttgcagtcccccgttcaagggccaacataatagtcgtgtgggccccagcccagctaggcgcatcctctgcggcatggcagcggtgaccaagcacagccaacgtcagctccgctccctgccgtctgagagctgaccacaggcagatgagatgcccactccctgttgccataacacaggaaaggcgttggcggccaccctcccaagaaggcatggagcctgggggcccccagccaggcccctcaaggtcaacacagagctcagtggctcacctaacatctgggacggctgtgaggccagggctgggtagccctccctgactctggagagggaagaattgcaggaaggaggcccctcgtgcc

SEQ ID NO: 152207 - DNA, 1980 bp, Homo sapiens
  misc_feature (1)...(1980): n = a,t,c or g
ggaaattgaatctgaagagtgctgcccgaaatctgtaggaagttggtggcaagggacagcactcacactcttctggtcatgatctctgatctccacctgaaatgacaataaaaaaactggtccaacgaagatctgtgctcagcacttcagccatcaggactaatccatcgatgactggaaaagaggctagctttgaggaaaacagcctgggctcttgggagcagagtccagcgggtgtgagtgaggctgacttgccgacggtcggcaggtaatggctctcagccggcgaggcggntcccacagctctcctcccagggcagcctgaggaggaggaggccgggtgccctgtttggtggcagctttcaaacctagggatacctgaaagctgtttgagcaacacctttatgaaatgttgccagagcagcaacacttcccatgtgggcacagccccgggaaaaccgggtaccaagtgagcaaggtggcaggacccacccaagcctgatacgcatctgggcccgccgggctcagccaggggaggctgctacggctgcccacttcccagcaccgtctgtcaggcttgaacccctctgtgctgttcccttcctgggctaatagggagaccctttcgcagggcacccactgtttcaacttgaccctcccaccccctgctactctcctccacacacccctccgttccgctagcctaccctgtcagcctttcaataaaagttatggcacaaatgtgaacacctgagatggagctgaacatttcttcactttgttctttttctgaagtcaaactcttatcaaatgccctaaaattattaccacccaagaggaaacagggaaaaaggttacatgtttttgtttactgagagtaagatcacctggcatctgggaaggacggggctgggtaaattgggtttgggctacaggaacaggaaaggaaaacaaaaacaaacctcgtaagggaagtatcgcactcagacaccaccacttcctagagccaaatgagcaatcccaaactgcaagtgccgtaagtgggcctgtgacgtcacaccgcccggcccgaggtatcgcattgtgcggggggaggtccacactacagctgtcctctcgtctaggaaggcaccaccttcgcttttcatgtcccgtgtgttttgggaaaaggcagtatgggtgtgttcatgttttaggcgggcgaacacttccctccctctgtccttgaggttgtaatataaaaactgtggtttctgtacgtgtggggttgggaattctctgacgggttgctcgttcatatgcacaagcttaacgcttgagttgctgaactgtcgttcacagctgcgtgtctgcatggtgtcgcatctgttgtacctttggggaaaatttgtatgtaaatgtacagaaataaaaacgttgccccattaacagatttcctctggaatgtcttcccttacctcacctgatgggtatcccacccgaagggcattttcacctacccattaatgggtgagtaataaaatcctccgtgttcaattcaagaccctcactgcgtcacctactttgaaacgccccctgtaaacctgtgtccttccactcggccccccgaggtggggtgggagggaggcccctcctcacctcctgccttcgaagcccctggtcttaaagggtagtcagaggcaagagcctggattaaacacacactgtttacccaagtgcccactcctcagacccacctgagagacggggggcccatcagtaaaattaagaggaattttttttcccttgttcgtgtatgttctgctgatccgtggcctgaaggttcctagagacgtcaagaaatgaatatcttacactgtgattcttgtgaggaaagactggtaacccaaaacttctcttctctaatgtatttttctaccgcaaatgacaatatttctttaataaacgtattctataccaaactcttctctccataaaaaa

SEQ ID NO: 152208 - DNA, 1098 bp, Homo sapiens
cagatctgattacagactagtgtaaaaacagctacatgtatgtagctggttggggatgatatgcctgtatgttggactttgcttttgaatatatgtatgcaggatatcatcaagtttcaacatcttgacttgtgacccccaatgtcaacagcttttttaaaaaacaaattcctgcagtaatgaccaaaacccattttaaaaattgcttgacaactgcactcaactgcagctcttacattaacttcaccatggaaaccagttccaactccaggaagtcaccattcaaagaattagatcaactagcccaaccacttcattgtacagatgaagactgaaagccaaagatgtgaagtggtttccacagtatgatacagcctataagggtaaagctgggttaaaaatgcaggtttcctggatttggggccccatggccttgccagtgaaaaggttatttttggactcagagggctttaaaataaattttaagatgtatcagatacacaaacatttaatgggcacctatgggttggacactttgagaattcttaaaagtataagtgggagcaaaatgtatgcaaatttatcacaaactatttaaagcaacttcttggaggcttacaaaccacaatttaacagaaactgtagatggttgaactactagtgacttttttccccttttcccagttacaattatactttcagctaacatatgccagtttcacagaactattaaaggtcccccttatggtacttttttatggcatgcccatgaaaaagcactttcttaagcctacagtatcagatcaatgggaaaacaacagaaaacttaagaggagaattttcccgttaattttcttgcagaaaagtataagtctaaattgcccattgccataaattttgccttgtactcagagaagcaacatgcactggctcattttatgtgcaaagaaaagatttcaccattaaaaaaattaacttggctaggtatggtgtctcacacctgtaatcccagcactttgggtggctaaggcagatagactgcttgaacccaggagttcaagaccagcctggacaacatggtgaaaccccatctcttta

SEQ ID NO: 152209 - DNA, 1561 bp, Homo sapiens
  misc_feature (1)...(1561): n = a,t,c or g
aatnaaaatccaaggccctctcaaccccngcaacttcctgtccttggaaaccttgtcccctccctcagctgggcnaagcttctccctggtttaacttgaacctttangtgggcaaaactggggaaagggcctgcaaaaagaaaccgactgcacctttcttgcaggggattctgtgccaaaaaacagatagaccctttgtgcccaatgtgggccttggtaagcccgcctagcgggatttgcctagcagatcacctgatcttcctccctggcaggggagtggtggggatcttactactgggccttccgggcctgctcctgcccaggacccagtcggggaggtgaggatgctggtttagacccaatcacttggacgaatctgtcggcggcccctgtaacttgccggatggcggggtggagagacgaagctggagggagcagagcgcacaaacatttatttacaaaagtcccagttacatatgatacaggctttttacacacagtagttgaaacggaattattttatctatttttactaccagaagggaaagaaaaagtttaatgaactaatcgtttcttgtttttatacaaagtgacagatcatgcacatttttttcagtttttaaatattttgctaagtgcaaatactaggattcccctctccagttttaagggcaagtaaggagggggctgtggctggggagcctcacgcccttgcggcaaagccctgcagggcagagagagggaaccagctgcctcagggttgcctggtgtctgacctgctctctgggcactgggcacgggccctttgctggctggtctggaagacccccagtgcttctctccccaatgctgtcactggtccaggcaggagcccgaggttcaggccctgcctctggacagaggggcctggagaaccagggtgggtgctcacggcagccctgtggtcccccgtgcctggctcggggaggatcctcaggaatcagggaccctccaaggaaagaggccgccgctccttccccaccagcccagtgtggccagaacagctggaactcctctcaaatgacccacccctgggggtttggccttaaggagaaacatcactctgggctccccctccccactgccagggttgaggccagcacctgtctagggctgtttctgcagctgctgcctgctccctttgtcctgcctggggctcttgctggagccacgtgcctagggtacagggcagagggagctgaggctcccagggcctgaggtcacctcttcagctgtgatgtctacagccgccctctgctcccagagatcctccctggggaagcacagggagcatatttaaggtaccgaagacaatcctgttgctgccgcatggagcctgcctttccaaggcactgtcgttcaggctagtagcaaagttcaggcagtccaacaggtatgggcgccagcaaggacatagcagcagactgcccccaagcccggcctccctgcgcacccttaccccaggtccaggtgaccacctgtcttcaaagcctccatcctgggcaggggcagtaacaataac

SEQ ID NO: 152210 - DNA, 440 bp, Homo sapiens
  misc_feature (1)...(440): n = a,t,c or g
tagaccttatgtgcagcagcctctcaaggncctctggactcttgcccgcagcctggagctcctttcgggcctcctccgtcgattttcccctcatcagggcctctgtctgggccaagaagttggccaggaggatcttgtgatgcagacccttccgtatggggtgctgggtctggaccgggatgaggaagtcacagggtatcaatcttgntgccttggtggatgagctggtaaaaagcatgctggccattggtcnctggctccccccacacaatggggcctgtctggtggtccacacgggttccagatttggtgatgtatttcccattggacttggccaagtccaccanatccgcatcacgtcctccgtcaccaggttcttggagtaatccaccaggatatgcccatggttggtgttgagggtcaagctgaagtggttgaag

SEQ ID NO: 152211 - DNA, 1558 bp, Homo sapiens
gaaacacagcagtggagagcaagacaccagcacgctgccctcaccacctctcctcaccacggtggaggatgtgaaccaggataacaaaaccaaaacgtggccacccaaagcaccctggcagcacccttccccgcttcccagcacgctgcccagccccagcgcaccactctatgcagtcaccagccctggcagccagtggaacgacaccatgcagatgctgcagtccccagtgtgggccgcaaccaacgactgcagtgccgctgccttctcctatgtgcagaccccaccccagcccccacccccaccagcacacaaggcagcacccaagggcttcaaggccttccctgggaaggctatgtacaatggggaaaatgtttttaagcatctagcaaaggattcacggggctctggtaatgaagccccgaaacgacaagactggatcgcgcagggtagggccaacaccagggacaaacccccggcctcttgggggcgcgctgtttctagggttcctggtggtcgggagaggacactggacaagactgtggcagtggaaagtcccgccatggccgctctcacccgggacccccagttccagaagctgcagcaatggtaccgcgagcaccgctccgagctgaacctgcgccgcctcttcgatgccaacaaggaccgcttcaaccacttcagcttgaccctcaacaccaaccatgggcatatcctggtggattactccaagaacctggtgacggaggacgtgatgcggatgctggtggacttggccaagtccaggggcgtggaggccgcccgggagcggatgttcaatggtgagaagatcaactacaccgagggtcgagccgtgctgcacgtggctctgcggaaccggtcaaacacacccatcctggtagacggcaaggatgtgatgccagaggtcaacaaggttctggacaagatgaagtctttctgccagcgtgtccggagcggtgactggaaggggtacacaggcaagaccatcacggacgtcatcaacattggcattggcggctccgacctgggacccctcatggtgactgaagcccttaagccatactcttcaggaggtccccgcgtctggtatgtctccaacattgatggaactcacattgccaaaaccctggcccagctgaaccccgagtcctccctgttcatcattgcctccaagacctttactacccaggagaccatcacgaatgcagagacggcgaaggagtggtttctccaggcggccaaggataccaaagtgaaggagtttggaattgaccctcaaaacatgttcgagttctgggatgtaagtacaagcacttctgcactgggtgaattaagtgtcctttgccaagtcatggctgttgagaggcccatgaggtcaggcttagcacctcagttcatggcgcccttcacagaaactcaggcagaaaacttgcgtgtcatccttgactcttcctacctcacccacaccccactgccgattccccaccagttgctgccgcactttgttcagctctctgctcatcagaagcctcattga

SEQ ID NO: 152212 - DNA, 2659 bp, Homo sapiens
ggcacgaggcgcgcctcgcttgctgcgcgctgccggcgctccttcctcctcggctcgcgtctcactcagtgtaccttctagtcccgccatggccgctctcacccgggacccccagttccagaagctgcagcaatggtaccgcgagcaccgctccgagctgaacctgcgccgcctcttcgatgccaacaaggaccgcttcaaccacttcagcttgaccctcaacaccaaccatgggcatatcctggtggattactccaagaacccttggtgacggaggacgtgatgcggatgctggttggactttggccaaagtcaaggggcgtggaggccgcccgggagcgaatgttcaatgggtgagaagatcaactacaccgagggttcgagccgtgctggcacgtggcttctgcgggaaaccgggttcaaaacacaccccatccttggttagaacggcaaggatgttgatgccagaggtcaacaaggttctggacaagatgaagtctttcttgccagcgtgttcggagcggttaacttgaaggggtacacagggcaaagaccattcacggaccgtaatcaacatttggattggcggctccgacctgggacccctcatggtgactgaagcccttaagccatactcttcaggaggtccccgcgtctggtatgtctccaacattgatggaactcacattgccaaaaaccctggcccagctggaaccccgagtcctccctgttcatcattgcctccaagacctttactacccagggagaccatcacgaatgcagagacggcgaaggagtggttttctccagggcggccaaggatccttctggcagtgggcgaagactttttgtttgccctgtctactaacacaaccaaagtgaaggagtttggaattgaccctcaaaacatgttcgagttctgggattgggtgggaggacgctactcgctgtggtcggccatcggactcacttccattgccctgcacgtgggttttgacaacttcgagcagctgctctgcgctggctcactgtatggaccagctcttccgcacggacgcccctgggagaaagaacgcccccgtcttgctggccctgctgggtatctggtacatcaactgctttgggtgtgagacacacgccatgctgccctatgaccagtacctgcaccgctttgctgcgtacttccagcagggcgaacatggagtccaatgggaaatacatcaccaaatctggaacccgtgtggaccaccagacaggccccattgtgtggggggagcgcagggaccaatggccagcatgctttttaaccagctgcatccaccaaggcaccaagatgataccctgttgacttcctcatcccggtccagacccagcaccccatacggaagggtctgcatcacaagatcctcctgggccaacttcttggcccaggacagagggccctgatgagggggaaaatcgacggaggagggcccgaaaggagcttccagggttgcgggcaagagtccagaggacctttgagaggctgctgccacataaaggtctttgaaagggaaatcgccccaaccaacttctatgtgttcaccaaagctcacacccattcagcttggagcctggtcgcccatgtatgagcacaagattcttcgtttcagggtcatcatctggggacatcaacagcttttgacccagtggggaattggagctgggaaaagcagcctggcttaagaaaattggagcctgagcttgatggcaagtgctcaagtgaccttttcaggacgtttctaccaatgggctcatcaacttcatcaaagcagcagcgcgagggcccagagtcccaataaactcggtgctcatctgcagcctcctctgtgactcccactttttcttctcgtcccttttctccccgaagccggaattgattgttccttgaacacaaccacaaacacctctttgtttgtgggcttgaacccacgagcccttagcagggaaggctggtctcccccagcctaacccccagcccctccatgtctatgctccctctgtgttagaattggctgaagtgtttttgtgcagctgactttttctgaaaccatgttcacgttgttcacatcccatgtagaaaaataaagatgccacggaggaggttgtaggctcagcctctgattttttttttcctgtgatggtgctttatgtagcagagggcaggagcgctcagcaggacgcaggctgtgcctctgcggacacttaacactaagtggtgagcgggtctagagtggagcaaggtgccctgagaagacaatagtggggtgggggcacaatcagtcaggacggcaacttggcctgtgtcaccaaatcccaagactgttttccactcctcacctctgtgactggagaaattggatactctgttcactcgatggttctaaaaactgcattgagattatgtttgtttcgggtgaattccttgacaagaccccgaggatgactgccatctccctggcaagacgctcaggtagttcttttgctttaaaaaggcagatattgaaaactggaatttttttttttttgagtctcgctctggtcaccccagactggaagttcagtggtgcaatctcggctcactgcaacctccgcctcccgggagggctgaggcaggaga

SEQ ID NO: 152213 - DNA, 582 bp, Homo sapiens; identical to SEQ ID NO: 146258
  misc_feature (1)...(582): n = a,t,c or g

SEQ ID NO: 152214 - DNA, 1250 bp, Homo sapiens
cgagattcggcacgagggggaccgcgggatgggtgtcggcgtgaccaggcctgagctccctgtctctcctcagtgacatcgtctttaaaccccctcgtggcaatcccatgacgcaccgccgtgatgcccagggaagacagggcgacctggaagtccaactacttccttaagatcatccaactattggatgattatccgaaatgtttcattgtgggagcagacaatgtgggctccaagcagatgcagcagatccgcatgtcccttcgcgggaaggctgtggtgctgatgggcaagaacaccatgcatgcgcaagccccattcgagggcaccctgtaaaacaaccccagcctctggagaaaactgctgccttcatatccggggagaatttgggcttttgtttcacccagggaggaccctcactgagatcaagggacatgttgctggcccaataagggtgcccagctgctgccccgtcctggtgccatttgcccccatgtgaaagtcactgtggccagccccagaacactgggtctcggggcccgagaagacttctttttttccagggctttaggtatcacccactaaaaatctccagggggcacccattgaaaatcctgaagtgaatgtgccagctgaatcaagaactggagaccaaagtggggagcccagcgaaagccacggctggctgaacatgctcaaacatctcccccttcttcctttggggctgggtcatcccagccaggtgttcgacaaatggccagcattctaccaaacccctgaaagtgcttggattattcaccggaggaaaacttctgcaattctcggctttcctgggaggggtgtcccgcaaatgtttgccaagtgtctgtctgccagaattggcttacccaaactgttgcaatcagtaccccgattctatcatcaacggggtacaaacggagtcctggccttgtcttgtggagacgggattacacctttcccacttgctgaaaaggtcaagggcctttttggctgatccatctgcctttgtgtgctgctgcaacctgtgggttgctgccaccacagcttgcttcgctctgctgctgcagccccagctaaggttgaagccaaggaagagtcggaggagtcggacgaggatatgggatttggtctctttgactaatcaccaaaaaagcaaccaaccttagccagttttattttgcaaaaacaagggaaataaaggcttacttttttaaaaaaaaaaaaaaaaa

SEQ ID NO: 152215 - DNA, 401 bp, Homo sapiens
tcgttcaatcacctgcaagacgaaggaggcaaggatgctgttggcctgggtacaagcattcctcgtcagcaacatgctcctagcagaagcctatggatctggaggctgtttctgggacaacggccacctgtaccgggaggaccagacctcccccgcgccgggcctccggctgcctcaactggctggacgcgcagagcgggctggcctcggcccccgtgtcgggggccggcaatcacagttactgccgaaacccggacgaggacccgcgcgggccctggtgctacgtcagtggcgaggccggcgtccctgagaaacggccttgcgaggacctgcgctgtccagggggaaggatttgaaagaacagcatgatcagaaagtatgtgagagggagatgcagcgaa

SEQ ID NO: 152216 - DNA, 774 bp, Homo sapiens
atgctgttggcctgggtacaagcattcctcgtcagcaacatgctcctagcagaagcctatggatctggaggctgtttctgggacaacggccacctgtaccgggaggaccagacctcccccgcgccgggcctccgctgcctcaactggctggacgcgcagagcgggctggcctcggccccgtgtcggttactgccgaaacccggacgaggacccgcgcgggccctggtgctacgtcagtggcgaggcggcgtccctgagaaacggccttgcgaggacctgcgctgtccagagaccacctcccaggccctgccagccttcacgacagaaatccaggaagcgtctgaagggccaggtgcagatgaggtgcaggtgttcgctcctgccaacgccctgcccgctcggagtgaggcggcagctgtgcagccagtgattgggatcagccagcgggtgcggatgaactccaaggagaaaaaggacctgggaactctgggctacgtgctgggcattaccatgatggtgatcatcattgccatcggagctggcatcatcttgggctactcctacaagagggggaaggatttgaaagaacagcatgatcagaaagtatgtgagagggagatgcagcgaatcactctgcccttgtctgccttcaccaaccccacctgtgagattgtggatgagaagactgtcgtggtccacaccagccagactccagttgaccctcaggagggcaccaccccccttatgggccaggccgggactcctggggcctga

SEQ ID NO: 152217 - DNA, 424 bp, Homo sapiens
  misc_feature (1)...(424): n = a,t,c or g
gctagggtcacagcccctaactcataaagcaatcaaagaaccattagaaagggctcattaagccttttggacacaggaccccagagaggaaaaagtgacttgcccaaggtcgtaagcaagctactggcatggcaagagcccagcttcctgacggagcgcaacatttctccactgcactgtgctagcagctcagcagggcctctaacctgtgatgtcacactcaagaggccttggcagctcctagccataaagcttccttttcagaacccttccacttgccaatggggagacgggttaatggggctttctatggagccatttggtttggggacctaaacctcaagtggtcttcttgtggtaatgatgctggagnnnnnnnnnntaccggttctaactttctataaaggatttctctatatacatg

SEQ ID NO: 152218 - DNA, 2445 bp, Homo sapiens
tctgactgcaaggctgggactgggaggcagagccgccgccaagggggcctcggttaaacactggtcgttcaatcacctgcaagacgaaggaggcaaggatgctgttggcctgggtacaagcattcctcgtcagcaacatgctcctagcagaagcctatggatctggaggctgtttctgggacaacggccacctgtaccgggaggaccagacctcccccgcgccgggcctccgctgcctcaactggctggacgcgcacagcgggcttggcctcggcccccgtgtcgggggccggcaatcacagttactgccgaaacccggacgaggacccgcgcgggccctggtgctacgtcagtggcgaaggcggccgttcctgagaaacggcctttgcgaggaccttgcgctgtccaagagaccaccttccaaggccctgccagcctttcacgacagaaattcagggaaacgttttgaaagggccaagtgcagatgaaggtgcaagtgttcgctcctgccaacgccctgcccgctcggagtgaggcggcagctgtgcagccagtgattgggatcagccagcgggtgcggatgaactccaaggagaaaaaggacctggggaactctgggctacgtgctgggcattaccatgatggtgatcatcattgccatcggagatggcatcatcttgggctactcctacaagagggggaaggatttgaaagaacagcatgatcagaaagtatgtgagagggagatgcagcgaatcactctgccctagtctgccttcaccagccccacctgtgagattgtgaatgagaagactgtcgtggtccacaccagccagactccagttgaccctcaggagggcagcaccccccttatggggcaggccgggactcctggggcatgagcccccccagtgggcaggagcccatgcagactctggtgcaggacagcccaccctcctacagataggaggaactaccactttgtgttcatggttagaaccctaccactcccccgcttttttggcgaaatcctagtaagagtgacagaaagcaaggttgccctgtgggctgagggtaaaggctgggtagggtccttaacagtgctccttgtccatcccttggagcagattttgtctgtggatggagacagtggcagctcccacagtgatgctgctgctaagggcttccaaacattgcctgcacccctggaactgaaccagggatagacggggagctcccccaggctcctgtgtgctttactaagatggcctcagtctccactgtgggcttgagtggcatacactgttattcatggttaaggtaaagcaggtcaagggatggcattgaaaaaatatatttagtttttaaaatatttcgggatggaactccctactgacctctgagaactggaaacgagtttgtacagaagtcagaactttgggttgggaatgagatctaggttgtggctgctggtatgcttcagcttgctggcaatgatgtgccttgacaaccgtgggccaggcctgggcccagggactcttcctgtttcataaggaaaggaagaattgcactgagcattccacttaggaagaggatagagaaggatctgctccgcctttggccacaggagcagaggcagacctgggatgccccagtttctcttcagggatggatagtgacctgtcttcattttgcacaggtaagagagtaagttagctaacctatgggaattatactggggggccttgtgagctgcttctaagaggctaacctggaaactaagctcagaggcaaggtaataaagcacttcagggcttgctccccaagtgggcctgatttagcaggtggtcctgcgggcggtcagggtagcaactttcttgaagggcactggggcctagggtcacagccccttaacttcataaagcaatcaaaggaaccattagaaagggcctcattaaaccttttggaacacaggacccccagagaggaaaaaagtgacttgcccaaggtccgtaagcaagcttactggcaatggcaaggagccccagcttcctggacggagcgcaacattttcttccacttgcactgtgctagcagctcaaccagggccttctaaccttgtgatgtcacactcaagaggcccttggcaggctcctagccatagagcttcctttccagaacccttccactggcccaatgtgggagacagggggttagttggggctttctatgggagccatctgctttggggacctagacctcaggtggtctcttggtgttagtgatgctggagaagagaatattactggtttctacttttctataaaggcatttctctatatacatgttttatatacctccattcctgacaccctgcatatagtgtgggaaattgctctgcatttgacttaattaaaaaaaaaaaaaagactccaaaaaaaaaac

SEQ ID NO: 152219 - DNA, 3960 bp, Homo sapiens
  misc_feature (1)...(3960): n = a,t,c or g
ctgggtagacccacgcgtccggcaccgacattttgggcggtggccgtgagaacacgttgtttggctgaaaagcgaaggcaagagctgatgggggctctgtgctaccctccgcaaggggatcgttttctccaaaagagctggatattctttcgcccagttatggcagacaagttaacgagaattgctattggcaaccatgacaaatgtaaacctaagaaacgtcgacaggaatgcaaaaagagctgtcctgtagttcgaatggggaaaattatgcatagaggttacaccccagagcaaaatagcatggatttccgaaactctttgtattggttgtggtatctgtattaagaaatgcccctttggcgccttatcaattgtcaatctaccaagcaacttggaaaaagaaaccacacatcgatattgtgccaatgccttcaaacttcacaggttgcctatccctcgtccaggtgaagttttgggattagttggaactaatggtattggaaagtcaactgctttaaaaattttagcaggaaaacaaaagccaaaccttggaaagtacgatgatcctcctgactggcaggagattttgacttatttccgtggatctgaattacaaaattactttacaaagattctagaagatgacctagaagccatcatcaaacctcaatatgtagaccagattcctaaggctggcaaaggggacagtgggatctattttggaccgaaaagatgaaacaaagacacaggcaattgtatgtcagcagcttgatttaacccacctaaaagaacgaaatgttgaagatctttcaggaggagagttgcagagatttgcttgtgctgtcgtttgcatacagaaagctgatattttcatgtttgatgagccttctagttacctagatgtcaagcagcgtttaaaggctgctattactatacgatctctaataaatccagatagatatatcattgtggtggaacatgatctaagtgtattagactatctctccgacttcatctgctgtttatatggtgtaccaagcgcctatggagttgtcactatgccttttagtgtaagagaaggcataaacatttttttggatggctatgttccaacacgaaaacttgagattcagagatgcatcacttgtttttaaagtggctgagacagcaaatgaagaagaagttaaaaagatgtgtatgtataaatatccaggaatgaagaaaaaaatgggagaatttgagctagcaattgtagctggagagtttacagattctgaaattatggtgatgatgctaggggaaaatggaatgggtaaaacgacatttatcagaatgcttgcttggaagccttaaacctgatgaaggaggagaagtaccagttctaaatgtcagttataagccacagaaaattagtcccaaatcaactggaagtgttcgccagttactacatgaaaagataagagatgcttatactcacccacaatttgtgacccgantgtaatgaaagcctctgcaaattgaaaacatcattgatcaagaggtgcagacattatctggtggtgaactacagcgagtaacttttagccctttgacttgggcaaaacctacctgatgtctatttaattggatgaaccacctgccatatttggattcctgagcaaagactgatggcagctcgagttgtcaaacgtttcataccccatgcaaaaaagacagccctttgttgtgggaacatggactttcatcatgggccacctatctaggcggatcgcgtcatcgtttttgattggtgttccatctactaagaacacagttgcaaacagtcctcaaacccttttgggctgggcttgaataaatttttggtcttcagcttggaaatttacatttcaggaggagctccaaaccaactattgggccacggattaaacaaacttatttcattagaggatgtagaccaaaagaagagtggaaacctactttttcttggatgattagactgactctgagaatattgataagccatttattaaaaggagtatttactagaattttttgtcatataaaacttgaatcaggatttttatgcccccacatacctctgggaacttgaagtataatatacttaatataacataaaaagccagttgggttctaaattgtagttgaaacacagaaaatgccacttttctgttcctgaagaggctcttttgtgcataatattctaaaatgaagacatttcaagctatacaaattacttccaagttttcatgatgtatgggaagattttcagtaggtgtattatattcacggtaccaaatgctgaccagtgttgctccattttttaaatcttgaaaagggtttctgtacttacctggtttgccaagtatgccagtgtaatgaaactgcccttattttaaaagccagtcaaagattccactgattgacatttgataaataaacatcaggattatgtttattgtttgttttcagtctttgcactatattaccagtatatggtttccgaggaagattatctactgcaaaacaccactgttggaaaaataggtatttttaaattgtttttaatccttttttggtgcttttaaacatgtttaagcaaaaaccaattcagttccattccccgcaaaaaacccctaactttactctgaactttttttgtttttgcattccatgaggttctgtattcagtcattctctaggtaatgtcatttttgtacacatatatttatataatcactgattgagatttaggaaaaagcatttgtaaagaatatttgcttcccttagaactacagactcgaaatctttaaagatggggcctaagcatctatgtattttttttaagttccacagatttttctgttgggcaggccaaggattataaaccacttccctaaaggcaacattaatgcaaaagtccccagatggcaatacaaagtatcccctggtaccacatatattcatttgtgagtttggatatagagcacattatctaaaccattttgtagttccaaaaacccatctaaatttcttgagttcctgaattttgaacaggattacctggagcctggagccactttaagttgtacttctgactaaactggaattatgagtgaggaagagtgtttactaaaataaatgactgcggcaagcaaaattgagtaggaaattagaaactgtttgacaacctttaagaggctccttgaaataacagaagtcttgattaatatgcaaataatggctaagaaagtatggtttaactggaccctattatgccttttaaaaataatttcagtaacccataaatacatgttgtaaaaaattcaaatatacagaatggaataaaaaaaatgatctccctttattaccctcccaaaggttaccagcgtttgaatttaataatgtatattctttcatgctttttttctgtgcacttacctaagtgtgaatatgtaaagggtttggttttgtatacaaatgggattatactaaaataagtaatgcctatttttaaggataggttaaatttgtgaatgatcatttcaaatatattgaataaaataagccaaaagctattgttatttactgatcctggattgtcttaaagaaagtacttgtgatataagagcacagttctacttactgctaatgacagaatatgtattaaacgtattttcatgtaaatgaaatctttaaaatatgtatcttaaaattttacatagcaacagaaaggcctacaattgctaacacaagaaaaatacttataaaatcagtataaaatcaatgcagatgttagcaaaagaatgagactacttcatatgtcctaattggaaaaagtctcaaatacttaaaaaaacaaaaaactggaacagtttattatactaccatttttgtgaaaatatacaaaatattgaaataaaggaatactcaagaaac

SEQ ID NO: 152220 - DNA, 414 bp, Homo sapiens
  misc_feature (1)...(414): n = a,t,c or g
gggtggtggggcttctggactgagccgctgagggtgcgggctgaccctgtaagtggctgcggcgggaagatggcggagctgcgcgtgctcgtagctgtcaagagggtcatcgactacgccgtgaagatccgagtgaagcctgacagctgacctgaggctcaacgagccccgctacgccacgctgcccaacatcatgaaagccaagaagaagaagatcgaggtgatcaagcctggggacctgggtgtggacctgacctccaagctctctgtgatcagtgtggaggacccgccccagcgcacggccggcgtcaaggtggagaccactgaggacctggtggccaagctgaaggagattgggcggatttgagcccctcccagagatggcaataaaactgactctcaacatcaaaaaan

SEQ ID NO: 152221 - DNA, 457 bp, Homo sapiens; identical to SEQ ID NO: 119969
  misc_feature (1)...(457): n = a,t,c or g

SEQ ID NO: 152222 - DNA, 1047 bp, Homo sapiens
  misc_feature (1)...(1047): n = a,t,c or g
atggagcagtgcgtagtcacagaaaccctcctgcacctgcaccaactctggggcttcctgccgggatctcatatcctgagccagatcccctgtggggaaatgagggagacgattcgtaccgccctggccatgggtgcagaccgaggtatccacgtggaggtgcccccagcagaagcagaacgcttgggtcccctgcaggtggctcgggtcctggccaagctggcagagaaggagaaggtggacctggtgctgctgggcaaacaggtagctgtggtcagccctccctgtgcccccttgctcatccctgctcgggaggagggtggtggagatacgggnaccccccccctcctccctccatacggcccggacccgccgaccatcacggtctcctcggaccgcgacgccgcgcctgcccgctttgtcaccgcgggcagtaacgtgaccttgcgctgcgccgccgcctcgcggccgcccgccgacatcacgtggagcctggcggacccggccgaggccgcggtgcccgcggggtcgcgcctcctgctgcccgcggtcggaccgggccacgcaggcacctacgcctgcctggcggcgaacccgcgtaccggccgccgccgccgctcgctgctcaaccttacagtggcgggcggccctggcaagagagtccatggagtggtcgagaggattcgatgtgttcctatgagcacagcccgtacctgcgaagaacgtcatgagcactgccacccagcccaggatgtaggaccaggaaaagcgccagtccccaaagcggcggcccaggaagctgacggtgactccagtgtagatggccaaggccaacacgacgaaaagggctggggagagagggcgggaggatgcagccccattaccagtgctcaaggttacccacaaacggcgccagagtgcccatatatgacagtccaggtcctagacatcacccaccagcccttttatgtggatctccaccaccagatcccagatccctggatcctcattctcagggtctttgagacccatggtgccagtcactag

SEQ ID NO: 152223 - DNA, 888 bp, Homo sapiens
atgggggtgaagcggagcctccagagtgggggcattctgctcagcctcgtggccaacgtcctcatggtgctctccacggccaccaactactggacccgccaacaagagggccacagtggcctgtggcaggaatgcaaccacggcatctgctccagcatcccctgccagagtgaggctccgcccgcccagatgtcagagggcatttcagacccccagggctcgggacacacagctgggcccatggcgagacgcccaccccttccaccccgggctcagttgcagctgtcccttgtcggccgaggccgccacgaaccccgcccctcgacttgtgggcttgtccccgaccccctccccgtcctggtagcggcagtaaccgcaggtcctgatgtgacctccaagtctcaatccaaacgcctgactcccgccacgctggcggtgactgtggcgtgcatggtgctggcggtgggtgtcggcgtggtgggcatggtgatgggactgcggattcggtgcgacgagggcgagtcgctgcggggccagaccacgagcgccttcctcttcctcggcggactgctgctgctgaccgccttgagaggctccccagctgccctcccaggaaaccccggggacttctcggggactccccaacacactaacgactcccgcagacccggcagagacccccttggagccccaaaccccagtccccggggccctcccggccatccgccccagggcccaccttcctctccctgtccgcacccccgtccccccaggcttctgctttctgctggcagacatgatcatgcagagcggcgacgccatcagtggattccccgtgtgtctgtgactgcagcctgcctggggcagaataaaggaacggcttttttt

SEQ ID NO: 152224 - DNA, 928 bp, Homo sapiens
gactgtggcgtgcatggtgctggcggtgggtgtcggcgtggtgggcatggtgatgggactgcggattcggtgcgacgagggcgagtcgctgcggggccagaccacgagcgccttcctcttcctcggcgatccgagtgaagcctgacaggaccggtgtggtcacggatggtgtgaagcactccatgaaccccttctgtgagatcgcggtggaggaggctgtgcggctcaaggagaagaagctggtgaaggaggtcatcgccgtcagctgtgggcctgcacagtgccaggagacgattcgtaccgccctggccatgggtgcagaccgaggtatccacgtggaggtgcccccagcagaagcagaacgcttgggtcccctgcaggtggctcgggtcctggccaagctggcagagaaggagaaggtggacctggtgctgctgggcaaacaggcccatcgcatgcactgactgtaaccagcacagggcagatgacagctggaatttcttgactggccaacagggcaaattcgccctccccaggtgacgctggagggggacaagttgaaagtggaaccgggaaaatcgattgggggcttggaaacaccctgcgcctgaaagctgcccagctgtgggtgacagcttgaccctgaggttcaacggaggcccccgtacgccacgtgtgcccaacatccatgaaagcccaagaagaagaagatcgaaggtgatcaagccctggggaccctgggtgtggacctgaccctcccagctctctgtgatcagtgtggaggaccccgccccagcgcacggccggcgtcaaggtggagaccactgaggacctggggggccaagctgaaaggagattgggcggatttgagcccctcctagagatggcaataaaactgactctcaacatctaaaaaaaaaaaaaaaaa

SEQ ID NO: 152225 - DNA, 2832 bp, Homo sapiens
atggagtgcatctgccccaagtggaggcagcagcagcagcaggagggaggtgtcggggcagtggggccgcaggccagtcctcagggcactggttcctctgtgaaccctgtggcctcttctgtagccccacaggctgggcacaacaacaatcacctggcgatcgcaggccgtcttcaaaggaaaaagaaaaaaacaaaaccacgaaacccaaaaaacctcaccattgatgtcatgccgatcaccccgtgggctgataaacaagtcctggagcagatagcatccctgggcaggggcatcttattggccctctcatctgagtttgccttctgccaggtggatgcctccatcgctctggccctggccctggccgtcctgtgtgatctgctccagcagtgggaccagttggcccctggactgcccatcctgctgggatggctgttgggagagagtgatgacctcgtggcctgtgtggagagcatgcatcagcaggccaagggttcaaaacgcattgtccctctttatgagaaatttggagacatggccccggcgctcaagccctgtttactgagcctgggcggggagggggcggagaaacgagcccgggctccaccggcaagactgccgcggcggccgcccgcgtggccacccccacccccaccgcgactccacgtgcagtcgggctggagccgccaccgactggacgcaggccccgagcccccgcctcctggccggggcaccctttgcaaacccgccgggccgcggggatggttgcgatattctggcattttgcaattcccgcgcccagtacaaaaccgaaggtgggagcttaaagctccacaggtccgcctcggagaacagggcagggaaagacacgtccagggctgcagaatcccggccacgctaaacgtaccggggctctccgaccgcgcagccccggaggagaacagccgtgccttcccgccgccacccggcggcatccactggggccgagagctacacgccacaccggccgcccgggccgccggccccgcccggaggcctccagcaccctcccccggaggaaaaaaattggcggcggccaatgggaggccgggaaggcgcctgacgtccgcgagcgggcgggcggcgttgcctggagaccccggcgggggccgagttctgtcccctcccccggcgcgcccgccccgccgcagccgcactcccgggctctatatagggcgcgcgctcggaggccgccgagttccagcagtccgcgagctgccgtcggctccgcggggggggcgggccgggcaccccggggcgcggaggagcgctcctcgcttctctccttcccccctgccgcactccgccggaccctcccgacggctcgtgtcgctgcactcgccctctcctctcgcccctcggcaaactttcggcccctccccgccctcgcccgttattcgtcgtggctcaagccggccacgccccccaagggctcctcccgacctcccggcctgccgctccggccactgcgggatccagaaacatgtcgaccacacttctgtccgccttctacgatgtcgacttcttgtgcaagacagagaaatccctggccaacctcaacctgaacaacatgctggacaagaaggcggtggggacgcctgtgccgccgcccccagctcgggcttcgcgccgggattcctccgacggcactcggccagcaacctgcatgcactcgcccaccccgcgcccagccccggcagctgctcgcccaagttcccgggcgccgctaacggcagcagctgcggcagcgcggcggccggcggagccgtcggggggcggcgcacagccctgctcaacaaggagaacaaattccgggaccgctcgtttagcgagaacggcgatcgcagccagcacctcctgcacctgcagcagcagcagaaggggggcggcggctcccagatcaactccacgcgctacaagaccgagctgtgccggcccttcgaggagagcggcacgtgcaagtacggcgaaaagtgccagttcgcgcatggcttccacgagctgcgcagcctgactcgccatccgaagtacaagaccgagctgtgccgcacctttcataccatcggcttctgcccctatgggccgcgctgccacttcatccacaacgcggacgagcggcggcccgcgccgtcggggggccctccggggacctgcccccacgtcgcgcacgccgccgccgccctcctgctcttcggcctcgtcctgctcctcctccgcctcctcctgttcctcggcctccgcggcctccacgccctcgggcgccccgacatgctgcgcctccgcgccggccgcggctgcggccgctctgctgtacggcaccgggggcgccgaggacctgctggcgccgggggccccgtgcgcggcctgctcgtcggcctcgtgcgccaacaacgccttcgccttcggtccggagctcagcagcctcatcacgccgctcgccatccagacccacaactttgccgccgtggccgccgccgcctactaccgcagtcagcagcagcagcagcagcagggcctggcgcccccgcgagcgccgggccgcccagcgcgaccctccccgccggggccgccgcacctccctcgccgcccttcagcttccagctgccgcgccgcctgtccgactcgcccgtgttcgacgcgccccccagccccccggactcgctgtcggaccgcgacagctacctaagcggctccctgagctccggcagcctcagcggctctgagtctcccagcctcgaccctggccgccgcctgccaatcttcagccgcctctccatctccgacgactga

SEQ ID NO: 152226 - DNA, 3386 bp, Homo sapiens
caggccaagggttcaaaacgcattgtccctctttatgagaaatttggagacatggccccggcgctcaagccctgtttactgagcctgggcggggagggggcggagaaacgagcccgggctccaccggcaagactgccgcggcggccgcccgcgtggccacccccacccccaccgcgactccacgtgcagtcgggctggagccgccaccgactggacgcaggccccgagcccccgcctcctggccggggcaccctttgcaaacccgccgggccgcggggatggttgcgatattctggcattttgcaattcccgcgcccagtacaaaaccgaaggtgggagcttaaagctccacaggtccgcctcggagaacagggcagggaaagacacgtccagggctgcagaatcccggccacgctaaacgtaccggggctctccgaccgcgcagccccggaggagaacagccgtgccttcccgccgccacccggcggcatccactggggccgagagctacacgccacaccggccgcccgggccgccggccccgcccggaggcctccagcaccctcccccggaggaaaaaaattggcggcggccaatgggaggccgggaaggcgcctgacgtccgcgagcgggcgggcggcgttgcctggagaccccggcgggggccgagttctgtcccctcccccggcgcgcccgccccgccgcagccgcactcccgggctctatatagggcgcgcgctcggaggccgccgagttccagcagtccgcgagctgccgtcggctccgcggggggggcgggccgggcaccccggggcgcggaggagcgctcctcgcttctctccttcccccctgccgcactccgccggaccctcccgacggctcgtgtcgctgcactcgccctctcctctcgcccctcggcaaactttcggaccctccccgcccctcgcccgttattcgtggaggatcaagcccggccacgccgccccaagggctcctcccgacctcccggcctgccgctccggccactgcgggatccagaaacatgtggaccacacttgtgtccgccttctacgatgtcgacttcttgtgcaagacagagaaatacctggccaacctcaacctgaacaacatgctgggacaagaaggcggtggggacgcctgtgggcggccggcccccagctcgggcttcgcgccgggattcctccgacggcactcggccagcaacctgcatgcactcgcccaccccgcgcccagccccggcagctgctcgcccaagttcccgggcgccgctaacggcagcagctgcggcagcgcggcggccggcggtccgacctcctacggcacccttaaggagccgtcggggggcggcggcacagccctgctcaacaaggagaacaaattccgggaccgctcgtttagcgagaacgggcgatcgcagccagcacctcctgcacctgcagcagcagcagaaggggggcggcggctccccagatcaaatccccacgcgctacaagaccgagctgtgccggcccttcgaagaagagcgggcacgtgcccagtacggcgaaaaagtgccagttcggcgcatggcttcccacgagctgcgcagcctgactcgcccatccggaggtccaagaccgaagctgtgccgcaccttttcataccatcggcttctgcccctatgggccgcgctgccacttcatccacaacgcggacgagcggcggcccgcgccgtcggggggcgcctccggggacctgcgtgcctttggcacgcgcgatgcgttgcacctgggcttcccgcgggagccgcggcccaagttgcaccacagcctcagcttctcgggcttcccgtcgggccaccatcagcccccgggcggcctcgagttcgccgctgctgctcgacagccccacgtcgcgcacgccgccgccgccctcctgctcttcggcctcgtcctgctcctcctccgcctcctcctgttcctcggcctccgcggcctccacagccctcgggcgccccgacatgctgcggcttccgcggcggccgcgctgcgtctgctgtacggcaccgggggcgctttaggacctgctggcgccgggggccccgtgcgcggcctgctcgtcggcctcgtgcgccaacaacgccttcgccttcggtccggagctcagcagcctcatcacgccgctcgccatccagacccacaactttgccgccgtggccgccgccgcctactaccgcagtcagcagcagcagcagcagcagcagcagggcctggcgccccccgcgcagccgccggcggccgcccagcgcgaccctccccgccgggggccgccggcacctccctcgccggcctttcagcttccagctgccgcgccgcctgtccgactcgcccgtgttcgacgcgccccccagccccccggactcgctgtcggaccgcgacagctacctaagcggctccctgagctccggcagcctcaagcggttctgagtcttccaagctttgaccctggccgccgcctgccaatcttcagccgcctctccatctccgacgactgaggcaagagggcgccagtgaggaggaagggaaggcggttcagagatgttggaggacacccctcgccatctcgcccttgctgggggcacgaggagtggggggggtgacatgggccctaggcagactgcaagcccgaccgagcacttggactcgaactctgtgccgggaggggcccccacccctcctttttcggtttcctcttgtctttttttttttttttttattacgaagtttcattctttttgagcaaaaaagtcgaactttttctgttgaacaaaatattcacaacagggcagttgtgatacgaatagaacaaaaaaaaaaaaaaaaacacttaaactttgttaggactccgatgagtttgggacttcaggaaaaatcaacccagcaccagcagctaccaaccaccattccatctcttcacttgaacagcattagttaagtccagatgtgggaacccttctcttggaagaagttcctaattgtgtctcagaccggtgtaaacaaaccagccagccgccaccttgctaaacctataagctttttaaaatccaatatattctgccaagaatatgccttgatagttagccctcagcccataggtgttttttgttttttaacagaattatatatgtctgggggtgaaaaaacccttgcattccaaaggtccatactggttacttggtttcattgccaccactttagtggatgttcagtttagaaccattttgtctgctccctctggaagccttgcgcagagcttactttgtaattgttggagaataactgctgaatttttaagctgttttgagttgattcgcaccactgcaccac

SEQ ID NO: 152227 - DNA, 403 bp, Homo sapiens
  misc_feature (1)...(403): n = a,t,c or g
nnnnnnnnnnnnnnnnnnnnnnnnnnnnnnnnnnnnnnnnnnnnnnnnnnnnnnnnnnnnnnnnnnnnnnnnnnnnnnnnnnnnnnnnnnnnnnnnnnnnnnnnnnnnnnnnnnnnnnnnnnnnnnnnnnnnnnnnnnnnnnncaagaaaattggatgtatattttgaatatgaagaaaaaataatgagcaaaactactctggataaatctcttctagatataatatcagaccctgatgcaggaactccagaagataaaatgagggtgtttcttatctattatataagcacacagcaagcaccttctgagggcttttaccaagatggcctcagctccggccagctatggcagcactaccactaaaccaatgggtcttttatcacgagtcatgaatacaggatc

SEQ ID NO: 152228 - DNA, 710 bp, Homo sapiens
  misc_feature (1)...(710): n = a,t,c or g
aaggtttttgaccaatatctcaatttntatnactttggaagatgatatgtntgtantatgtaatcaaataaagnagcttgtttcatatcgtgccattaacaggccagatatcacagacacggaaatggaaactgttatggacactatagttgacagcctcttctgcttttttgttactctgggggctgttcctataatcagatgttcaagagggaacagcagcaaaaaatggtagcaagtgaaactagcccagaaactttcgagaaaaatctaagagattgcaagaacagtccttttaccaggtgatacacttggagctggccaattcagcttccagaggcccttattagtccttgttgacagaaacatagatttggcaactcctttacatcatacttggacatatcaagcattggtgcacgatgtactggagaggtggatttgattgttcagctgcagagctgtggacttcagtcaaagggatggacattattttatctctgtttttttacttggcctttattttttcaaatcttaggttctctttttgtacctttcaccctctgctactgactcttattatttgaaacattaaatcggaagttatactaatagacatagggactttaattaaagtttacctttttttccagtcaagaataaaaaaaaaatggtttccaaataaatatgaattatattaaaaggtaaaa

SEQ ID NO: 152229 - DNA, 2303 bp, Homo sapiens
gataaaaactcttagtattcgcctaacattacgggccactgaattaacctgcaccgggtctcccagttctaccgagagtggaggtcttcctggaggagccgggcagtggctcgtgggagccaagatggcggcggcggcggcagcgacagcagcagcagtcagccttcattcaggaaagacagccagttgctctcatgcgtttattgtctttcaatgtgcctcatattaaaaacagcacaggagcacccatatggaaggtactcacttatgcacagatttggccaagatatattctctcctctgctatctgtaagggagctaagagacatgggaatcactctgcatctgcttttacactctgatcgagatcctattccagatgttcctgcagtatactttgtaatgccaacttgaagaaaatattgacagaatgtgccaggatcttcgaaatcaactatatgaatcatattatttaaattttatttctgctatttcaagaagtaaactggaagatattgcaaatgccagcgttcggggcctaagtgcaagtaacacaagtagccaaggtttggggaccaatatctcaattttattactttggaagatgatatgtttgtattatgtaatcaaaataaggagcttgtttcatatcgtgccattaacaggccagatatcacagacacggaaatggaaactgttatggacactatagttgacagcctcttctgcttttttgttactctgggtgctgttcctataatcagatgttcaagaggaacagcagcagaaatggtagcagtgaaactagacaagaaacttctagaaaatcttatgagatgcaagaaacagtcttttctacagggtggatacacttggagctggccatttccagcttccagaggcccctattagtccttgttgacagaaacatagatttggcaactcctttacatcatacttggacatattaagcattggtgcacgatgtactggatttccatttaaacagggttaatttggaagaatcttcaggagtggaaaactctccagctggtgctagaccaaagagaaaaaacaagaagtcttatgatttaactccggttgataaattttggcaaaaacataaaggaagtccattcccagaagttgcagaatcagttcagcaagaactaggaatcttacagagcacaggaagaatgaggtcaaacgacttaaaagcattatggggactagaaggggaagatgaaggagccataagtatggctttctggacaataccgctaagctaacatcagctgttagttctttgccagaactccttgagaaaaaaagacttattgatctccatacaaatgttgccactgctgttttagaacatataaaggcaagaaaattggatgtatattttgaatatgaagaaaaaataatgagcaaaactactctggataaatctcttctagatataatatcagaccctgatgcaggaactccagaagataaaatgaggttgtttcttatctattatataagcacacagcaagcacgttctcgaggctgatttgcagcaatataaaaaagctttaactgatgcaggatgcaaccttaatcgttcacgatatatcaaacagtgaagggcttttacccaagatggcatcagctctgagcaggctatggcagacactaccactaaaacaatgggtcttttatcacgagtcctgaattacaggatcacagtttgtgatgggaaggagtgaagaacctggttttgaaacagcaaaatctacctgttactccgtattttggacaaatcttatggagaaggaagtcaaacccccgaaaactgatggactatagatattttgatcccaaaaatgcctgcgggggcaatgacagctccagttccccagaaattaaaaatcccattcccaagaggccattcgtttttcgtcggtggcgaggagggcaactacatttgaatatcagaatctttggtgactacataaaggggaaacaaggcaaacacattttataatggctgcaggtgagctttttaatggctacacagttcataaaacagttgtcacaacttggacaaaagtaaccccaaagacccctttctatgataatctccttggaatgtggataaatgtaaaaagaagaaaagttagaagagcaatatgtttccttctctgtaacagtgtcctaacagtgaaaatcagagttatttgttaatttttaaggaaattatatacttaatatgtattgattaaaagaaacctttcagaaataaaatttcaacattg

SEQ ID NO: 152230 - DNA, 394 bp, Homo sapiens
gcgggtggtcgggctgcatcctgccttcagagtcttactgcgcggggccccagtctccagtcccgcccaggcgcctttgcaggctgcggtgggatttcgttttgcctccggttggggctgctgtttctcttcgccgacgtggatcctctatccttcagagactctggaacccctgtggtcttctcttcatctaatgaccctgaggggatggagttttcaagtccttccagagaggaatgtcccaagcctttgagtagggtaagcatcatggctggcagcctcacaggattgcttctacttcaggcagtgtcgtgggcatcaggtgcccgcccctgcatccctaaaagcttcggctacagctcggtggtgtgtgtctgcaatgccacatactgtg

SEQ ID NO: 152231 - DNA, 536 bp, Homo sapiens
atcgaatatacatattccgggtaccatggccagctgtgactctccatccgcaccacactaatgcagacacccctgatgatttccagttgcacaacttcagcctcccagaggaagataccaagctcaagatacccctgattcaccgagccctgcagttggcccagcgtcccgtttcactccttgccagcccctggacatcacccacttggctcaagaccaatggagcggtgaatgggaaggggtcactcaagggacagcccggagacatctaccaccagacctgggccagatactttgtgaagttcctggatgcctatgctgagcacaagttacagttctgggcagtgacagctgaaaatgagccttctgctgggctgttgagtggataccccttccagtgcctgggcttcacccctgaacatcagggcggaagccttaaagcagcagcgggtgtgcccaggcacccagatgattcctatggcaccagccaggaaaaatggcagctcttaaaggagaaaatgtttgagcccaaaaaa

SEQ ID NO: 152232 - DNA, 2474 bp, Homo sapiens
acccatacatgccctccagagttttatagggcatataatctgtaacagatgagaggaagccaattgccctttagaaatatggctgtgattgcctcacttcctgtgtcatgtgacgctcctagtcatcacatgacccatccacatcgggaagtcggaattacttgcagggctaacctagtgcctatagctaaggcaggtacctgcatccttgtttttgtttagtggatcctctatccttcagagactctggaacccctgtggtcttctcttcatctaatgaccctgaggggatggagttttcaagtccttccagagaggaatgtcccaagcctttgagtagggtaagcatcatggctggcagcctcacaggattgcttctacttcaggcagtgtcgtgggcatcaggtgcccgcccctgcatccctaaaagcttcggctacagctcggtggtgtgtgtctgcaatgccacatactgtgactcctttgaaccccccgacctttcctgcccttggtaccttcagccgctatggagagttacacgcagtgggcgaacgggatggagcttgagtatgggggcccatccaggctaatcacacgggcacaggcctgctactgaccctgcagccagaacagaagttccagaaagtgaagggatttggaggggccatgacagatgctgctgctctcaacatccttgccctgtcaccccctgcccaaaatttgctacttaaatcgtacttctctgaagaaggaatcggatataacatcatccgggtacccatggccagctgtgacttctccatccgcacctacacctatgcagacacccctgatgatttccagttgcacaacttcagcctcccagaggaagataccaagcttcaagatacccctggatttcaccgagccctgcagttggcccagcgtcccgtttcactccttgccagcccctggacatcacccacttggctcaagaccaatggagcggtgaatgggaaggggtcactcaagggacagcccggagacatctaccaccagacctgggccagatactttgtgaagttcctggatgcctatgctgagcacaagttacagttctgggcagcgacagctaaaaatgagccttctgctgggctgttgagtggataccccttccagtgcctgggcttcacccctgaacatcagcgagacttcattgcccgtgacctaagtcctaccctcgccaacagtactcaccacaatgtccgcctactcatgctggatgaccaacgcttgctgctgccccactgggcaaaggtggtactgacagacccagaagcagctaaatatgttcatggcattgctgtacattggtacctggactttctggctccagccaaagccaccctaggggagacacaccgcctgttccccaacaccatgctctttgcctcagaggcctgtgtgggctccaagttctgggagcagagtgtgcggctaggctcctgggatcgaggggatgcagtacagccacagcattcatcaacaaacctcctggtaccatgtggttggcttggacggctgggaaccttgccctgaaccccgaaggaaggacccaattgggtgcgtaactttgtcgacagtcccatcattgtagacatcaccaaggacacgttttacaaacagcccatgttctaccaccttggccacttcaagcaaagttcaattcctgaggggctcccagagagtggggctggttgccaagtcagaagaacgacctggacgcagtgggcactgatgcatcccgatggctctgctgttgtggtcgtgctaaaccgctcctctaaggatgtgcctcttaccatcaaggatcctgctgtgggcttcctggagacaatctcacctggctactccatttcacacctacctgtgggcgtcgccagttggatggagcagattactcaaggaggcactggggctcagctggggcatttaaagggacagagtcagctcacacgctgtctgtgactaaagagggcacagcagggccagtgtgagcttacagcgacgtaagcccaggggcaatggtttgggtgactcactttcccctctaggtggtgcccaggggctggaggcccctagaaaaagatcagtaagccccagtgtccccccagcccccatgcttatgtgaacatgcgctgtgtgctgcttgctttggaaactgggcctgggtccaggcctagggtgagctcactgtccgtacaaacacaagatcagggctgagggtaaggaaaagaagagactaggaaagctgggcccaaaactggagactgtttgtctttcctggagatgcagaactgggcccgtggagcagcagtgtcagcatcagggcggaagccttaaagcagcagcgggtgtgcccaggcacccagatgattcctatggcaccagccaggaaaaatggcagctcttaaaggagaaaatgtttgagccca

SEQ ID NO: 152233 - DNA, 2385 bp, Homo sapiens
aattgccctttagaaatatggctgcaattgcctcacttcctgtgtcatgtgactctcctagtcatcacatgacccatccacattgggaagccagaattacttgcaggagtaacctagtgcctatagctatggcaggtacctgcatccttgtttttgtttagtggatcctctatccttcagagactctggaacccctgtgctcttctcctcatctagtgaccctgaggtgatggagttttcaagtccttccagagaggaatgtcccaagccttcgggtagggtaagcatcatggctggcagcctcacaggattgcttctacttcaggcagtgtcgtgggcatcaggtggtgcccctgcatccctaaaagcttcagtacagctcggtggtctgtgtctgcaatgccacatactgtgactcttgaccccccgacctttcctgccctaggtgccttcagccgctacaagagcagaagcagtgggcattggatggagctgagtacaggaccatacaggctaattgcaccggcacaggcctgctactgatcctgcagccagaagttccagaaagtgaagggatttggaggggccgtgacagatgcaggtgccctcaacatccttgccctgtcaccccctgcccagaatttgctacttaaatggtacttctctgaagaaggaatcggatataacatcatctgggtacccatggccagctgagacttctccatccgcacctacacctatgcagacaccccgtgatgatttccagttgcacaacttcagcctcccagaggaagataccaagctcaagatacccctgattcaccgagccctgcagttgggcccagcgtcccgtttcactccttgccagcccctgggacatcacccactcggctcaagaccaggggagcggggaatgggaaggggccactcaagggacagcccagagacatctaccaccagacctgggccagatacattgtgaagttcctggatgcctatgctgagcacaagttacagttctgggcagtgacagctgaaaatgagccttctgctgggctgttgagtggataccccttccagtgcctgggcttcacccctgaacatcagcgagacttcattgcccgtgacctaggtcctacccttgccaacggtactcaccacaatgtccgcctactcatgctggatgaccaacgcttgctgctgccccactgggcaaaggtggtactgacagacccagaagcagctaagtatgttcatggtattgctgtacattggtacctggactttctggctccagccaaagccaccctaagggagacacaccacctgttccccaacaccatgctctttgcctcagaggcctgtgtgggttccaagttctgggagcagagtgtgcggctaggctcctgggatcgagggatgcagtacagccaaaagcatcatcaaaaaacttcctgtacccatgtgggtcggctgggaaccgaactggaaaccccatcattgtaaaacatcacccaagcaacacgttttaacaaacagccccatgttcctaccacccttggccaacttcagcaagttcattccctgagggctccccagagagtggggctggttgcccagtcagaagaacgaccctggacgcagtggcactgatgcatcccgatggctctcctgttgtggtcgtcctaaaccgctcctctaaggatgtgcctcttaccatcaaggatcctgctgtgggcttcctggagacaatctcacctggctactccattcacacctacctgtggcgtcgccagtgatggagcagatactcaaggaggcactgggcttcagctggggcattaaaaggacagagtcagctcacacgctgttctgtgactaaagaggggcacagcagggccagtgtgagcttacagcgacgttaagcccaggggcaatggtttgggtgactcacctttcccctctaggtggtgccaggggctggaggccccctagaaaaagatccagtaagccccaagtgtcccccccagccccccatgccttatgtgaaacatgccgcctgtgtgcctgccttgcctttggaaacttgcgcctgggtcccaggccctagggtgagctcactgtccgtacaaaccacaagatcagggctgagggtaaggaaaagaagagactaggaaagctgggcccaaaactggagactgtttgtctttcctggaaatgcagaactgggcccgtggagcagcagtgtcagcatcagggcggaagccttaaagcagcagcgggtgtgcccaggcacccaaatgattcctatggccccagccaggaaaaatggcagcttttaaaggagaaaatgtttgagcccagtcaaaaaaaaaaaaaaaaaaa

SEQ ID NO: 152234 - DNA, 1415 bp, Homo sapiens
  misc_feature (1)...(1415): n = a,t,c or g
actagtgccatgcttttgtgagctcttggtatggcccatattactttgttttttttttttttattgttgttttgtgatagtcttgctctgtcgcccaggctgcagtgcagtggcacaatctcagctcactgcaacctcgtgcctcctgggttcaagcaattctcctgtctcagcctcctgggtagctgggactacaggtgcatgccaccatgccttggctaacttttgtatttttagtagagacagggtttcaccacgttggtcaggctggtctcgaactcctaacctcaggtgatccacctgccttggcctcccaaagtgctgagattacaggcgtgagcccccgcgcctgggccctgtttgtttttttaacatgatttttctctaagcttaaataccacaaggccaaagagaaatggtcataatttaaaccattattatattgttgagggatccctagctattattatagcaaagtgggaaaaaacgtgtttattcctattgaagttatgtaatgatcccgacattaatggggaatatagaggagtcctaattaattgggtataatttcacaaagcgggaatgggtattccttgggaggagttaaaggacattctctttacgtaagtgtaaacccaaggggcatttttctttattcctgccttctaattccttcctagcccaggtgaattaatttcctctttttccnctgggtaaatgtgatgaatggggaattgttttattacatttgaagttgacttgaagtgaccttttgtgctttaggtgcaggttgacactgaaaaaaaaacaaaacactgaatttttcacacctatgtctgcattaaaggctgtttaactaaccggaagttaccataggacttccctgtcagtcagctgctgtgccccccagtgccttactggtcccttggtagatttgccttaatgatttgtacaaatgactgggaggcggggatgctgcctggtgtcctggtgaaccttaatggaagggggccggtcttaggcaccagtgccaaaacaagccatttgtcctgtactggttagagccgaaaattgtgatgagcaatactgataattggccccagtttaatggccatcctttcccccagattttaaaaatctgttctaagatattcttagcttgaacccacttttggattgtgaaatgtattagggtngttgtccccattattactgtaaaaatggaagttttgaatcttcttgttaataaactgtgggatttcccctctcaatttcttaaacaacaacaaaaaaatgcttgaaggattgtctttgagtgtaagatctgccttttcagaaaggggagtgttagtttgtaatgttaaaaaataaagacctcattcaataaaagttgaagtcatcttttaaaaaaaaaa

SEQ ID NO: 152235 - DNA, 684 bp, Homo sapiens
ttagtttctttgacttataccatgtggtccccaactctttaactgtctgtccttatagccaggattctgggcgatggtaaagttcgcctgggtgcagtatgtcagatcctgcttatcttcctctgggtgtttgaaagaatcaagatcttcgtgttcagaatcaggtggtgaccaccatcccttatcctccacatccttgcccctctccttattcatgctttgtaaagaggttttggagctttctggccgataacttctaaatacgtgccgctgcagctcggcagagccgccaagctttggggtacgttggttcttcattctccgcggggatgtccccacactcgggtcggctgggggccgggctggtggcacagctgggacgctcctctgtcctgcaccggggacctggggtggcgggaagagctggagtggcttttccatcagcaacgtggaaagggcatcgccgctgttggcgcggtttggaagtgtcttgctggggcttcggcggagcacacgacaggacagcgcccagcgaatcttatgtaatttatcaaatactatactggaagtgaaaaccagaatggcgtatgggtactcagagtagttgtgctgaatgcatatcactttcacacctggctgcttgagtacagcataaactgagcacagaaagggagtccttgccat

SEQ ID NO: 152236 - DNA, 522 bp, Homo sapiens
tcatctcgttacttttgagagaatggaatcagccatagactcctgtttatggcattcggcgaccaactcctcaaatagcggctgaagttgctcatatgccgccgttttctttatctccgcaacagtcttaacgccctcatttaccgttgagaacttaagcctggcgtaacctctaccaccgcagcggtcgcaggctttcattactggaacgccctggcgatcgctttctgccttgtccagcgcctttcctttgcctgggttccagctcttcccagtcccttgggcgcagcggcacccgtaaattttcgaccccgtaagggggtctccccctgggggttgagaccctggcgggtgaacacttgcgtccgtgttcatctcccgccacaagtctccccggggcgtcactgtcacaggaatggtggtcaccacctgattctgaaacacgaagatcttgattctttcaaacacccagaggaagataagcaggatgctgacatactgcacccaggcgaactttaccat

SEQ ID NO: 152237 - DNA, 2182 bp, Homo sapiens
cccaaccccatctggctggtgggcagggccgcaaatgctccatttgtgattaatgctatcatccgataccctgtggaagtcatttcttatcagccaggattctgggagatggtaaagttcgccatgcttgcagtatgtcagcatcctgcttatcttcctctgggtgtttgaaagaatcaagatcttcgtgtttcaagaatcaggtggtgaccaccatttcctgtgacagtgacgccccggggagacttgtgtaaggagcacttatcctagaaagggcatttctgaagactcaagcaggaccgtggctgcctcattgtcatcttctgggaacatcttaggaccttttgaaagagcccagcgggacacctgcgggcttgtgtgcttttccctcagagacaacggttctttccgggttttgctctacacagttccgtatctttcagagctcctgcagaattgttcaggggattagtttgtgggaaaggtctgaggagttccggggagctataattagctttttggggttttccttctttgccttagcgttgaatttcaggagaaaattgcagtcagttcagacatcttgggaaagagtcccatctctggtcaagcagagacttttcctctgtttgaactgagggaacacactgtggcatttctaccttctgttgtgagccactctttactcttttcaggggctctcttgttgacaaacatgccaatcactaggcactttgcacccctgggcttctccatttcccattcacagctttgatttccagagctgaggcctttaactgggagacctgggaggggcagggcccaagggcaaggggccgcatttagcacagggcaatcagggagggccgctgaaggacacttggaccgtccacctgccccagcccaacagtcagtcatctgttcatcagctcagctgagcagccctggatctttgccgtactgtgactgggctctttgccctatttttccctctgtctgtgcccctggatggcaggctgaagtcagaggggctgtttcattctcagccccctcagcagcactgggggaagaaagcattgtcacaacaggttctttctggccctcacccaacagcctgggcacttggccctcctcctccttgacagccctcccccttcctgcaaaggacaggggcgacaggggttggtgttgggattggctcccgctgcctgacaaccacaagtttatttggaaggctagcgggaagcccagcggctggcgtttcccttgactaaggaacagggtgcccatcagagtggggcgggcagctttgggaaggacacaagaagcagtaagagtgtaaagaggatgctggcctgggcaggccagtccagcctggccactagcagaataccaagcagtccagtggattaccctcgtggctaagcaagtgtctgcaggagcagagatggctggaaggggcctctgcacacggaagatggcttgttcagcccattcacctcctgaggatgtgggcagtctcctccaagaacacatggagctgcttcctgatcccaagcaggtcattgccactggaaaggccatggcccccggtgatccatgcttcaatgcccaccccagaaacacacccctcagtgtgtgcctccagtttactttggagatcagttgtcggtttttagtgctcctttaggcttacgtaaaacagttttggaaacaaagctattttgaagtattcaagcagaggaattcccctaacactgacccccttgtcctttttttaatattccaggctgttttatatgccctaaatttttttcttaagatctaaacgaaaaatagtttcttgtttaaattcacataaggcaatgagatatggaaagatgaacaagatacgtataaacattggtttgcattttattaaattattctaatgcaaatcttgtataaagaaccccatgatgttttgtaactttctaatctaaaatgttcaaaatgaggccgagcatggtggttcattcctgtaatctcaacactttgggaggccaaggtgggaggatcgcttgagcccaggagcttgaggctgcagtgtgctatgattgcaccactgtactgtagcctgggtgacagagtgagaccctatctgttaaaataaataaataaataaataaaaaagtcaaaatgg

SEQ ID NO: 152238 - DNA, 2863 bp, Homo sapiens
gggggtagtgccgccgggactcttggcgggtgaaggtgtgtgtcagcttttgcgtcactcgagccctgggcgctgcttgctaaagagccgagcacgcgggtctgtcatcatgtcgcgttacgggcggtacggaggagaaaccaaggtgtatgttggtaacctgggaactggcgctggcaaaggagagttagaaagggctttcagttattatggtcctttaagaactgtatgtattgcgagaaatcctccaggatttgcctttgtggaattcgaagatcctagagatgcagaagatgcactacgaggactggatggaaaggtgatttgtggctcccgagtgagggttgaactatcgacaggcatgcctcggagatcacgttttgatagaccacctgcccgacgtccctttgatccaaatgatagatgctatgagtgtggcgaaaagggacattatgcttatgattgtcatcgttacagccggcgaagaagaagcagggcagaaaatttgagacggtgatcgccgtaacagtaaatttggcttacaattggggcccccctccggtttagaaagaggaacaccagattgaccacattcccaactagaaaaatcttcttgcgtcaatcaagcctcacctggctcatttggctgtcagtttgatcgtcgttagattgaagaaaacatctagatgcagcgatcggctatagatacttctagatcgtctagatctactagaccatgggccaaagagggtcgacctgcaaacttgcaaggtttatgttaaatacacattacagtgttttatattatgtaatgctaagttgtaattcagcttttaacaaatctttttttaggtagtaaaaaaaaaaatactcaacaactaataggcccagagtttatttccaaatgagacactaaatttaaatagttttgagatttgatttcagcagaggcacacaaactcttaaaaacgagttattgtctgacattttgttttttctctaacttgaaaaataggtcacggtctagatcacattctcgatccagaggaaggcgatactctcgctcacgcagcaggagcaggggacgaaggtcaaggtcagcatctcctcgacgatcaagatctatctctcttcgtagatcaagatcagcttcactcagaagatctaggtctggttctataaaaggatcgaggtatttccaatcccccgtcgaggtcaagatcaagatccaggtctatttcacgaccaagaagcagccgatcaaagtccagatctccatctccaaaaagaagtcgttccccatcaggaagtcctcgcagaagtgcaagtcctgaaagaatggactgaagctctcaagttcaccctttagggaaaagttattttgtttacattattataagggatttgtgatgtctgtaaagtgtaacctaggaaagataattcaaccatctaatcaaaatggatctggattactatgtaaattcacagcagtaaggataatataaattttgttgaatgtatgaacatcatatggtctgaaaatgtgggtttttatttggcacatttaaataacatgtttctaactagatttttgatttgtgttcaatattaacacttcttaatttgatatatttgagagtcagacattataattgttaatccttattcatacatacctacattcagaattgaaaggtgttggttaagtcttgaacatcactattctatgcataaaacttggccaggatcttaagggactttgaaaattccatcttacccttgtagctctgggtaagatgacctgagtcccttatgatacagcctgaatgcatcatgacagatccttagttagctaatccgtttgaagttggtgttagtaggtattgtatgatcagtggtgaagcaagtaggaccactgatgtgtctaaatgagcatgacaggaactaaacgaaactgattaaatgtatgagaaatagaaactgatttctggatgatctttatactaattgcagctttcaggctactaggtggcatagtgttaattaggactccccaagatatggggagttctactctcaatggtcttgtttctttgctttctacattagttaaccagttttataccaaaaaatgcatgtttgaggaattgtctgaaattgggacaaaacaccttcatgtaaaccagctttgcaaaattttccagcccagatactcttcatctattcaaatggattgtcttattctgagcaaagacctgttgttaatcttcaagctaggttttgcagttcccaaccacaacattcttctattttgccaggctggtgcaaagtaattaaagatgtcaatcagaaatgtcaatgagactaaagtggttttgtaaatctcagctatatttagcaacactccatgtagctaatattttttggtagcatctggtagaccttagaatgttacatagccagtaggttctttattcaaattttaagtatcttaagaatagtagggcagtaacagttacttttgagagttttctggtcaagcttttaccaggcattctctagccttggtacaaaaaaaaaaaaaacctgctggttgcgcagatacctaggcttgtccattttatgcatttcagcaaagtcattggagactattgcaacttgggaatactggtctgcatcaagtttaattcggtagtttgaccgctagtatgttggaagttatttggattgtttttggaattttgactggctgaattatggttggtataaagttatgtgtataactggcaggcttatttatctgttgcacttggttagctttaattgttctgtattatttaaagataagtttactcaacaataa

SEQ ID NO: 152239 - DNA, 2432 bp, Homo sapiens
gtagtgccgccgggactcttggcgggtgaaggtgtgtgtcagcttttgcgtcactcgagccctgggcgctgcttgctaaagagccgagcacgcgggtctgtcatcatgtcgcgttacgggcggtacggaggagaaaccaaggtgtatgttggtaacctgggaactggcgctggcaatggagagttatatatgggttatcagataatatggtcctttaagaactgtatggattgcgagaaatcctccaggatttgcctttgtggaattcgaagatcctagagatgcagaagatgcagtacgaggactggatggaaaggtgatttgtggctcccgagtgaggggttgaattatcgaccggcatgcctcggagatcacgttttgatagaccacctgcccgacgttcctttgatccaaatgatggatgctatgagtgtggcgaaaagggacattacgcttatgattgtcatcgttacagccggcagaagaagaagcaggtcacgttttagatcacatttctcgatccagaggaaggcgatactctcgctcacgcaggcaggagcaggggacgaaggtcaaggtcagcatctcctcgacgatccaggatcctatctctcttcgtagatcaaggatcagcttcactcagaagatctaggtctggttctataaaagggatcgaggtatttcccaatcccccgtcggaggtcaagatccaagatcccaggtctatttcacggaccaagaagcagccgatccaaagtccagatctccgatctccaaaaagaagtcgttccccatcaggaagtccctcgcagaagtgcaagtccctgaaagaatggactgaagctctcaagttcacccctttagggaaaagttattttgtttacattattataaaggattttgtgatgtctgtaaagtgtaacctaggaaagataattcaaccgatctaatcaaaatggatctggattactatgtaaattcacagcagtaaggataatataaattttgttgaatgtattaacatcatatggtctgaaaatgtgggtttttatttggcacatttaaataaaaaaaaatctaactagatttttgatttgtgttcaatattaacacttcttaatttgatatatttgagagtcagacattataattgttaatccttattcatacatacctacattcagaattgaaaggtgttggttaagtcttgaacatcactattctatgcataaaacttggccagggatcttaagggactttgaaaattccatcttacccttgtaggctctggggtaaggatgacctgagtcccttatggatacagcctggaatggcattcatggacagatcccttaagttagctaatccgtttggaagttgggtgttagtaggtattgtatgatcagtggtgaagcaagtaggaccactgatgtgtctaaatgagcatgacaggaactaaacgaaactgattaaatgtatgagaaatagaaactgatttctggatgatctttatactaattgcagctttcaggctactaggtggcatagtgttaattaggactccccaagatatggggagttctactctcaatggtcttgtttctttgctttctacattagttaaccagttttataccaaaaaatgcatgtttgtaggaattgtctgaaattgggacaaaacaccttcattgtaaaccagctttgcaaaattttccagcccagatactcttcatctattcaaatggattgtcttattctgagcaaagacctgttgttaatcttcaagctaggttttgcagttcccaaccacaacattcttctattttgccaggctgggtgcaaagtaattaaagatgtcaatcagaaatgtcaatgagactaaagtggttttgtaaatctcagctatatttaggcaacactccatgtaggctaatattttttgggtaggcatctgggtaggaccttaggaatgttaccataggccagtaggggtcctttattccaaatttttaaggtatcttaagaatagtagggcagtaacagttacttttgagagttttctggtcaagcttttaccaggcattctctagccttggtacaaaaaaaaaaaaaaaccctgcctggttgccccagataccctaggcttgtcccattttatgcatttcagcaaagtcattggatactattgcaacttgggaatactggtctgcatcaagttttattcgggtagtttgacccgctagtatgttggaagttatttggattgtttttggaattttgactggctgaattatggttggtataaagttatgtgtataactggcaggcttatttatctgttgcacttggttagctttaattgttctgtattatttaaagataagtttactcaacaataaatctgcagagattgaacaaataaaaaaaaaaaa

SEQ ID NO: 152240 - DNA, 701 bp, Homo sapiens
  misc_feature (1)...(701): n = a,t,c or g
accgncncgaannccggncgaccacgcgtccgggcagagcacagcatcgtcgggaccagactctgtctcaggccagttgcagccttctcagccaaacgccgaccaaggaaaactcactaccatgagaattgcagtgatttgcttttgcctcctaggcatcacctgtgccataccagttaaacaggctgattctggaagttctgaggaaaagcagctttacaacaaatacccagatgctgtggccacatggctaaaaccctgacccatctcagaagcagaatctcctagccccacagaatggctgtgtcctctgaagaaaccaatgactttaaacaagagacccttccaagtaagtccaaccgaaagccatgaccacatggatggatatggatgattgaaggtgattgacgaccatgtggacagccaggactccattgactccgaaccgactctgatgatgtagatgacactggatgattctcaccagtctgatgagtctcaccattctggatgaatctgatgaactggtcactggattttccacggacctgccagcaaccgaagttttcactccagttgtccccacagtagacacatatgatggccgaggtgatagtgtggtttatggactgaggtcaaaatctaaggaagtttcgcagacctgacatcaagtaccctgatgctacagacgaggacatcac

SEQ ID NO: 152241 - DNA, 1762 bp, Homo sapiens
  misc_feature (1)...(1762): n = a,t,c or g
tgatctctagttgctctacattacagttcagcgtctcttttgaatatcattctgtcccttatgatttcgaattgctacggcgaaaggnganaacacattgaaacccttttttgaagncnactgattgccgggtcgacccacgcgtgcgcccacgcgtccggcagagcacagcatcgtcgggaccagactcgtctcaaggccagttgcagccttctcagccaaacgccgaccaaggaaaactcactacccagggaattgccagtgatttgcttttgcctcctaggcatcacctgtgccataccagttaaacaggctgattctggaagttctgaggaaaagcagctttacaacaaatacccagatgctgtggccacatggctaaaccctgacccatctcagaagcagaatctcctagccccacaagacccttccaagtaagtccaaccgaaagccatggaccacatgggatgatatgggatgatgaagatggatgatggaccatgtggggacagccagggactccattgactcgaacgactctggatgatgtagatgacacttgatggattctcaccagtcttgatggagtcttcaccattcttgatggaatctggatggaactggtcactggatttttccccacgggaccttgcccaggcaaccgaagtttttcaattccagtttgttcccccacagtagacacatatgatggccgaggtgatatgtgtggtttatggactgaggtcaaaatctaagacagtttcgcagacctgacatccagtaccctgatgctacagacgaggacatcacctcacacatggaaagcgaggagttgaatggtgcatacaaggccatcccccgttgcccaggacctgaacgcgccttctgattgggccaaccgtgggaaagacagttatggaacgagtaagacttgattgacagagtgctgaaacccacaggcaaccaacaggtccagattatataagcggaaagctaatgatgagagcaatgagcattccgattgtgattggtaggcaaggacttttccaaaagtcagccgtgaaattccacagcccatgaattttccagcccatggagattttgcctgtttgtagcccccaaaaagtaaggaagaagataacacacccctggaattccggtattccccaggaattaggatgtggcacttctgggggtccatttaaaggggggaaaaatcccaatttccccactttgccatttagtcaaaagacaaaaatgctttatagcaaaaatggaaagagaaccatggaaatgcttctttctccagtttattgggttgaaatgtgtatcttatttgagtcgggaaataacctaatgtgtttgataattagtttagtttgtggctttcatggaaactccctgtaaacgtaaaagcttcaggggttatgtctatgttcattctatagaagaaatgcaaactatcactgtattttaatatttgttattctctcgatgaataggaaatttatgtagaatgcaaacaaaatacttttacccacttaaaaagagaatataacattttatgtcactataatcttttgtttttttaagttagtgtatattattgttgtgattatctttttgtggtgtgaataaatcttttatcttgaatgtaataagaatttggtggtgtcaattgcttatttgttttcccacggttgtccagcaattaataaaacataaccttttttactgcctatataatgtttttaaaaaaaaa

SEQ ID NO: 152242 - DNA, 459 bp, Homo sapiens
  misc_feature (1)...(459): n = a,t,c or g
naaataagagcatcctagcagcggcggaattcaggagttctccaacccgcgctgcggagtccttcctcgggaggcggcgaaggcggtccaccctgcgcgtgatccttcatgcccggcccctgcccctccctccgggtggaacttccccctcaccgccagacttaagctgaggatcgttggatctctggcggggtgcagaactgagcccaggccacagtaccctattcacgctctgtgcttgtgccaaggtaaaagcagctgttaagtatgcccttagcgtaggctaccgccacattgattgtgctgctatctacggcaatgagcctgagattggggaggccctgaaggaggacgtgggaccaggcaaggcggtgcctcgggaggagctgtttgtgacatccaagctgtggaacaccaagcaccaccccgaggatgtggagcctgccctccggaagactc

SEQ ID NO: 152243 - DNA, 454 bp, Homo sapiens
gaggaagcgccgaggaattcgcggaaagtgatctccatccccaaaagtatcactccttctcgaatccttcagaacatcatggtgtttgacttcacctttagcccagaagagatgaagcagctaaatgccctgaacaaaaattggagatatattgtgcctatgcttacggtgaggatgtatcagcctcctagacttggggaatgtgagatttggggtgggattctggcccaggtgtgacctaaggcttgctggttgtgagaaggacacaatgttgtgggtgggattgctatgctggacatagcgccctcatttctctttattgagctcagggaagtagtatggctcagggataaggcatataacctgtgagtcccagtcctgcttcttgatatcttgtaacctagagcaagttattaaacttctccaagcctcaactttctatgtgtaaaatgag

SEQ ID NO: 152244 - DNA, 1502 bp, Homo sapiens
agtgataacacttgaaggccgtgaattccggagttctccaaacccgcgctgcggagtgagtgaccaagttccggccagttcgacctcgaggatccagaggtggagacggtactacctcccagctctgttttccatccccttcaggtccttcctcgggaggcggcgaaggcggtccaccctgcgcgtgatccttcatgcccggcccctgcgccctcccttcgggtggaacttccccctcaccgccagacttaacctgaggatcgttggatctctggcggggtgcagaactgagcccaggccacaggaccctattcacgcatctgtgcttgtgccaagggggcaatggcggcttccctgtgttctactgcacactgggcagaaagatgcctcctgatttggtcctggggtacctggaaagagtgagcctggtcaggtaaaagcagctgttaaagtattgcccttagcgttaggttaccgccacatttgattgtggttgttatctacggcaatgagcttgagattgggggaggccctgaaaggaaggaccgtggggaccaggcaaggccgggtgcctccggggaaggaagcctggttttgtgacatccaagctgtggaaacaccaagcaccaccccgaaggaatgtggagcctgcccctccggaaagactctggcttgaccttccagctggaagtatctggacctgtacctgatgcactgggccttatgcctttgagcggggagacaaccccttccccaagaaatgtgattggaacatatggctcgactccccccacttacaaggaaacttgaagggctctgaaggcactggtggctaaggggctggtgcaggcggctggggcctgtccaatttcaacagtcggcagatttgatgacatactcagtgtggcctccgtgcgtccagctgtcgttgcagagtggaatgccaccccataactgggctcaaaatgaggctaattgccccactgccaaggcacgtgggcctggaggtaaactgcctttaatcccttggggctccctctgaatcgtgcatggccgtgatccctgatgagcctgtccctgctggagggaacccagtagtcctgggcattggcttgaaaaagtatggccgatctcccagctcagaatcttgcctcaggtggccaggtcccagcgggaaagtgatctggcatcccccaaaagtatcactcccttctcgaatcctttcagaacattcaaggtgtttgactttcacctttagcccagaagaagatgaaccagttaaatgcccctgaacaaaaattggagatatattgtgcctatgcttacgggtggatgggaagaagagtcccaaatggatgcagggcatcctctgtaccccttttaatgacccgtactgagaccacagcttctttggacttcctttcaactctgcagctaactgaggtcctgccacaaccggaaagagggagttaactaaagccattggagcatccaaaaaaaaa

SEQ ID NO: 152245 - DNA, 416 bp, Homo sapiens
aaaactttcttttatttctggcccctttataaccagcatctttttgctttaaaaaatgacctggctttgtatttttttagtcttaaacataataaaaatatttttgttctaatttgctttcatgagtgttgattattgacatcgttggtaaattctagaattttgattttgtttattaactcgaagaaaatctttgctattatcatcttttccacgcgcggtggcattctaagaattaccgctgtcatctggacataatatatctgtcacccatggaaacggtgacatggctcttgcccaatattcaatgcctgttcctgcttaggccattggacgcagaatcctagtgatgctgtacccctcaaggactgaggctttcgagaaattcttaattagatgttgatttgtgacttaga

SEQ ID NO: 152246 - DNA, 648 bp, Homo sapiens
tctctgtacctcatgtacacttggaagcttcagggacttagcactggtcatgccagcctctacagatcacatctctgtctataattgggtctcccatggtaatgagaagcagaaagtgctgaagtagcgcactatgtaaggactggcaagagaaaatactgtcgcggcctctaccaggcatagccatggaatcccccatggtgccccaagaagccccgagagaagcacgctgtggtgtagagcaggagactggaggaccacggacttggcagaatttattagcagcaatattcctaagatgaacccaaatttaagagttttgtaagtgctcttttcaattggaaaagacctttgaaatttttttttcttttcttttaggaggccagatgctccagtgcctgatggcgaaagtgagaaaactgtagaagaaagttcagatagcgaatcttcttttagtgattaagcttaattttgataagaattacgatatgcatgcatagggggtacatttacattctgtaagagattgagcctgaactctcttagtcataaaaacatcaaatggccacatgtccactaccaagcttcttctatgttaaaaaaataataataaagcgagttttaacctgccaaaaaaaaaaaaaaaaa

SEQ ID NO: 152247 - DNA, 919 bp, Homo sapiens
cggaggcgggcacttggggggaaagttgagacgtgattaccgggttgggcgggccccatctgggaggggtttgtgggtgaactcggggtccaccgcccgctgaggagatggatgaggacgggcttcctctcatggggtcaggcatagacctgaccaaaggtgccagctattcaacagaaaagaacgggtggcttttctaaaccaatttgtggtgcacactgatacagttcctcaaccgcttttctaacagtttgtgaggagaaactggcagaccttttcacttcgtatccaacaaatttgaaacaactctcaatattttaagatgccaagtttgtcatctatcccagggcctagatgatgtcacagtttgaagtatccccctttaaattgtcaccaagtgtcacaaatgggagcacatccttgaaggccactttcagaggcaaccacagccggaaccagtaccaccaggactcctggacttacaggaaagttgaagtattcaggcaggaaattttctttaactgtagcccaaggatcccaagatatgccagatatctcaaaatggttcaaagtgggtgtacccagtgatggccattaggaaccaaaatgatatcagaaggacttagacccagatcttcttgagaggccagatgctcccagtgcctgatggcgaaaagtgaggaaaactgtagaagaaagttcagatagcgaatcttcttttagtgattaagcttaattttgaataagaattacatatgcatgcgataggggtacatttacattctgtaagagattgagcctgaactcttttagtcataaaaacatcacaatggccacagtgtccccctaccaagcttcttctatgttaaaaaaataataataaagcagttttaacctgccaaaaaaaaaaaaaaaaaaa

SEQ ID NO: 152248 - DNA, 1572 bp, Homo sapiens
tgtgtttagaaaaaagatgcattcctgaagatctctggtgctgaagggcctcgagttcctttcagagactgtatttgacacactttaggtacacacaaacgaatggtatcacatgcaatattttaatggagcaatgggagaggctctttgaaatggggtttgcatctttttgtaacattttgatttctctggggccttattcctacttgatgctggcactcacatacccacaagaagctgacacagaagtcagccttaggcgtggggacatatgggtgatgtttgagcatgcaggggccatggggagtttggtgtcagttggtggagaagggactagatggcatctcttagccgaggccaacagggaactgcacaagtccattataagtcaaagttagcaatttttgataccgtaaacacaatacttcattcttcctcatctgagctttccttccttcttccttttctatctctaccttctcataaaggtgctgctgctgctgctaaggtgcccggagtccagaatgtccattaatcactcaggcacgagcctggcactgccacgtcagcccccagcatgaccaaacccaggtttctcttgcttggggctgagaactgtcagatttttctcatcaaaaatgttttccaaggaatcagtggattacagtttttctgccttgaaaatgcactttaaaaaataaattaaagctccagactgtttaaaatatacagagggagcaggggaaagttaaggcatgtgctagtgtctggaacccagttcagtttatctccagttggaaacggatattacactatattatgtataaatgtatacacacttcctatatgtatccacatatatatagtgtatatattatacatgtataggtgtgtatatgtgcatatatacacacatgcacataacaaaatcagatgctcattacaaatccagatgctcattacaaaaccagatgctacacaaacagcagcagaggaaacaaggttggaccccttgcaacagatccacaaaaaataaaaacagcctacttgcagtgactttggtcatttcctgtatgttcataaagaatggattgtaacaaggaaaaaaaggaacagtgttagttgaaaaaggaaaaatgggcgaaaccatcttgatccgatgcgaatgcagtaatgttctatataccatttcatcagttatttcttttagtcatgttgatttgatttcagtttctggctatgaaaaacatttttaaactcgtcacccacaacaaactgaacaaaactactacagtgaaagcccttttcagtgaaagatgtcagaaacctcaaaacctttggcctgactcagaactaccatgtgaaaatcagtactctcttaatgtttgaaataaaaactgaaaaaaaaaacaaaaaaacaaaaaaccttttttgaagcaccttaacgtggccatccatttgagaagtgggtgccactttttttctttgagcaccttattgatgtgtttgctatctgctgtctttctgttacctgttggctgaatggctagctgttaacatatacatgtgcac

SEQ ID NO: 152249 - DNA, 1144 bp, Homo sapiens
  misc_feature (1)...(1144): n = a,t,c or g
atggcggagaagtttgactgccactactgcagggatcccttgcaggggaagaagtatgtgcaaaaggatggccaccactgctgcctgaaatgctttgacaagttctgtgccaacacctgtgtggaatgccgcaagcccatcggtgcggactccaaggaggtgcactataagaaccgcttctggcatgacacctgcttccgctgtgccaagtgccttcaccccttggccaatgagacctttgtggccaaggacaacaagatcctgtgcaacaagtgcaccactcgggaggactcccccaagtgcaaggggtgcttcaaggccattgtggcaggagatcaaaacgtggagtacaaggggaccgtctggcacaaagactgcttcacctgtagtaactgcaagcaagtcatcgggactggaagcttcttccctaaaggggaggacttctactgcgtgacttgccatgagaccaagtttgccaagcattgcgtgaagtgcaacaaggccatcacatctggaggaatcacttaccaggatcagccctggcatgccgattgctttgtgtgtgttacctgctctaagaagctggctgggcagcgtttcaccgctgtggaggaccagtattactgcgtggattgctacaagaactttgtggccaagaagtgtgctggatgcaagaaccccatcactgggaaaaggactgtgtcaagagtgagccgcccagtctctaaagctaggaagcccccagtgtgccacgggaaacgcttgcctctcaccctgtttcccagcgccaacctccggggcaggcatccgggtggagagaggacttgtccctcgtgggtggtggttctttatagaaaaaatcgaagcttagcagctcctcgtggcccgggtttggtaaaggctccagtgtggtggcctatgaaggacaatcctggcacgactactgcttccactgcaaaaaatgctccgtgaatctggccaccaagcgctttgttttcccccaggagcaagtgtattgtcccgtctgtgccaaaaagctgtaatctgacaggggctcctgtcctgtaaaatggcatttgaatctcgttctttgtgtccttactttttgccctataccattcaatnaggggaagagtggtccttc

SEQ ID NO: 152250 - DNA, 2574 bp, Homo sapiens
gcattcctcctgtagctgcacgaaaggattcaggtttgacgcttcagttggattgaatcgaaagagaggtatatttggtgtcaggcgtttgtggtggcatgtgaaatcattatccacgtttgataacagtttgactttttgcctgctgtaataatagtagcaccttggaagttgttttcaaccatatccaagcctttgcccgaatacatcctatctgccacacatccagcgtgaggtccctccagctacaaggtgggcaccatggcggagaagtttgactgccactactgcagggatcccttgcaggggaagaagtatgtgcaaaaggatggccaccactgctgcctgaaatgctttgacaagttctgtgccaacacctgtgtggaatgccgcaagcccatcggtgcggactccaaggaggtgcactataagaaccgcttctggcatgacacctgcttccgctgtgccaaattgccttcaccccttgggccaatgagaccttttgtggcccaaggacaacaaagatcctgtgcaacaagttgcaccactccgggaaggactccccccaagtgcaaaggggtgcttcaaggccattgtggcaaggagatcaaaacgtggagtacaaggggaaccgtctgggcacaaagacttgcttcacctgtagtaacttgcaagcaagtcatcgggacttggaagcttcttcccctaaagggaaggacttctactgtgtgacttgccatgagaccaagtttgctaagcattgtgtgaagtgcaacaaggccatcgcatcttggggagtcacttactaggatgagccctggcatgccgagggctttgtatgtgttacctgctctaagaagctggctgtgcagcatttcaccactgtggaggaccagtaatactgtgtggattgctacaaagaactttgtggccaagaagtgtgctggatgcaagaaccccatcactgggtttggtaaaggctccagtgtggtggcctatgaaggacaatcctggcacgactactgcttccactgcaaaaaatgctccgtgaatctggccaacaagcgctttgttttccaccaggagcaagtgtattgtcccgactgtgccaaaaagctgtaaactgacaggggctcctgtcctgtaaaatggcatttgaaatccccgttcctttggtgtcccttactttcctgccccctaaacccatcaaatgggggaaagagtggtcccttccccttcctttaaaagttctcccttcccgtcttttctccccattttacagtattactcaaataaggggcacacagtgatcatattaggcattttggcaaaaaggcaaccctggcaggcaaagtggatttctgtccggctgcaatttaaaaatgaaaacttaggtagattgactcttctgcatgtttctcatagagcagaaaagtgctaatcatttagccacttagtgatgtaagcaaggaagcatagggagataaaacccccactgaggatgcctctccatgcctcagctggggacccaccgtgtaggacacacggacatggcaagagttgcagcgggctgcttcccaactcactgctcaccctcttctgtgagcaggaaaagaaccctactgacatgcatggtttaacttcctcatcagaacttctggcccttccttctgttcttttgtgcttttcaaattaactaacacggaacttccagaaaattaacatttgaactttagctgtaattctaaactgaccttttccccggtactaacgtttggtttccccgtgtggcatgttttctggagcgttcctactttaaagcatggaacatgcacggtgatttgggaagtgtagaaagacctgagaaaaccgagcctgtttcagaggaacatcagtcacaacgaactacttctggaagcttaacaaaactaaccctggctgtcctttttattgtttttaattaatatttttgttttaattgatagcaaaataggtttatgggtttgggaaacttgcatgaaaaatatttttagccccctcatgatgttccctgccagggcggaaattccatcctaccagaaagtaacccgccaaaactcctagaggggggaggttggaggccagggccccccagggcttgtcatccaaccatgggatatgaccatttcacaaccagtgacttagttgaatccccttgttaacgtagttagttgtcctgctcttttgtcccatgtgttaatgaggaactggcaaagtcccttcctgtttgtggatttcccaggactttttcctcaagagggaaatctgggatttcccaccctacccgcttaccctgaaatgcaggatcaccttacttacctgtattctacattatttatatgacatagtataaatgagacaatatcaaaaagttaaaccatgtaatggacaatacatactaacattcttgtaaggagtggttagagaagctgatgcctcatttctacattctgtcaattagcttattatcatctaacgtttcagtgtatccttacagaaaataaagcagcatatgaataaaaaaaaaaaaaaaaa

SEQ ID NO: 152251 - DNA, 689 bp, Homo sapiens
tttttttttttttttttgagatttcgcctactcacctcaaaccctctgaagactgccaaaagctacgccacaatcaaattctgcaggttctttcaaatatcatttcacttagctcttctacaacaaagcctcactactcaaagtatgggccttagaagagcgtcagcataattgtttggaatgttattagaaaaataaaatgtttttcttctgataattgaaaatgttcctcttcaaagcattttaccaaagaagacagtcaaataaccaataaacatatagaaaagtgttcaagttaattacttgtcagggaaatgcaaattataaccacaaagagtgtctctgccatccaccagaatggctaaaatgaaaacacaaaacagacatgtcaagcatcgataatgatatgcagcaatgggagttcatgcgctaggaatgggcaaactggtaaaactagaaaactaattggcaatagctactaaggctggacaaatgtgtatctatacgacccagcaattcctttcctagatatttccccaacagaaaggcatatatatgcttaccacaagacatgtataagaatgttcaaagcaacactatttaaaatagctccaaacatataagactgagacaatatatgcagtttcatattttactttttcatagatagtaagcatttcccctcgtgc

SEQ ID NO: 152252 - DNA, 2626 bp, Homo sapiens
  misc_feature (1)...(2626): n = a,t,c or g
tttgaagctgtacgcctgcacgatctggacctgttttcccggatcgacgatttcgagagattcgcatgcactaggtcaggcggcgtaccctgagctcgaggaggtggcatcggctgtctcacggaccacggtggctcccgcaggtactcaccgcatcacccccactgcaggcccgaggagctttccggagcttcccacactcctggggagaagacttcttagccagcttgatgtttaaaattcagctggagcccttaaaacttcgagcgtggacgctgaatgggtttgtaaagtttcgaaacaaggagaccagtgctggtccagtggctgtgatgggaaaagattattacaagattcttgggatcccatcgggggcgcaacgaggatttgatcgtttgtgcctaccggacgatggccttgaagtaccacccagacaagaataaagaacccaacgctgaggagaagtttaaggagattgcagaggcctatgatgtgctaagtgaccccaaagaaacggggcctgtatgaccagtatggggaggaaggcctgaagaccggcggtggcacatcaggtggcttccgtggctttctttcactacacctttttatggggacccccatgccacctttgcctccttctttggtggctccaaccccttcgatatcttctttgccagcagccgcttccacttcggcccttcagtggctttgacccagatgacatggatgtggatgaagatgaggacccatttgggcgcttttcggccgttttggctttcaatggggttgagtagggggtccaagggcgagccccaggaaccattgtaaccctcgggcggcaaggttgcagggaccccccagtggttgcacgagctgcgggtgtccctggaggagatctaccatggctccaccaagcgcatgaagatcacaaggcgtcgcctcaaccctgatgggcgaactgtgcgcaccgaggacaagatcctgcacatagtcatcaagcgtggctgggaaggaaggcaccaagatcaccttccccaaagaaggcgacgcaacaccttgacaacatccctgctgacatcgtctttgtgctcaaagacaagccccatgcacacttccgccgagatggcaccaacgtgctctacagtgccctgatccagcctcaaggaggcgctgtgtggctgcactgtgaacaattccactattcgaccggccgagggatccctttgccctgcaatgatgtcatcaagccaggcaccgtgaagagactccgtggggagggccttcccttccccaaagtgccaactcagcgaggagacctcattgttgagttcaaagttcgcttcccagacagattaacaccacagacaagacagatcctttaagcagcacctaccctgttcctaggctctgccccagccagtccagagcctaccacagcaatacccccaacactcactccactcaatgtgcacccagcttgatgtccactggacactgggcaactttttctaaaatgcaaaaaaaaagccactggttttcaggaaaatgttcctgtccctgaccccttttagagctgggctgcctggggggagtgggagggaggtggggagagctagcccaggcccaggggtcaatgttcatgtcacttagctttcaatccagtttccacttgcagtggctgggagagtgaccttgagtggctactttggaagatatgttaggagattcctttatcccatggcctgttacataggcatgttcctccttncccctcagctttgctaataccagtcccctcccttccctttggcttcctgctgttgggggtggaaaagactagaaaggacattgctttctaaagcccccacccccaggtccacagtgtccaaggtaatggcacacatattcatgcacaagaagcactcacctagagctgtctgtgcctctctgggagaaaggagagaggataagaagggaaagttcacaacctgtgaacagggacttgagcacgagacacttttcatctggagcaggggggtgagctcctcagcagcctccgtaacagctgccctgcctacacctgcagagctggaggttctgtcctccctgctgctctcaggagtgttcaagggtggagggcagggaatggggcctgaggtattaaggctaagaagtgggggacagggccccatctaccagcctttcattcaggaaggggaaagggctttggggtcaggtggccagctatttccccaccaagagatttcagggttcacaggtttttcccccacacctcttgaactcagggccttagccacccccaaacttccaaatcccactttttgttgatatgtgaagcttattcattttctttaccctttggagggctgtgtggggaatttccagcccttttatgcctgtgtgatcccaccccacccccatagttgtataaaggtcatagtgaagaagctgggggaagactgcttcagccagatcctggggtggggtctttaggttttctcactttgacaacccccgaatgtttttatagtagtttttttgtatttttttcgtaatgacagtattatgtaaaaaataaagtattttaaaaataaaaaaaaaaaaa

SEQ ID NO: 152253 - DNA, 486 bp, Homo sapiens
  misc_feature (1)...(486): n = a,t,c or g
gtgtccnnnaattgaacacttttgacncttatcacgccaagcttgtcacgagggaggtgtttaggagaaagtaggggctttnnnttttttagccggctgactggtggacaagggggggttagcagctgggctgcgaccgttagggaggggctcaaggtgtgcatgtgtgagggaagagagagagagagaagggcgcctcataggtgactttcagcctgcgagccttcttcccggggcgccataaacgcccccaatttcccagctgctaaaggaagaggaagatcttagcaaagcaatgtctcaagatggtgcttctcagttccaagaagtcattcggcaagagctagaattatctgtgaagaaggaactagaaaaaatactcaccacagcatcatcacatgaatttgagcacaccaaaaaagacctggatctgactgttcagcaaattgaacatttgaataaaacctacaatacagatgttcctct

SEQ ID NO: 152254 - DNA, 2186 bp, Homo sapiens
cccacgcgtccggcgaggtgtttaggagaaagtaggggctgtgggtgtcgggagccggctgacgggtggacaagggggggttagcagctgggctgcgaccgttagggaggggctcaaggtgtgcatgtgtgagggaagagagagagagagaagggcgcctcagaggtgactttcagcctgcgagccttctttcccggggcgccataaacgcccccaatttcccagcatgcctaaaggaagaggaagatcttagcaaagcaatgtctcaagatggtgcttctcagttccaagaagtcattcggcaagagctagaattatcctgtgaagaaggaactagaaaaaatactcaccacagcatcatcacatgaatttgagcacacccaaaaaaagacctggatggatttccggaagctatttcataggatttttgcaaagaaaaggggccttcctgtggaatttgggggaaaaattccagagacccccctaagattcgattcaaccctatgaaaagataaaggccaggggcttgcctgataatatatcttccgtgttgaacaaactagtgggtggtgaaactcaatggtggtttgggaaccagcatgggctgcaaaggccctaaaagtctgattggtgtgaggaatgagaatacctttctggatctgactgttcagcaaattgaacatttgaataaaacctacaatacagatgttcctcttgttttaatgaactcttttaacacggatgaagataccaaaaaaatactacagaagtacaatcattgtccgtgtgaaaatcctacactttcaatcaaagcaggtaccccgaggattaataaagaatcttttacttccctgtagcaaaggacgtgtcttactccaggggaaaattacagaagcttggtacccccccaggtcatgggtgatatttacggccagtttctacaactctggattgcttgatacctttataggagaaggcaaagagtatatttttgtgtctaacatagataatctgggtgccacagtggatctgtatattcttaatcatctaatgaacccacccaatggaaaacgctgtgaatttgtcatggaagtcacaaattaaaaccacgtgcagatgttaaagggggcggggacaattcacttcaatatggaagggcaaacttgaggacttggtgggaaattgctcaagtgccaaaaggcaccatgtagacgagttcaagtctgtatcaaagttcaaaatatttaataccaaacaacctatggatttctcttggcagcagttaaaagactgcaggagcaaaatgccattgacatggaaatcattgtgaatgcaaagactttggatggaggcctgaatgtcattcaattagaaacctgcagtaggggctgccatcaaaagttttgagaattctctaggtattaatgtgccaaggaccccgttttctgccctgtcaaaaccacatcagatctcttgctggtgatgtcaaacctctatagtcttaatgcaggatctctgacaatgagtgaaaagcgggaattttcctacagtgcccttggttaaaataaggccagttctttttagaaaggttcaagattaatctaaaaggatttgaaaagaatacaaaataggcttgaattggatcaccttcacagtttccgggagatgtgaccatttggaaaaaaatggtttcattaaaggggaaccggttatccatccattgcaaatccatggtgaccggaatggatatccccacctgggagccagtatttagagaaccaagattggtgtctggaaaccttccgcatcttggaccactgaaatgaaaaatactgtggacacttaaaataatgggcttagtttcttaccaatgaaatgttctctaggattcgtaaaataggcaggtactttacctatgttactgtaccctgcagtgttgaatttttaaaatagagttttctgcagtatgcttttagtctaagaaaagcacagatggagcgaatactttactttccttctttgaagagaatcccaaaagttatgttcatcttaaagtgcaatattgtttaatcttaaaactggggcaactttggaagaacttttaacagaagccctcaatgatgatcactttgaattgcttgtgatttcaaaaataaagcagtgaagcaaaaaaaaaaaaaaaaaaa

SEQ ID NO: 152255 - DNA, 395 bp, Homo sapiens
gagactgagcagacgcctccaggatctgtcggcagctgctgttctgagggagagcagagaccatgtctgacatagaagaggtggtggaaggagtaccgaggaggaggggcaagaagaagcagctgttgaagaagaggaggactggagagaggacgaagacgagcaggaggaggcagccgaagaggattctgaagcagaggcttaggacccagggagaccagggcagaagaagatgaataatatgaggatgcatcggattgctgaagatggcccaatggaggagtccgaactaaagccctgtgtcgtagaggcccaatttggtgcttctcatgagtcctcatatgattcatagtggtctatgtagacctgcatcgattgtgcatggaataggactg

SEQ ID NO: 152256 - DNA, 357 bp, Homo sapiens
  misc_feature (1)...(357): n = a,t,c or g
tgcacgggcatagccccccccagcaagactccgctcacaccccggtcacccagtcactggccaatggggtcctatgaagatcaaatgtcactataacacgagggtgtgagccgggcgccagtgcctgcagccggtgctgtccacagggagctccagcccttctcacactcgacccgcagaaaccacccaccttcaccatgtctgacgaggaagttgaacaggtggaggagcagtacgaagaagaagaggaagcccaggaggaagaggagaaaccgagacccaaactcactgctcctaagatcccagaaggggagaaagtggacttcgatgacatccagaagaagcgtcagaacaaan

SEQ ID NO: 152257 - DNA, 457 bp, Homo sapiens
gctgcgagaagacgacagaaggggagaaagtggacttcgatgacatccagaagaagcgtcagaacaaagacctaatggagctccaggccctcatcgacagccactttgaagcccggaagaaggaggaggaggagctggtcgctctcaaagagagaatcgagaagcgccgtgcagagagagcggagcagcagaggattcgtgcagagaaggagagggagcgccagaacagactggcggaggaaaaggccagagtgcagatgctggccaagttcagcaagaaggctgggaccccagccaagggcaaagtcggcgggcgctggaagtagagaggccagaaaggcccctcgaggcagagaccctccgccctcttgcacaccagggccgctcgtgggactccacatcctccagcccccacaatcctgtcaggggctccctgacagtcctgggggtggagagg

SEQ ID NO: 152258 - DNA, 458 bp, Homo sapiens
agggcagaggtcgccctgaagaagaagaaagctctgtcttccatgcgagctcactacagcaggctacctggccaaggctgaccagaagagaggcaagaagcagacagcccgggaaatgaagaagaagattctggctgagagacgcaagccgctcaacatcgatcaccttggtgaagacaaactgagggacaaggccaaggagctctgggagaccctgcaccagctggagattgacaagttcgagtttggggagaagctgaaacgcctgaaatatgacatcaccacgctcaggagccgctcgtgggactccacatcctccagcccccacaatcctgtcaggggctccctgacagtcctgggggtggagaggccatcccggggcgtcccccgcgtctgtgtccttgctgccttcatcccctggggcctgtgaataaagctgcagaacccccaaaaaaaaa

SEQ ID NO: 152259 - DNA, 1214 bp, Homo sapiens
cacacaccccggccacccagtcactggccaatgggctcctaggaagatcaaatgtcactataacacgagggtgtgagccgggcgccagtgcctgcagccggtgctgtccacagggagctccagcccttctcacactcgacccgcagaaaccacccaccttcaccatgtctgacgaggaagttgaacaggtggaggagcagtacgaagaagaagaggaagcccaggaggaagctgcagaagtccatgaggaagttcatgaaccagaggaagttcaagaagaggagaaaccgagacccaaactcactgctcctaagatcccagaaggggagaaagtggacttcgatgacatccagaagaagcgtctgaacaaagacctaatggagctccaggccctcatcgacagccactttgaagcccggaagaaggaggaggaggagctgtccgctctcctagagagaatcgagaagcgccgtgcagagaagagcggagcagcagaggattcgtgcagagaaggagagggagcgccagaacagacttggcggaggaaaaggccagacgggaggcgcgaggatgccacgaggagggcagaggacgaccttgaagaagaagaaagctctgtcttccatgggagccaacttacagcagctaccttgggccaaggcttgaccagaagagaggcaagaaagcagacagccccgggaaatgaagaagaagattctggctgagcagacgcaagccgcttcaaccatcgattcaccttggtgaaagacaaaactgaggggaccaaggccaaaggagcttctgggagacccttcacccagctggaagatttgaccaagttcgagttttggggagaagctgaaacgcccagaaatattgacatcaccacgcttcaggagccagagtgcagatgctggccagaaagcaccagcaaagaaggcttgggacccccagccaagggcaaagttcggtgggcgctggaagtagagaggccagaaaggcccctcgaggcagagaccctccgccctcttgcacaccagggccgctcgtgggacttccacatcctccagcccccacaattctgtcaggggctccctgacagtcctggggggtggagaaggccattcccggggcgtcccccgcgactgtgtccttgctgccttcactcccctggggcctgtgaataaagctgcagaacccccttaaaaaaaaaa

SEQ ID NO: 152260 - DNA, 1950 bp, Homo sapiens
  misc_feature (1)...(1950): n = a,t,c or g
acgtgaccacccggactcgaagcccgccccgcccccgcccggctcgccggctccggggtctgctccgggggtcgcggacgcggggccgggcggcggagccggcgccagagcatgcggggcgcggcgcgggcggcatgggggcgcgcggggcagccgtggccgcgaccccccgccccgggcccgcccccgccgccgctcccgctgctgctcctgctcctggccgggctgctgggcggcgcgggcgcgcagtactccagcgaccggtgcagctggaaggggagcgggctgacgcacgaggcacacaggaaggaggtggagcaggtgtatctgccctgtgcggcgggtgccgtggagtggatgtacccaacaggtgctctcatcgttaacctgcggcccaacaccttctcgcctgcccaggcacctgaccgtgtgcatcaggtccttcacggactcctcgggggccaatatttatttggaaaaaactggagaactgagactgctggtaccagacggggacggcaggcccggccgggtgcagtgttttggcctggagcatggcggttctgttcgtgggaggccacgccgcaatcanggatatcggccggaggaccacaggcttccagtacgagctggttaggaggcacagggcgtcggacctgcacgagctgtctggtgagtgtcctgcctgnnnnnnnnnnnnnnnnnnnnnnnnnnnnnnnnnnnnnnnncctccagcacgtgccgccaactcacatttgaagtggcgttggtcacaaaggtgccttgacgtggacaccctccctgacttggctttgctgagtgtgaggatcctttgacggtggtgggcggcgttccagagcctgtcccgtccaggctgcttcctgactctgcctttcttctccagcgccgtgccgtccctgcagtgacaccgaggtgctcctagccgtctgcaccagcgacttcggtgagtgtctcctcggcagcttctaccnnnnnnnnnnnnnnnnnnnnnnnnnnnnnnnnnnnnnnnnccccatctccttccccgcacagccgttcgaggctccatccagcaagttacccacgagcctgagcggcaggactcagccatccacctgcgcgtgagcagactctatcggcagaaaagcagggtcttcgagccggtgcccgagggtgacggccactggcaggggcgcgtcaggacgctgctggagtgtggcgtgcggccggggcatggcgacttcctcttcactggccacatgcacttcggggagccgcgggctccgctgtgcccccaaggcttcaaggactttccagaggatgtacaggggatgccccaggagagggggctgaaccctttggtaggctggcaacggaactgactccggttggccgctgcctttccctctccttgatgagtccacaggactgctgtgggcgctgcggtcctggtcgggccgtgcggttgagggccgcgcgcctgggagccgccatgcccctgggccccaggcctgaccctggtacccgaagctgtggacgttctccgccacacttcaacccctatgtacttctcagccaatggatgccctggccgattggaaatgctgtaaaatgcaaactaagttattatattttttttttggtaaaaaagatatgtccataggaaacaaattcccgtgtcttaaaacgccttggtttgccgtctgatactgttctctaaagacgttaggagtcacgtgcatctggcctgcggttgtgtgaagcactggccgttgggcacagtggatgtgtgaaaaggtgccattcagagttgttattctcatgacggaagttttggagccaaataatacgttttttattttcattttatttttaaaggatgagctttggtccttttcaggccgccggttgtttccgttcccgagaataaagacgaggatccgaccagcc

SEQ ID NO: 152261 - DNA, 450 bp, Homo sapiens; identical to SEQ ID NO: 150214

SEQ ID NO: 152262 - DNA, 462 bp, Homo sapiens; identical to SEQ ID NO: 150215

SEQ ID NO: 152263 - DNA, 1256 bp, Homo sapiens
gtcatttcggagcgactcagcgcctgcccgccctctcgccgcgtcgccggtgcctgcgcctcccgctccacctcgcttcttctctcccggccgaggcccgggggaccagagcgagaagcggtggaccatgttccgacgcaagctgactggctcctcgactacttattaccccttttgtgttcaaccgcagagatgaaacagaatttagaaacttcatccgtttggcttgaagaccagaaaatcaggcactacaagattgaagacagaggtgaatttaagaaacatccacagcagcgactggcccaaggttctttgaaaagtatttcaagagatgttaactgtcctttcaagattcaagatccgacaagaaagctattgactggcttcttggtttagctgttaagacttgaatatgggagataatggctgaaaaataccaaggatttagtaccctgataattccaaaacttgctggacaatgcaactaaaaatggcagaaccatttgatccattttgggatgtaaataatccctgattttaagggctggtgttgttggctttgggctaaacctggcttcagatttcagcgtcatgatgattctcctggtaaatgcttaaggcaaattcgggattttgggttcaggagccgccttgaccaccagggatgccagtttgcttaagggcaaattcaaacaaaagaggggcttaacctgttgcttttagacaaacccatattcttggttttgacgacaggagatgcaagttctttaatgaagctgctcgaaattctgcggattgcttgcacataagaggagctcagagagcttacagaccaaaaatcaacgaaagccatagtagctgttcaggcaatttattgctgatccaaaagacaggaccacagactgggaaaaagtttggaagatgaacactttgaggaccttcagcttctcacctactttaggtacatgttggggaaccatacacttctggcatgttttgggaaatcaaaatgtcacaattctcggggggaaggaagcccagaaaaattggggtatggttctagaggattttaccaccattggcttattgcttcctgcttttttctttaataaagtttaggaaagtaaaataaaataaaaaagggggggccgttttaaaggagcaagctttaggtccgggtgctggggaggattaatgttttttataggggccccaaaattaatttcctggcccggtgtttaaaagtgggggatggg

SEQ ID NO: 152264 - DNA, 894 bp, Homo sapiens
atgtaccagtatcagaaccaggccacacaacaggagtgtagcatttgcttggaacatggaatgaaaattaagagtgaatcccaggttttagccaagggcaggaaggtggcaaagggaggcgaatccgagtgggtggagggaggggaagggcgagaggagaaaaagcattcaagaaatatttatcaaagacctgctgtaagccaggtggttgctgtatatggaactttatctgatttgctttctgtggccagcagtaaactcggcataaaagccaccagtgtgtataatgggaaaggtggactgattgatgatattgctttgatcagggatgatgatgttttgtttgtttgtgaaggagaatcatttattgatcctcagacagattctaagcctcctgagggattgttaggattccacacagactggctgacattaaatgttggagggcggtactttacaactacacgcattactcctaccaggcaaatctttgctgtgcaaatcttgaatgagctgatctctggatcagtacttaactgtgcaaatctccagggagtcaagatgctctgttctaatgcagaaggagcatccctgaaactgtgtaattttgaggatccttctggtcttaaagccaatttagaaggtgctaatctgaaaggtgtggatatggaaggaagtcagatgacaggaattaacctgagagtggctaccttaaaagatgcaaagttgaagaactgtaacctcagaggagcaactctggcaggaactgatttagagaattgtgatctatctgggtgcgatcttcaagaagccaacctgagagggtccaacgtgaagggagctgtgtttgaagagatgctgacaccactacacatgtcacaaagtgtcagatga

SEQ ID NO: 152265 - DNA, 987 bp, Homo sapiens
atggctgctgaaccagtagaagacaattgcatcaactttgtggcaatgaaatttattgacaatacgctttactttatagaaaacctggaatcagattactttggcaagcttgaatctaaattatcagtcataagaaatttgaatgaccaagttctcttcattgaccaaggaaatcggcctctatttgaagatatgactgattctgactgtagagggcagaaaggtggcgaagggaggcgaatccaagtgggtggagggggggaagggcgggaggagaaaaaggtgggaggaggaccaggtgggagggtggtggcccactcaggacccagtgggggcagcgtgatgaggcggatgaccctgttcctgaacggcagccccaagaacggaaaggtagttgttgtatatggaactttatctgatttgctttctgtggccagcagtaaactcggcataaaagccaccagtgtgtataatgggaaaggtggactgattgatgatattgctttgaacagggatgatgatgttttgtttgtttgtgaaggagagccatttattgatcctcagacagattctaagcctcctgaaggattgttaggattccacacagagtggctgacattaaatgttggagggcggtactttacaactacacggagcactttagtgaataaagaacctgacagtatgctggcccacatgtttaaggacaaaggtgtctggggaaccaatttagaaggtgttaatctgaaaggtgtagatatggaaggaagtcagatgacaggaattaacctgagggtggctacattaaaaaatgcaaagttgaagaactgtaacctcagaggagcgactctggcaggaactgatttagataactgtgatctgtgtgggtgtgatcttcaagaagccaacctgagagggtccaacatgaagggagctatatttgaagagatgctaacaccactatacatgtcacaaagtgtcagatga

SEQ ID NO: 152266 - DNA, 1920 bp, Homo sapiens
atgaaactcatggaaacacttaaccagtgcataaacgctggtcatgaaatgacgaaggctatcgccattgcacagtttaatgatgacagcccggaagcgaggaaaataacccggcgctggagaataggtgaagcagcggatttagttggggtttcttctcaggctatcagagatgccgagaaagcagggcgactaccgcacccggatatggaaattcgaggacgggttgagcaacgtgttggttatacaattgaacaaattaatcatatgcgtgatgtgtttggtacgcgattgcgacgtgctgaagacgtatttccaccggtgatcggggttgctgcccataaaggtggcgtttacaaaacctcagtttctgttcatcttgctcaggatctggctctgaaggggctacgtgttttgctcgtggaaggtaacgacccccagggaacagcctcaatgtatcacggatgggtaccagatcttcatattcatgcagaagacactctcctgcctttctatcttggggaaaaggacgatgtcacttatgcaataaagcccacttgctggccggggcttgacattattccttcctgtctggctctgcaccgtattgaaactgagttaatgggcaaatttgatgaaggtcaactgtccaccgatccacacctgatgctccgactggccattgaaactgtagctcatgactatgatgtcatagttattgacagcgcgcctaacctgagtatcggcacgattaatgtctcgtcacgatgtactcgttgctgcatcgtactctacgtctggtcgactgcgctcgactacgactcttcgtcgtcgtcgtctacctactaccgtcaagtgactactgtgactgacgtgactgtgacgctagccatggctttgacgtcggacccgtcatccgctaatgatccgtccgtgcgactgtatcatgtacattggcatccactatcgatctacttacgacgccctgacctccgctcaatcaatccttgcgcactggatcggatcgaactaagctacttagcaatagcacacaaaatcaattcactaggactgcagcaatgcagtaaagaaagtttaattgacacaaggctggccacacgggagaagaagttcttgctcaaatcagtccccctgaaggctcagaggttaaggtttttcaaggataatttgcattcaagaaatatttatcaaagacctgctgtaagccaggtggttgctgtatatggaactttatctgatttgctttctgtggccagcagtaaactcggcataaaagccaccagtgtgtataatgggaaaggtggactgattgatgatattgctttgatcagggatgatgatgttttgtttgtttgtgaaggagaatcatttattgatcctcagacagattctaagcctcctgagggattgttaggattccacacagactggctgacattaaatgttggagggcggtactttacaactacacgcattactcctaccaggcaaatctttgctgtgcaaatcttgaatgagctgatctctggatcagtacttaactgtgcaaatctccagggagtcaagatgctctgttctaatgcagaaggagcatccctgaaactgtgtaattttgaggatccttctggtcttaaagccaatttagaaggtgctaatctgaaaggtgtggatatggaaggaagtcagatgacaggaattaacctgagagtggctaccttaaaagatgcaaagttgaagaactgtaacctcagaggagcaactctggcaggaactgatttagagaattgtgatctatctgggtgcgatcttcaagaagccaacctgagagggtccaacgtgaagggagctgtgtttgaagagatgctgacaccactacacatgtcacaaagtgtcagatga

SEQ ID NO: 152267 - DNA, 1532 bp, Homo sapiens
tttcgtggggaagggccccaggcaggctgaggattctaggtgcggggcgggaaggaggaccggccgaaccttgggtgagggacagagggcgtgcgtgtggtgtgtccccaagggcaggaaggtggcgaagggaggcgaatccgagtgggtggagggaggggaagggcgggaggagaaaaaggtgggaggaggaccaggtgggagggtggcggctcactcaggacccaccgggggcagcgcgatgaggcgggtgaccctgttcctgaacggcagccccaacaacggaaaggcgggtgctggatatggaactttatccgatttgctttctgggggcagcagtaaacccggcataaaagccaccaatgtgtataatgggaaaggtggactgattgatgatattgctttgatcagggatgatgatgttttgtttgtttgtgaaggagagccatttattgatcctcagacagattctaagcctcctgagggattgttaggattccacacagactggctgacattaaatgttggagggcggtactttacaactacacggagcactttagtgaataaagaacctgacagtatgctggcccacatgtttaaggacaaaggtgtctggggaaataagcaagatcatagaggagctttcttaattgaccgaagtcctgagtacttcgaacccattttgaactacttgcgtcatggacagctcattgtaaatgatggcattaatttattgggtgtgttagaagaagcaagattttttggtattgactcattgattgaacacctagaagtggcaataaagaattctcaaccaccggaggatcattcaccaatatcccgaaaggaatttgtccgatttttgctagcaactccaaccaagtcagaactgcgatgccagggtttgaacttcagtggtgctgatctttctcgtttggaccttcgatacattaacttcaaaatggcgcaatttaagccgctgtaatcttgcacatgcaaatctttgctgagctaatcttgaacgaactgatctctatggatcagtgcttgactgtgcgaatctccagggagtcaagatgctctgttctaatgcagaaggagcatccctgaaactgtgtaattttgaggatccttctggtcttaaagccaatttagaaggtgctaatctgaaaggtgtggatatggaaggaagtcagatgacaggaattaacctgagagtggctaccttaaaaaatgcaaagttgaagaactgtaacctcagaggagcaactctggcaggaactgatttagagaattgtgatctgtctgggtgtgatcttcaagaagccaacctgagagggtccaacgtgaagggagctatatttgaagagatgctgacaccactgcacatgtcacaaagtgtcagatgagaattttaggggctggaggaagatgtaaaagatgaaaatgttttccttatcacttttctttctccacccactcagttgtctagaagaaataacactgtaaggaaatttaaaaaaaaaaaa

SEQ ID NO: 152268 - DNA, 524 bp, Homo sapiens
cctcgcagacgatgggctctactcctgagtgagtctagtgggcttgggggtgtccatgtggtgctgtcccttggcagggtcagggcagctgctagggtgggaccagcagttggggtctgcagcgtggagatgggcaggaagctggagcccggctcatcgtcgcatagcctgcctgcacccgccccccgccaccacctcctggtgggttccgccctcatgccccagctctccctgcagcgggacctggacttcaccatcgacctggacttcaagggccagctgtgcgagctgtcctgctccaccgactaccggatgcgctgaggcccggctctcccgccctgcacgagcccaggggctgagcgttcctaggcggtttcggggctcccccttcctctccctccctcccgcagaagggggttttaggggcctgggctggggggatggggagggcacatcgtgactgtgtttttcataacttatgtttttatatggttgcatttacgccaataaatcctcagctggga

SEQ ID NO: 152269 - DNA, 1653 bp, Homo sapiens
  misc_feature (1)...(1653): n = a,t,c or g
atggcggcagccgaggccgcgaactgcatcatggagcttccaagggccttcggcatccggcctagcggagggtcttatcccccctcccacgtggaggagggctgggggcgcttccggccaggcccccacgtggccgctgcgcgccctcctccccggggacctgggcacacgccgtggggtgtgatcgacctggggccctccacgatgtggggagtctcttgggaggagcagtgcttctcagccctttaccaacctccttccgagctccgggggcatctgttgggatatcggacccggttttgtgcgttctgggtgtcctgtggccaggcggaaagcagtgagaagcccaacgctgaggacatgacatccaaagattactacatttgactccatacgcacacatttggcatccacgaggagatgctgaaggacgaggtgcgcacccatcacttaccgcaactccatgtttcataacctggcacctcttcaaggacaaggtggtgctggacgtcaggctcgggcaccggcatcctcttgcatgttttgctgccaaggcccgtggccccgcaaggtcatcgggatcgagtgttccagttattcttcttgattatggcggtgaagatgcgtccaagcccaacaagttaagaccacggcggggaacatccatcaaggggaaaggtgggaggaaggtggagctcccagtgggagaaaggtgggacatcattcatcagcgagttggatggggttattgcctctttcttacggagtccatggcttcaacaccgtgctcttatgccccgggacaagtggctggcgccccgatgggcttcatcttcccagacccgggcccagctgtatgtgacggccattcgagggaccggcaggtacaaagactcaagatcccacttgttgggggagaacgtgtattggcttcgacatgtctttgcatcaaaagatgtgcccattaaggagcccctagtggatgtcgtggaccccaaacagctggtcacccaacgccttgccttcataaaggaggttggacatctatacccgtcaaggtggaagaccttgaccttcaacctcccccgtttctgcccttgcaagttgaagcggaattgacttacgtgcacggccctggtggcnctactttcaacattcgagtttacgcactgccacaagaggaccggagggaccggctttttccaccagcccccgaggtccccgtaacacgcactggaagcaagacggtgttctacaatggaggactaacctgacccgtgaaagacgggccgaggagatcttcggcacccatcggcaatgcggcccaacgccaaagaacaacccgggaccctggacttcaccatcgacctggacttcaagggcccagctgtgcgagctgtccgtgctccaccgactaccggatgcgctgaggccgggtttctcccgccctgcacgagcccaggggctgagcgttcctaggcggtttcggggctcccccttctctctccctccctcccgcagaagggggttttaggggcctgggctggggggatggggagggcacatcgtgactgtgtttttcataacttatgtttttatcacggttgcatttacgccaataaatcctcagctgggaaaaaaaaaaaaaaaaaa

SEQ ID NO: 152270 - DNA, 276 bp, Homo sapiens
  misc_feature (1)...(276): n = a,t,c or g
cgcatcgactatgatgagttcctggagttcatgaagggtgtggagtagatgctgaccttcacccagagctgcctatgcccagcctccaactccagctgagtcctggggttggggagggnnnnnnnnnncnnnnnnnnnnncnnnnncnnnnnnnnnnncnnnannnncnnnnnccncctnccccacannnnnnnnnnnnnnnnnnnnccccaccccccctttcccccttcccnnaaccaacaccaccaccccacccccacaacactcacccccact

SEQ ID NO: 152271 - DNA, 769 bp, Homo sapiens
cggacgcgtgggcggacgcgtgggctgtgagccgccagcatggattgacatctacaaggctgctggtagaagcagctttgaacaagaatgagcaagaaaaatgagttcataggcagcctttcggacatctttcgtgctgggcgcatgaggatggctgcatcagcacccaagggagctggggcaaggtgatgaggatgcatgggccagaaccccaccccatgagggagctgcaggagatgatcgatgaggtggacgaggacggcagcggcacgcgttgacatttgatgagttcctggtcatgtatggttcggtgcatgaaggacgacagcaaaagggaaattctgaggaaggagcttgtctgaccttcttccggcatgttttgaccaaaaaatgcttgatggctacatcggaccttggatgagcttgaagattaattgctgcaggctacaggccgagacccattcacggaggacgacgacatcgaggagcttcatgaaggacggagacaaagaacaacgacggccgcatcgacttatgatgagttcctgggagttcatgaagggtgtgggagtagatgcttgaccttcacccagagctgcctatgcccgagcctccaactccagctgagtcctggggttggggagggggtcggggtcccaggacctgagcctggccatgtcctcaaccccaaatcccccggactccctcccttagatctgtcctgggggatgcaaataaagcctgctctcccaaggaaaaaaaaaaaaaa

SEQ ID NO: 152272 - DNA, 2035 bp, Homo sapiens
atttaattaccggaacgacccacgcgtccgaggctgcatatagaccctgggccggggctcgcgctggccggctgcagcgcgcaaggtgccaagccctcccctacgaagtctgttttgtctcaggctgggctgagtcacatagaatagatagatagttgatttagcacatgtcctccagatcatattatccgcctacaaatatagcctgttagcgcacaggcacgggaggcttcttccggctcggccgtgctgctcagcgggtgtataacagcctctgcggtgtaaacagcactctgcggtgtaaacagccgcgttggccaggccaggactgtcagtgcccgcccctcggggcaggtaatttcatgctcccaaaatgggacataaagtggttgtcttcgacatttctgtcatcagagccttgtgggaaactcgtgtcaagaagcacaaagcttggcagaagaaggaggtggaaaggcttgagaagagcgccttggagaagatatatttaggagtggaactttgtggccgaatgcaggaggaagggctttttcccaggctgtatactgcttgaatggcttcatagacaccagcgtgcggcttctggacaagattgaaaggaacactctcacaaggcagagttcacttcccaaggacagaggcaaacggagcagagcgtttgtgtttgaactttctggggagcactggacggagctcccagattcattgaaggagcagacacacctgagagaatggtacataagcaataccttgattcaaatcattcctacatatattcagttatttcaagcgatgagaattctggatctgccaaaaaaccaaatctcacatcttccagcagaaatcggttgtttgaagaacctgaaagaactcaatgtgggtttcaactatctgaagagcattcctccagaattgggagattgtgaaaatctagagagactggattgttctggaaatctaaaattaatggagctgccctttgaattaagtaatttgaagcaagttacatttgtagatatctcagcaaacaagttttccagtgtcccaatctgtgtcctgcggatgtcgaatttgcagtggttggatattcaccgccataacctggccgaccttgccgaagatatagacaggctagaggagctgcagagctttctcttgtataaaaacaagttgacctaccttccctattccatgctgaacctgaagaagctcactctgttagtcgtcagtggggaccatttggtggagctcccaactgccctttgtgactcatccacacctttaaaatttgtaagccttatggacaatcctattgataatgcccaatgtgaagatggcaatgaaataatggaaagtgaacgggatcgccaacattttgataaagaagttatgaaagcctatattgaagtccttaaagaaagagaatctgttcccagctataccaccaaagtgtcttttagccttcaactttgatatccatcagaagactgcaaatctcactattctctggagctatatataaatctttgttatgatcatgtcatataggaagaatggcttgtgcttaaggacaaagtctagaaaccactatcatagttgctaaaaaaaatggttttcaaatgtcaaatacatgagtatctccctccatggactggagaattgaaaaattggtttgtatattgatatttccaggttcatttgcatatacttttttccaaataatgcacatttaatatgttttaaaatgtcttatttttaagaattataactaaaagaccaaatactgaagttaagtgcattgttttcaggaatcaaaagataaaggggccgggtgtggtggctcacacctgtaatcccagcactttgggaggccgaagtgggtggatcacctgaggtccggagttcgaggctggtttggccagcatggcgaaaccccatctctactaaaaatacaaaaaattagctgggcatggtggcagttgcctgtaatcctagctactcaggaggctgaggcagg

SEQ ID NO: 152273 - DNA, 368 bp, Homo sapiens
  misc_feature (1)...(368): n = a,t,c or g
tgtaaaagacctggaacatacaaaaatgattacacctacagtgaagatgcacaccatgtcctcctcgcatctcttctacctggcgctgtgcctgctcaccttcaccagctctgccacggctggaccggagacgctcnnnnnnnnnnnnnnnnnnnnnnnnnnnnnnnnnnnnnnnnnnnnnnnnnnnnnnnnnnnnnnnnnnnnnnnnnnnnnnnnnnnnnnnnnnnnnnnnnnnnnnnnnnnnnnnnnnnnnnnnnnnnnnnncttccggagctgtgatctaaggaggctggagatgtattgcgcacccctcaagcctgccaagtcagctcgctctgtccgtgcccagcgccacaccgacatgccca

SEQ ID NO: 152274 - DNA, 479 bp, Homo sapiens
  misc_feature (1)...(479): n = a,t,c or g
ttctttntgcttcattattcctgctaaccaattcattttcagactttgtcttcagaagcaatgggaaaaatcagcagtcttccaacccaattatttaagtgctgcttttgtgatttcttgaaggtgaagatgcacaccatgtcctcctcgcatctcttctacctggcgctgtgcctgctcaccttcaccagctctgccacggctggaccggagacgctcnnnnnnnnnnnnnnnnnnnnnnnnnnnnnnnnnnnnnnnnnnnnnnnnnnnnnnnnnnnnnnnnnnnnnnnnnnnnnnnnnnnnnnnnnnnnnnnnnnnnnnnnnnnnnnnnnnnnnnnnnnnnnnnncttccggagctgtgatctaaggaggctggagatgtattgcgcacccctcaagcctgccaagtcagctcgctctgtccgtgcccagcgccacaccgacatgcccaagacccagaagtatcagcccccatctac

SEQ ID NO: 152275 - DNA, 458 bp, Homo sapiens
  misc_feature (1)...(458): n = a,t,c or g
ngtaaccattccattttcagactttgtacttcagaagcaatgggaaaaatcagcagtcttccaacccaattatttaagtgctgcttttgtgatttcttgaaggtgaagatgcacaccatgtcctcctcgcatctcttctacctggcgctgtgcctgctcaccttcaccagctctgccacggctggaccggagacgctcnnnnnnnnnnnnnnnnnnnnnnnnnnnnnnnnnnnnnnnnnnnnnnnnnnnnnnnnnnnnnnnnnnnnnnnnnnnnnnnnnnnnnnnnnnnnnnnnnnnnnnnnnnnnnnnnnnnnnnnnnnnnnnnncttccggagctgtgatctaaggaggctggagatgtattgcgcacccctcaagcctgccaagtcagctcgctctgtccgtgcccagcgccacaccgacatgcccaagacccagaagtatcagcccccatctac

SEQ ID NO: 152276 - DNA, 1094 bp, Homo sapiens
cttctgtttgctaaatctcactgtcactgctaaattcagagcagatagagcctgcgcaatggaataaagtcctcaaaattgaaatgtgacattgctctcaacatctcccatctctctggatttccttttgcttcattattcctgctaaccaattcattttcagactttgtacttcagaagcaatgggaaaaatcagcagtcttccaacccaattatttaagtgctgcttttgtgatttcttgaaggtgaagatgcacaccatgtcctcctcgcatctcttctacctggcgctgtgcctgctcaccttcaccagctctgccacggctggaccggagacgctctgcggggctgagctggtggatgctcttcagttcgtgtgtggagacaggggcttttatttcaacaagcccacagggtatggctccagcagtcggagggcgcctcagacaggcatcgtggatgagtgctgcttccggagctgtgatctaaggaggctggagatgtattgcgcacccctcaagcctgccaagtcagctcgctctgtccgtgcccagcgccacaccgacatgcccaagacccagaagtatcagcccccatctaccaacaagaacacgaagtctcagagaaggaaaggttggccaaagacacatccaggaggggaacagaaggaggggacagaagcaagtctgcagatcagaggaaagaagaaagagcagaggagggagattggaagtagaaatgctgaatgcagaggcaaaaaaggaaaatgaaggacaggaggattaaacagacagaggcaaggatgatgagagaggagcagacagcaagaatgaaaagcagaaaatacaatagaggaaatgaagaaaagtaggcctgctggagctagatgatgatgtgatggaaatagaagtaaccttttagagaatctcgctaagaaacatggagaaaacggaaaagaaaaatgtaatgccctagaaagcgcaaagaaagacagtggcaaaaatgaaaaaaaaaaaataaaaattataaaagaggcaaaaaaagacacactattctctgccctctaaaacacaattaaataaaagaatttaaat

SEQ ID NO: 152277 - DNA, 1798 bp, Homo sapiens
gtcaccatgcccaaaaaagtccttactcaataactttgccagaagagggagagagagagaaggcaaatgttcccccagctgtttcctgtctacagtgtctgtgttttgtagataaatgtgaggattttctctaaatccctcttctgtttgctaaatctcactgtcactgctaaattcagagcagattagagcctgcgcaatggaataaagtcctcaaaattgaaatgtgacattgctctcaacatctcccatctctctggatttccttttgcttcattattcctgctaaccaattcattttcagactttgtacttcagaagcaatgggaaaaatcagcagtcttccaacccaattatttaagtgctgcttttgtgatttcttgaaggtgaagatgcacaccatgtcctcctcgcatctcttctacctggcgctgtgcctgctcaccttcaccaagctctgccacggctgggaccggagacggctctgcgggagctgagctgggtggatgctcttcaagttccgtgtgtggaagacagggggcttttatttcaacaaggcccacagggtatgggctcccagcagtgcggagggcgcctcagacaggcaatcgtgggatgagtgctgcttccgggagctgtgaatctaaggaggctggagatgtattgcgcaccccctcaagcctgcccaagtcagctccgctctgtccgtgccccagcgccacaccgacatgccccaagacccagaaaggaagtacatttgaagaacgcaagtagagggagtgcaggaaacaagaactacaggattgttggaagaccctcctggaggagttaagagtgacatgccaccgcaggatcctttgctctgcacgagttacctgttaaactttggaacacctaccaaaaaataagtttgataacatttaaaagatgggcgtttcccccaatgtgaattcacaaattaaacattccaacattgtctttaggagtgatttgcaccttgcaaaaatggttcctgaatttggtagattgccgttgatcttttatcaataatgttctatagaaaagaaaaaaaaatatatatatatatatatatcttagtccctgcctctcaagagccacaaatgcatgggtgttgtatagatccagttgcactaaattcctctctgaatcttggctgctggagccattcattcagcaaccttgtctaagtggtttatgaattgtttccttatttgccatttctttctacacaactggggctgtttgttttacagtgtctgataatcttgttagtctatacccaccacctcccttcataacctttatatttgccgaatttggcctcctcaaaagcagcagcaagtcgtcaagaagcacaccaattctaacccacaagattccatctgtggcatttgtaccaaatataagttggatgcattttattttagacacaaagctttatttttccacatcatgcttacaaaaaagaataatgcaaatagttgcaactttgaggccaatcatttttaggcatatgttttaaacatagaaagtttcttcaactcaaaagagttccttcaaatgatgagttaatgtgcaacctaattacgtaactttcctctttttattttttccatatacgagcactatgtaaatttagcatatcaattatacaggatatatcaaacagtatgtaaaactctgttttttagtataatggtgctattttgtagtttgttatatgaaagagtctggccaaaacggtaatacgtgaaagcaaaaccataggggaagcccg

SEQ ID NO: 152278 - DNA, 809 bp, Homo sapiens
ccccccccccccccgccgcttctttctttccgcgccgatagcgctcacgcaagcatgggtttaacgtcccctaaaaccccgccggactttctgtaagtaagtgtggcaaagcaccaaccccccataaaagtgaccacagtaccaagaagggcaaggattcctctgtacgcccccagggaaaacggcgttatgacaggaagcagagacggctatggtggccatactaagccgattttccggataaaggctaaaactactgagaaaattgtgctaaggcttgagtgcgttgagcccaacttgcagatctaagagaatgctggctattaaaagatggcaagcatttttgaacttgggaggagataagaagagaaaggggccaagtgcatccaagttctaagtgttcatctttttatttattgaagacaataaaaatcttgaagtttatgttcacttcatttgtttgctgttcatcttttgggagggaataagctagagccatcaatacaattccgcttgtggggaaatttatgcctcttactggtactacttgttttgcattgaagctgactggttgagttcacatcatatgttgcaattttctaatttggcacttcaatcactaggggccttatgaggcagtttgtcattatgcaatggttattggttatcatgtgagtagacacatttcaggctaatagggagaagtcagtaacacattcatagtgaatatgagatgtctttgctaagagttaagtgtcagatctttgttataacagttaatttaataaagaattttggcattgttcttc

SEQ ID NO: 152279 - DNA, 439 bp, Homo sapiens; identical to SEQ ID NO: 145558

SEQ ID NO: 152280 - DNA, 2229 bp, Homo sapiens
  misc_feature (1)...(2229): n = a,t,c or g
aaatctccccttctacagagttcctccggcgcttcctccaccccgggatacacagaacctcatctcctacggtgctgaagcctgcagcagggcaggatgggcaggagagcaaagccgcggagtctgcggcgcgggtgaagagcggcgcgtaattcccgcagcaagattgttccgcgcccgcagcccctggactagcaggatccgaaccccggcggctgcgtgcttataggcgcagacgtgcagagagcccgcggcttaaagcgcgtcgcctggctagcgccaccccctagccttcttcaaggcctccagggctgggccacagcgcccgctcgacggcaccctgggcccagaggactcgcgggcctcatctccaatgattcagaactcacgtccgtcgctgctgcaaccccaagatgtcggagacacggtggaaacgcttatgttacatccggtgatcaaagctttcctgtgtggctccatcactgggacctgctctaccctccttttacaacactctggatctccttaaaacacgcctgcaaaccctccagccctcagatcatgggtctagacgtgttgggatgttggctgtactcttgaaggtggttcgcacggagagtcttttgggcctttggaaagggatgtccccttccattgtgagatgtgtccctgggcgttggaatctacttttggcactctctactcttttgaagcagtatttcttggcgaaggccaatcccccaaaccgccctggaagtcaagtcatgctggggggtgggctctcgctctgttgcaggggtctgtatgtcacctatcactgtaatcaagacgcgctatgagagtgggaaatatggctattaagagtatctacgctgccctgaggagcatctatcacagtgaggggcaccggggcctcttcagtggcctgacagcaactctccttcgagatgcgcccttctcaggaatctacctgatgttttacaaccagaccaaaaatatagtgcctcatgaccaggtggatgcaacccttattcctattacaaatttcagctgtggggatatttgctggtattctgggcctcactgggtaacttcaacctgcgggatgtttattcaaaactcatatggcaggcttttattccacttgaaggtttcaatggattggccaagcacgtgacacttatttttcaaagactatgggactaacgtgggctttctttccaagggtggccatcccccgaggccctccgcaggaactcttaatgggcaggcaatgggcgtgggacggtgtatgaagagatgatggccaagatgggcctgaagtcctgaccaaggagnagggactggggaacgggtgaaatctgttgccctgcttggtttctgccaagggctgcatgcttcttactattcttgcagtaaggatgaagtcctacctgggaaaaccagggcaggaattgtgtttgcctttggcctttcagtaatcccctttaagggggaaaatatatgggacctgattttcagcctttcagaatctccaaaaagaggagtcatcaaattcatagaagcaacactaggggtgttaaggaagagaacttttgcaatactcctgagaaggctacttggaaaagccattttcccccaggagacttcttgtcaaggttggctgcggcttctgcccccacccctacacccacagggtcctcccttgggtatgttccttgggcaagcaatccacaaagcccagagaagctgtaagcctgccctgccgggccctgaggagctcccaacccaggggaagaactggaaggtgagaagaggagtcactgtcacccaggtcacagactgactgaggtgatggtaggatgaggaggaacagatgcccttctttaattggttctcagttaacttctcagaggctctggagaacgggacagtggctttctagcctctgaatgttcccaaataaaattttttggtcttggccctcccgtagtgtactgctttacctctaaattctggcatttttttttccctgcaattaaagtgctgtactttatttctctgaactttatcattgaaagctgtttggaaaacctaaaagatgttgtcacacttctgttttctttacctgtgccttataaaaatggaccaaacccttttctaaaataaaatagttctagggtggctggttattgacctatgtaggtccctaaaacctaaaaaaaaaaa

SEQ ID NO: 152281 - DNA, 2110 bp, Homo sapiens
ttcccaggatacaacaaaaactgctcaggacaactgatgcatatcataataccttcttaatatataactgttctggatacaaatttaaaaaatgggctcagacaagtatcataaataataaatgaaagattttattcatctttagtagataacaagcactcaaaggttaatgagtgaaggagataaccatctcctccaaacaaagaggctcttaataacgcagaagcaaaaatctttccacttttagatgaaaacaaactaaaaaataacttcaggcttcagatatggaaataaagcaccatttttcaaatggtagacttggcttacttaaaataagtaaatagccccagactatctgaaaaagaaaaacatttcaatgccccttgtgagttctaattaccatggctacatgttaaggaacatctcagatctctctctgaacctactagtaaacaaaaattatacagatatatatacaaatgtagtcttccatttcattttttcatttgcacaagcttccagctatttaaccaggtgacaaatcaaagtgacaagatgcactaatattcgtgagaactttaaattttaaaagctagtatttaattacccttagtgagctcatttacttacattaaaaattatgcgatcagtcatgatttttctttagaccatttaataatacacatggactaacatttatcatgctttgttcaggacctccttacaatcatatcccttgtatgacttactcttcacataatcccttgccagtaaaagtgaagaccgaagattgacctgacagacaggtccctttactaacctttgcaatcttgtaccacttcataaaataatgcttactctaaaccactacagactagtttggaaataaatggaccttttcctcagaaataatcaatctttcctggtgtagtaattgaacacttgactttaaccttcatttattatcactttattattaatagaacatcccagggaatagactcccaaatcttatcactttttctttttttctttttttttttgagacggagtctcgctctgtcacccaagctggagtgcaactggcgccatctcggctcactgcaacctcctcccccttggttcaagcgattttcctgcctcagcctccagagtagctggggttacaggcacgtcccaccacaccccggctgatttttggtatttttagtaggagacgggggtttcactatgttgggccagggctggtctcaaaactcctgcacctccaggcgatccacccgcctcagactggcccagccccttttctctcaatttaaaaactgctttaaaaactgcaaatcaagtattgggttaataccactttactattattaactgattcctctaatattccagaaagagcacaagattttttccatttttgatagctgcctattgtcagttttaactggagctgaaaaacagaagacttaaataaacttgaaagccatcatcgagttttaaaaagggacactgaaataatccttcttgaagatattttctttaacagccacttatttctaccctgcaaaaagcttgaaatataaagtgtagtatttaaagccccattcaaaataaaaaatccagacaaaggagtaaggtatgttccaatttaatctttatgcaggcaaatttgtaaaaaatgttaatcacatctacatgaagtcgcaaaagagatgcaataattattgctcacttttaaacattaccttatattacggaaatttggctacttactctcatcactattacatgcacttcaagttaaatacttaccaaattttcactgtttattcctgctaggaaaggacacagttccttagaaatttacttcactttaaatcttaaagacataaattgagggtccatactttgtttagtgcttatctagaagaatgcattgccacatcacatactcaggtattgattttcagattttagaaaactatcattgttcatactaaaaagcatcacagttgactgtttattattggttcagaaagatcacaggaggaaacagaatgtaaaaacattcttagcatatgctggttttaatctaggatatagt

SEQ ID NO: 152282 - DNA, 2356 bp, Homo sapiens
catgagcctgccagattgccaattccatcctccaccttcagaggatgccgccatccagaattttgccttactcattttactttcttcatagttcgacaccttaaatgtatattactaatagtagctttgcatttttggctgatttaaaaattgatataaatgaaataatgctgtagagatgctttttggtattaagtggatatactgttattcttaaagatgtttgaaatgaatatacctttctaaatatctttttaaaataatacattaaatgatactgctttagaattcatgaactgcatctcatgagaatatgtagagatgacgtgggcaggtaaagtaaaacttcaggttgaatatcctatgataatttaaaaatgacaaaatagtgtggtgaataatagagcttgagcactttaaggcaccatagggaccccttcaatgtaatgatgacagtgctgaggtgcagagaagttaggtaatcagcccaagccactactactaaggacagaccctatctacttttcctaatttgtcagaagactgcctatgatactactaataaaaagtcctatgaaattggtattgtcattattttacaaataaaataatcttcaatttttgtttcctctatgcatgggttacttagtattttgtaatttgaatttcaagcataattaaaaagaaatcaggtatctaggctgggcatgatggctcaggcctgtaaatctcaacattttgggaggctgaggcaagaggatcacttgaggccagggagtttgaggtatcttttgttggatctctacactggattgtattctctcttttattctatggaaagttaaaggatttttttctgatactaccaaattggtccagttttttaaatactcagtttgtgctaaaagaaaacattcggcaactgatatctgctggttctgtatgtatctgtcaagtccagatttgtccattatggtgtatgaatctaataggacctccaccaatggtaatacctggccttcttggaaatcattaccggggatagctaatattaaaatatcctggtttgtctgtatatttaattctttactctcattatactaaatttttttaatgtaatttgaattgatggtaaaaattgtatacaggccgggtgcagtggctcactcctataaatcccagcattttggaagtcctatgcaggaggattgccagaggccggggaatttgagatcagcctggggcaacatagtgaaactctcatctttataaaaagtaatattaaaatttttaaaagtgtataaactgtaaagtatattttactggtgttttcttccttattcctacttgtcagatgcaaatacacatttttgtgtgtttgtgtttagtaattataagtatacatatttcattcttctatttcatatatttctatgacattatatcttagatgtgtaatttatgaactactactggattattttaatccattagaaattactattcacgcattctgtattcaattcatgtgatagctaatatatttggttttaaatgcatcttattttgtggttttcttctaggctgttttttgtgctttcttttaaaaatatataggttttaataatcttaattttcttttagtttgaaatgtatatactcattttattcattagtctaagataagaattgtaacacttctctaacctattatagaattgttaatacctttacccttctcttgaacacatcaaaggatgtcattgagtgttgggtattgggagtataggcatatcctattattctgcctcaattaggaggatattgttccatgttgtataggaggtaataggtaattgtattgatctgcagatgcatccatctcttggattctcattccttctaccactgcagaactttcacctgtaaacacattccatttggcattaaggataacttttagggttacttttctactaaatttccaatttttgaccagatataatcttatattgtgctcttcctgaaaaatactattgttgtggatagaaatctgggttggtagttatttcttcagcaatttgacccatgtcattcccactgtgtcccctggccrccctgtatactggatgtgaatggatacaattatatattgtgtttatagttttcctgtgctataggaacagtattcgaatttgatgcaaaggacaacacaccctagagattgtaacagtgagatgaaccaagtgattggatggggttttgagttgctggaataatggagttacagtgtacaatgcataagcaacataataaattatatatttggtgaacaaatggaaaaaaaaaaaaaaaa

SEQ ID NO: 152283 - DNA, 499 bp, Homo sapiens
  misc_feature (1)...(499): n = a,t,c or g
gtcctgccgggaattctgcctcagctgccctcggctctcgctgcgttcgctcaccgctgtcacctgcacggtgtggctggcggcctacggactcttcaccctctgcgagaacagcatgatcctctctgctgccatcttcatcaccctcttaggtctgcttggttatctccattttgtgaagattgatcaggagactctgttaatcattgattcccttggcattcagatgacttcatcttatgcttcaggcaaagaaagcactaccttcatagaaatgggcaaggtcaaggatattgtcatcaatgaggccatttacatgagtgccaagccccggctggactgcttgattgaagtatacaggagctgccaggagatcctggcacaccagaaagccacatcaacaagcccatgagccccagcgttcagaaggccagcattgtcttccatgggagatgactcttaagccatangggctggttttccgtactccaaaccatca

SEQ ID NO: 152284 - DNA, 404 bp, Homo sapiens
tggcgctgcagcgccgctattactccccgttctgccgggaattctgcctcagctgccctcggctctcgctgcgttcgctcaccgctgtcacctgcacggtgtggctggcggcctacggactcttcaccctctgcgaggtaatggcaagtcggcccctccccgcgctcgaaggagggggttcggctttgggagggtctttggggtctttggtcgagcccggacctctggtcggcccctcctacagtgataggacaggagggcgggaactcacgggttctggggacgatattccgctgctggacagctctttaaatgacgtttagtgaaatgtgtgctcctggatagtacattccccttccgtggctgtgctctgctcggtgggttcactcagcatacatctaggt

SEQ ID NO: 152285 - DNA, 2985 bp, Homo sapiens
  misc_feature (1)...(2985): n = a,t,c or g
agcggtcgagacgaccagggccggcgagcgcagtgcagcgccgcgcggtgcgggcggccgagtgggggcgtcatggaagatgaacggagcttttcggatatctgcggcggccgcctggcgctgcagcgccgctactactccccgtcctgccgggaattctgcctcagctgccctcggctctcgctgcgttcgctcaccgctgtcacctgcacggtgtggctggcgggctacggactcttcaccctctgcgagaacagcatgatcctctctgctggcatcttcatcaccctcttaaggccgctgggtgtatccccatctgtcaaaaatgatcaggagactctgttaaatcattgattcccttgggcattcagatgacttcatcttatggtttcaggcaaagaaagcactaccttcaatagaaatgggcaaggtcaaaggatatttgtcaacaatgaggccatttacatggtaagcatttaaaagcacaaggcgatttactacctctggaacttatttgaaaagattccagtgggaaccacatggggatatccccaagtatgtacccgtcttccagagtgccaagccccggctgggactgcttgaattgaagtatacaggagctgccaggagatcctggcacaccagaaagccacatcaacaagcccatgagccccagcgttcagaaggccagcattgtcttcccatggggagatgacctcttaagccataggggctggttttcccgtacctccaaacccatcaggtgggacaccagtcctagggaaccattatgggatgtagtgcatcttaggagccatagagcaggtgactgggaaatctaactccagtatatttcccgtgtattatagtgttttcctttgttaaggtttttgcctactttaccgaaaggaggggagaccttaagaattttgacacagtatgttcaaaagtaatgtcagcaaagaacacttttcggaaaattggtaagcatgttccaggtttactttgttgatgtttgtgaagcaaaacaatgggaaactgaccatcagatgtcttgagaaagctatattttccaatagtacccccttgtgtaaagttacgaaaaaaaacaagcccttcagtactggttagcaggaagaaatgtcctacaaaagacgagtctgtcaacctagtgcctgtgttctgtacagggcttatttatttactgttaataaacagatcttccaaaacacacagttacctggttcacagatagactgactttttattgacaaacaagatcatagtatttcagtcatggtgtcaagcacgattaatacttttctgttactcagcattttttttttatatcagttcaaaagctacttttgccaagaaggatgagacaaaaggccagacagaaattggactttggttttcagacatggggactctcatgttaacaaagaataaataaggcaaatattggaatcctttgtttctaaggttagtttcttctgtataaggattaataaactaaaggggttcctggaggggttggggggagggagagaggggtggggggaaataggattgacccccaaattcaggtgttggaacacaggctccattcttgttttactcttcccttggggctccccacttttcttctaaactctctgggtagataatgttatccttattggccttagagatacccaagatattataaaaccagagctgttatgtctgtcaccagccctgcaggaattattcaggaaccctgtggtacatgtgacttgttcgaggtagaaatgtctcagctagatccccaagttgtggggtgaaaagtgtgaacagaaatggctgtaaaactacttgccttgcaaagtcaagtaacatttaaaggaggcagaaactggaatctgctctcttttttcaacatggcttgtcagttaacgggggtgagaggaggaggacgcttacacgcgcccgaaggggttcagaataaaacagattctggcctgccacatttttgtctgtgcaaaagataacccacatgtgtgggggttcaaggcctgggtttttgggtgcctcacgctaaaaatacaggtttcacactcttatctcgactatagtaagggctgcctgaagccaggaataaaaaactccagttcctagatgttggaaaatcagagtatgaactctttcgttttgtttttgttaggggagggtgtgtctacaacctgtctagaggagactgtctagtctcctctgcactcaatcagaaggtctgaattgagggggattatggtattatcagtaaggcaaaagatgaaagaaacttttttttaacctgcntactcctaggcctaggggcaaatggtcaacatatgtacccttacccctcaaacctaattccccagcagaaagtttgcccaagaagtctcaaggaagcatatccaggcccacatgccctgaaaatagtccttctgtgtttcctgactcatttttggtggtccttacagcagcaaaaagcagagtgcatttgcttggtcttttaacaagaagaaggaaacaaatgatggccccactacagtgaacacagccttcaccgagcgctgtcccagtcattcaaaatgagacagggaggggtcagattggacctacctcctgcccttgcttgcacattgcgtggtactgggtttggcctaaagtccagtgtgaggaaaacagcttgaatcttagcaggtatagcatgttatcctgcaaaggacctccccagaaggggctgtaccaatgcctacataccaataatggggaaaaatgagtctattcttttttctccaactctgtcagcacctttcccatttgggaaaggcagcccagtttagtgagttctaggcttctgacagagtgtaggagaattggaaattttagtcctatcctgtttagcgacgttcacaaaacttcaagtataaataagaccatatacaatattaaaag

SEQ ID NO: 152286 - DNA, 1161 bp, Homo sapiens; identical to SEQ ID NO: 133118

SEQ ID NO: 152287 - DNA, 431 bp, Homo sapiens; identical to SEQ ID NO: 133119

SEQ ID NO: 152288 - DNA, 523 bp, Homo sapiens
attttgaaatctttgtgacccttttcctttgaaattgagcatcccttccagtacctgccaaagacagactagaccgtccctggacgataagctcctcaaaggcaggtgctgcttttgatctttttgtacctacttcagtgtgtaacaaacagtggccacagaacaaacacttgcatgctaagggaatggattctctaaaattgataactacttttgctttggtggtttcctttagggcccactgatgatggtgaagaagagatggaagaaagacacagtcacaaacgggtcctgagcagtgaggcagatgtataataataggccctcttggaacaagtcttgcttttcgaacatggtataatagccttgtttgtgttagcaaagtggaatctatcagcattgttgaaatgcttaagactgctgctgataattttgtaatataagttttgaaatctaaatgtcaattttctccgaattataaaaatgacctcccctcccaaagctccacaaaaaaaaacgagag

SEQ ID NO: 152289 - DNA, 1158 bp, Homo sapiens
  misc_feature (1)...(1158): n = a,t,c or g
atagattagcgattgcatcnggcccggaacccttggtcgacccacgcgtccggctggcgggaggccacgggctttccacagcgcgggggaacggcaggctgcacgatgggcaagctgacggcagaggctgatcgagcaggcggcgcagtacaccaacgcggtgcgcgaccgggagctggacctccgggggtataaaattcccgtcattgaaaatctaggtgctacgttagaccagtttgatgctattgatttttctgacaatgagatcaggaaactggatggttttcctttgttgagaagactgaaaacattgttagtggacaccaccagaataatgcggtataggtgagggacttgatcaggcttctgccctgtctgacagaacttattctcaccaataatagtctcgtggaactgggtgatctggaccctctggcatctctcaaatcggttgcttaccctaacatacctaagaaatccggtaacccataagaagcattacagattgtatgcgatttataaagctccgcacgtcagagtactggatttccagaatgtgaaactaaaaagagcgtcaggaagcagagcacaatcttcaaggccaaacggcgtgcacagcttgcaaaggatattgcccaggagaagccaaaactttttaattcccaggtgctggtttgcccaactgaccaaaaaggaaaggtgggcccatcttccaggggatgtagaagcaatccaagaatgcccatagcaaaatgctttcaactctgggctgaaagtggagcggctgaaaggggtttgctgcaagtcttgctccagatcccctggcagagaacgcagatccggggcccactgcatgatggtgaagaagagatgggaagaagacacaagtcaccaaacggggtcctgagcagtgaggccagatgtataataatagccccctcttggaacaagtcttgcttttcggaacatggtataatagccttgtttgtgttagccaagtggaattctatcagtcattgttgaaatgcttaagactgctgctgataattttgtaatataagttttgaaatctaaatgtcaattttctacaaattataaaaataaactccgactcactatgcaaaaaaaaaaaaaaaaaaaaaaaaaaaagtcgtatcg

SEQ ID NO: 152290 - DNA, 465 bp, Homo sapiens
taagatggcggcggcgtgagttgcatgttgtgtgaggatcccggggccgccgcgtcgctcgggccccgccatggccgtcaccatcacgctcaaaacgctgcagcagcagaccttcaagatccgcatggagcctgacgagacggtgaaggtgctaaaggagaagatagaagctgagaagggtcgtgatgccttccagaacatgcggcaggtgattcagcagaaccctgcgctgctgcccgccctgctccagcagctgggccaggagaaccctcagcttttacagcaaatcagccggcaccaggagcagttcatccagatgctgaacgagccccctggggagctggcggacatctcagatgtggagggggaggtgggcgccataggaaaggaggccccgcagatgaactacatccaggtgacgccgcaggagaaagaagctatatagaggttgaaggccctcggctt

SEQ ID NO: 152291 - DNA, 448 bp, Homo sapiens
ggtaagtacctgccgaggttgcatgttgtgtgaggatcccggggccgccgcgtcgctcgggccccgccatggccgtcaccatcacgctcaaaacgctgcagcagcagaccttcaagatccgcatggagcctgacgagacggtgaaggtgctaaaggagaagatagaagctgagaagggtcgtgatgccttccccgtggctggacagaaactcatctatgccggcaagatcttgagtgacgatgtccctatcagggactatcgcatcgatgagaagaactttgtggtcgtcatggtgaccaagaccaaagccggccagggtacctcagcacccccagaggcctcacccacagctgccccagagtcctccccagcccagcctgctcagagaagctggcaggacttggaagcgacagatgggcccctcttgggctctgtccagctctctga

SEQ ID NO: 152292 - DNA, 2242 bp, Homo sapiens
  misc_feature (1)...(2242): n = a,t,c or g
tttttttttggaagaggcaaaatgaggtttttacagaagaaatacaaatgtctgtaaccagtacaggtacataaaaactttgttaaaaattcatttgagcgtgagagtggggacaccagagtcactttgcagccccgtgacgtcaccgataacgggcatggcgtcactcaggagaccacgtgtgcgggccgagcaagaagccccgcccacagcgcggagtttagtctgcgcgtacctcgctcgagaacgcgctcgtgcgcatgcccacaaaggccaaggagggagtgcgcaggtcacgtgcgccggtggtcagcgcgcgcattgcctgcccccggaagtggtcggcgcgcggcgcggcgcgcctgggcgctaagatggcgggcggcgtgagttgcaatgtgtgttgagatcccggggcccgcggcgtcgctcgggccccgccattggccggtcaccatcacgctcaaaacgctgcagcagcagaccttcaagatccgcatggagcctgacgagacggtgaaggtgctaaaggagaagatagaagctgagaagggtcgtgatgccttccccagtggctggacagaaactcatctatgccggcaagatcttgagtgacgatgtccctattcagggacttattcgcattcgatggaggaaggaactttgtggttcgttcatgggtgaccaaggaccaaagccggccagggttaccttcaggcacccccaggagggccttcaccccacagcttgccccagagtcctcttacatccttcccgccttgcccccaccttcaggcatgttccatccccccacttgccggccagagaaggnacaagagcccatcagaggaattccggccccaagacgttcccagagtctgtgttcaggctctgttccctcttcaggttaggcagcgggcgagaggaagacgcgggcttccacgcttagtgaacggggcttttgagtattgaggacgatggttgacggagatcatgtccatggggctatgagcgagagcgggtcgtggccgccctgagagccagctacaacaacccccaaccgagcccgtggagtatctgctcacgggaattcctgggagccccgagccggaacacggttctgtccaggagagccaggtatcggagcagccggccacggaagcagcaggagagaaccccctgggagttccttgcgggaccagcccccagttccaagaacatgcgggcaggtgattcaagaagaacccctgcgctgctgccccgccctgctcccagccagctgggcccaggagaacccctcagcttttaacagcaaaatcagcccggccacccaggagccagttcatcccagatgcttgaacgaagcccccctggggaagcttgggcggacattttcagatgtggagggggaggtgggcgcccataggagaggaggccccccaagatgaactacatccacggtgacgcccgcaggagaaaagaagctatagagaggtgaaaggccctgggcttcccagagagccctggtcatccagccttatttcagcgtgtgaaaaaaatgaagactttggctgccaacttctccttgagtcagaactttgatgacgagtgatgccaggaagccaggccaccgaagcccccacccctaccctttattcccatgaaagttttataaaagaaaaaatatatatatattcatgtttatttaagaaatggaaaaaaaaaaatcaaaaatctttaaaaaaacaaggcaaacagttccagctttcctgttccttccttaaagtgggcccctgttccccatctcccgggccaagacagttgtccccccgtcctcctccccagccccagcctgcttcagagaaagctgggcagggactggggagggcgacagatggggcccctcttgggcctctgtcccaagctctctgcagccagacggaaaggcggctgcttgcctctccatcctccgaaaaacccctgaggaccccccccccatcttttttaaggaaaaagggaaagctgaagccccaactttgatcctccattgggagtggcccaaatctttccaatctagggcaagtcctggaaaggcccaagtccccctccccagtctggccttggcctccagcctggagaagggctaacatcagctcattgtcaaggccacccccaccccagaacagaaccgtgtctctgataaaggttttgaagtgaataaagttttaaaaactaaaaaaaa

SEQ ID NO: 152293 - DNA, 352 bp, Homo sapiens
cccttcaacttttgtagagcattccatttagttgcaaggaaaaattaaataaaaaaaataaaattggagctgcctttactgatgatgctttgccatgggtgtggcttacattctaaagcttttggatcagtatcgggagtttgattcacttcactggttccagtctgttagagagaaatacctgaaggagataagagcagttgctaagcaacagaatgtacagtcagccagtcaagatgaaaaactcttacaaaccatgaatctcactcagaagcgactggatgtctatctacagtgcaagaattttcttcagagcagacaagactgcggctgaagaaaaccaagaaaaaaa

SEQ ID NO: 152294 - DNA, 1356 bp, Homo sapiens
atgctccaatactggaaactttttgagtgccatcgtaatgcccaatggaaatgctcattggagcattttggatttcagattagggatgctgaactgggcttcttgtatgcatatagtattagtaccattattaaaaccacaatgaatctctacatgtccatgcaaaagccaatgaccaaaacctcagttaaggcattgtgcaggcttgttgaacttctcaagaaaagagtgatttctgacaaaaaatacagcgaacagcgtcttgatgtgctctctgctctagttttggctgaaaacactctaaatggaccaagcacaaagcaacggcgacttattgtttctttggcactaagtgttggcacacaaatgaaaacatttaaagatgaagaactctttccacttcaagtagtcatgaaaaaactggatcttattagtgaacttagagaacgagtccaaacacaatgtgactgttgttttttatactggcatcgagctgtcttcccaatttatttagatgatgtatatgaaaatgctgttgatgcagccagattacattacatgttcagtgctttgcgcgactgtgtacctgctatgatgcatgcaaggcatttagagtcctatgagatacttctggattgctatgacaaggaaattatggagattttaaatgagagcggtctgattcaacttgatcgcgactgcctaaaaatccacaggaagacacactcagtcccaggaggtggacgcttaccttccaggttgagaaaagggctgagatgccggtggctgataattacctcagggttgtcggtcaggtcaaatcttaatagaatgcagtgtgagaagagcggctctgatgacgggcagggccactcctctccccaggcagttgtccaggtcctggatcaaacctccagccacggctcccctgggctgacacatgagattcccgccttgggtgaagaaataaagcctctcccaggtggtggtgaccagccctgttttgctgtgagttgtgttttaaaaagcccattagtaccagaaagcaccagcggccacctccaagtcttgctacctcgttatgggtactggtggcattttagaaataatgtgtttctttatatcgttaaagcaaaactgcccattcaagtggaaagagcagcagaagggtacaatttagctggaatgatctgggagatcatgggctctgcttccaagggagacaccagtcccagggccgactccccgcaccacagccacatgctgactactaaaccaggagatgcaactagaatgagtccgacaccattaaggactgaacacctggagaatcatttctctgacacctggagctga

SEQ ID NO: 152295 - DNA, 260 bp, Homo sapiens
tacatgttcagtgctttgcgcgactgtgtacctgctatgatgcatgcaaggcatttagagtcctatgagatacttctggattgctatgacaaggaaattatggagattttaaatgagagcggtctgattcaacttgatcgcgactgcctaaaaatccacaggaagacacactcagtcccaggaggtggacgcttaccttccaggttgagaaaagggctgagatgccggtggctgataattacctcagggttgtcggtcag

SEQ ID NO: 152296 - DNA, 403 bp, Homo sapiens
atttgttcctgatcttgaagatattgtaaattttgaagaactagtaaaagaagaaggtcttgcagaagaaacattaaaagcagcaagctggctgcgttcggacagccaacctggtgcgacccggcggagcgcgtgggcttcctggagcctgtgggccctgaccctggtgccaagagcgcacccagtcccagggaccgcgcctctccgctgcctggactttccgccaattccagccaaggtccagacaaaaacagcatatccactcagttccacatttccatataaaggccaaggcatttattctcaggataattgtttcagcatcgcaaccgcatcagactccggcatcgcaaactgcacccggtgccgggcagccacatccagcgcaaaaaccttcgtgtag

SEQ ID NO: 152297 - DNA, 2697 bp, Homo sapiens; identical to SEQ ID NO: 149153

SEQ ID NO: 152298 - DNA, 5970 bp, Homo sapiens
atggcggccgccttcggccacggcggaggactcgctttcccaggggcccccgcggtcgcaggggcaacgagcccggccggccctcgcgagcggaggcggggccggggccggaagtcacgtgctgtgacagtagctggggtgaggccgtcgtcgccgcacgggctggttggggctgtgtctgtgggaggcgccggggtgatggcgaaaaagactctgtccccggactgggagtttgaccgcgttgacgacggctcgcagaaaattcatgccgaagtccaacttaagaattatgggaaatttcttgaggagtatacctctcaactgagaagaattgaggacgctctggatgactcaattggagatgtttgggatttcaatcttgatcctatagcattaaagcttttgccttatgaacagtcctctcttttggaactcataaagactgaaaacaaggtcttaaacaaagtcatcactgtttatgctgcactttgttgtgaaatcaagaaattaacaatttgaggctggaactaaattttacaacgggctttttgttttatggagaaggagctacagatgccagcatggtggaaggtgattgccaaattcaaatggggagatttatttcattcttacaggaactgtcttgctttgttacgaggtgctatgaagtggtgatgaacgtagtccaccagttggctgccctctatatcagtaacaagattgcacccaaaattatagagacaactggagttcattttcagactatgtatgagcacttgggagaactgctaacagttttgctcaccctggatgaaattattgataatcatatcacactgaaagaccactggactatgtacaaaaggttactgaaatctgtccatcacaatccttcaaaatttggaattcaggaagaaaaattaaagccatttgaaaagttcttgctgaagctagaagggcaattactggatggaatgatattccaggcctgtatagaacaacaatttgattctctcaatggaggagtatctgtgtcaaaaaatagtacttttgctgaggaatttgcacatagtattcggtcaatttttgcaaatgtagaagccaaacttggagaaccttctgaaattgaccagagagacaagtatgttggaatttgtggactctttgtattgcactttcagatttttcgaactattgataaaaagttttataagtctttattggacatttgtaagaaggtaccagccatcactctaactgctaatattatttggtttcctgataattttctgatccagaaaataccagccaggtgtcacactgctagacagaaaaagtcttcaagccattaaaatacacagggatacttttctacaacagaaagctcaatcacttaccaaagatgtacagtcttactacgtctttgtgagctcatggatgatgaaaatggaatctattttgtctaaagagcagagaatggataaattttgctgaagatctcaccaatagatgtaatgtttttatacagggctttttgcatgcatatagtattaggaccattattaaaaccacaatgaatctctacatgtccatgcgaaagccaatgaccaaaaccctagctaaggcattgtgcaggcttgttgaacttttcaaggcaatagagcatttgttctacaggagaagcatggttgtggctgattcagtttcacatataacacagcaccttcaacatcaggctcttcattctatttctgtggccaagaaaagagtgatttctgacaaaaaatacagcgaacagcgtcttgatgtgctctctgctctagttttggctgaaaacactctaaatggaccaagcacaaagcaacggcgaccttattgtttctttggcactaagtgttggcacacaaatgaaaacatttaaagatgaagaactctttccacttcaagtagtcatgaaaaaactggatcttattagtgaacttagagaacgagtccaaacacaatgtgactgttgtttttttatactggcatcgagctgtcttcccaatttatttagatgatgtatatgaaaatgctgttgatgcagccagattacattacatgttcagtgctttgcgcgactgtgtacctgctatgatgcatgcaaggcatttagagtcctatgagatacttctggattgctatgacaaggaaattatggaaattttaaatgagcatttgctggacaaattatgcaaagaaatagagaaagatctgcgactttctgtgcatactcatttaaagctgggatgaccgaaaccctttcatagttggcatgaaagacctggctcttttttttctctctgaatccaattcggtttttccaatccgtttccattgacattcgggcttacgtaactcactaccctagacaagactttctacaatctaacaactgtagcccttcatgactggggccacttatagtgagatgagaaacttagctactcagcgttatggactggttatgacagaggcacatcttcccagtcagactttggaacagggccttgatgttttagaaattatgagaaacattcatatatttgtgtcccgatacctctataatctcaacaatcagatttttattgaacgaacaagcaataacaagcatttgaatactattaatattcggcatattgctaattcaattcgaacacatggcacgggaattatgaatacaactgttaatttcacctaccaggtttttgaaaaggaagttctatatatttagccaatttatgtatgatgaccacatcaaatccagattgattaaagatattcgatttttcagggaaattaaggacccaaaatgatcataagtatcctttttgatagagcagaaaaaattcaatcgaggcatcagaaaacttggaataacacctgagggacagagctaccttgatcaattcaggcaactcatcagccagattggtaatgctatgggctatgtacgaatgataagatctggtggtcttcattgtagcagcaatgccatttagatttgttccctgatccttgaagataattgtaaatttttggaagaacttagtaaaagaagaaggtcttgcagaaggaaccattaaaagcagccaagggcatttgggatttcagtccctcagtgatcacacacgaaatgtctgccgaaggcacagaatatttccaaaatgcttgtagacgtttttgctccagaatttcgaaggccaaagaatatacatctccgaaatttctatataattgttccccctctgaccctcaactttgtagagcattccgattagttgcaaggaaaaattaaataaaaaaaataaaattggagctgcctttactgatgatggctttgccatgggtgtggcttacattctaaagcttttggatcagtatcgggagtttgattcacttccctggttccagtctgttagagagaaatccctgaaggagataagagcatgttgctaagcaacagaatgtacagtcagccagtcaagatgaaaaactcttacaaaccatgaatctcactcagaagcgactggatgtctatctacaggaatttgaattgctgtatttctcactgagcagtgcaagaattttcttcagagcagacaagactgcggctgaagaaaaccaagaaaagaaagagaaggaagaagaaactaaaacaagcaatggagacctgtctgacagcactgtgtctgctgatcctgttgtgaaatgatacggatggtattcactgcacatatgatgaaatcatcagaattgttaaaacttttgccagtggaatggataaactattgatgaattgtttcctgggtcacatctctggaaaatagatgttacagttcttaaaggcagtgctttaaagtgaagttcattctgtttccaaaggctctactttcaaaggttaagaatgagattttaaaattggatttttgcctggacttgagggtacaagatgtttctatttgaagtgaagttataaaagggcaaatccagattcataaactatcacctcggatttcttgtaatctacatgtttgtaatttgtatttgcatagatctttgatctatagttatttcaagtcatgggaaattcaatgcatatactatatacagccagtaaatacatgcttaacaaaaggaatgagcctgaagttcataaagaatacatatcaatattcttataaaaggaatatatgaagatggctttgatactagaggtgaggcacaagtgttttatgtactctcagtgtacagtataactgatgatccttctttcattgttaatttcatgtgactcacaagagctgctgatgtctttgatgagacattttataactagtttacattgctttgagaacatttaacctccaacagctgctttaaatttaagatttacttaatactcagaaaattcagataaagccatagagtcctgtttgaagcttcacttctattttggttgaaggcatgatgtatgatgtcagaaaaaaaattgaatgaattatttctacatccaaactcaggtttcttctacattagattgaattgaaattttggtgatggtttgggtagactttttttttatatcaagtataatttaaaacatcagattaaataattacactgttcaggcttttaaaaaaataccactgtgagaataaagcgctagtaagatacatcacttactgattttaaaaatacagaaagattttgagtaaattttgggcccaaccaagctgttaagtttattttttgtaaaggtatgtaagttattaaatggttaatcatggccttttaaaaataaaataaagtgatacctttacaatgaagacaaaagtttaaaactttctaatacaaacaccattttgggaaatgcttgatttttttctattgcatttgtctgctaaacatttctttggataaatcctgcaaatacttctaacattattctttgattccagcttttagaatgggtgtacaatgccctgtttgtacttaatggttagggtcagggtaacttgccagcccaagataaatactttaatcgttaaaagtcagaagagacagaatatgtaggaaatgttttttgtttattatgtaaacatggcttacagaattatgaacagtggatagattaaaggcatttaatatttgtaattcataataactgtagaaatggccctaaagcatgctgcataattaataatttatattttcattattataagtgtttatattaatgatcttgcatttgattatatcaaatctcggcattttctagcaacagcatttggtctctctgtgtttcttctctaaacttccctgaaatcatctcctattaagggatagaaattgttactagaagagaatcacatgttctgtgttcattatccctacacatgtaaattaattattttatcaatactagatagagttcacatgctgactccctgggatacctacagttgagaagaaaattggacagacaattatttttcctttagggtcaaaataatgtcactgctatctgggataaattataagttcatatatttgaaataagatcctgggaaacgaatttaaatgggtgtccaaactgcagggccaacaggggctttcagtatattccacatctaatagggttaatatgtacatttggatgatgatttttcttggataacattaacattaattttattttttcagacatactgtaatttaaaaattaatgtgagcgtttgttttaagttcacagaaaacttaataattcaaattctcaggaattaaggactcaccataacattgtcagttctaatgaaattttgtaaaagatggcaagtttgttacctcacttgagtggggttttccttttcccccaattctaagagaatataactgtgtatactaaaacattaataaaaaataattttg

SEQ ID NO: 152299 - DNA, 505 bp, Homo sapiens
  misc_feature (1)...(505): n = a,t,c or g
cgccaagtgtgcccnttccgctgtcaatgccatcttcgagtggtccagtgttctgatttgggtctggacaaagtgccaaaggatcttccccctgacacaactctgctagacctgcaaaacaacaaaataaccgaaatcaaagatggagactttaagaacctgaagaaccttcacgcattgattcttgtcaacaataaaattagcaaagttagtcctggagcatttacacctttggtgaangttggaacgactttatctgtccaagaatcagctgaaggaattgccagaaaaaatgcncaaaactcttcaggagctgcgtgcccatgagaatgagatcaccanagtgcgaaaagttactttcaatggactgaaccagatgattgtcataggtcttcctccttcccttacggaattacatcttggatggcaacaaaatcagcagagttgatggcagctaagcctgaaaggactggaataattttgggctaagttggggattgagttt

SEQ ID NO: 152300 - DNA, 681 bp, Homo sapiens
tcctacatccgcattgctgataccaatatcaccagcattcctcaaggtcttcctccttccctacggaattacatcttgatggcaacaaaatcagcagagttgatgcagctagcctgaaaggactgaataatttggctaagttgggattgagtttcaacagcatctctgctgttgacaatggctctctggccaacacgcctcatctgagggagcttcacttggacaacaacaagcttaccagagtacctggtgggctggcagagcataagtacatccaggttgtctaccttcataacaacaatatctctgtagttggatcaagtgacttctgcccacctggacacaacaccaaaaaggcttcttattcgggtgtgagtcttttaaaaaccctcagtactgggagatacagccatccaccttcagatgtgtctacgtgcgctctgccattcaactcggaaactataagaaaaaataaaaagagtatgagtcttctgtaattcattgagcagttagctcatttgagataaagtaaatgcaaacactagctctgtattaatccccatcattactggtaaagcctcatttgaatgtgtgaattcaatacaggctatgtaaaatttttactaatgtcattattttgaaaaaataaatttaaaaatacattcaaaattaaaaaaaaaa

SEQ ID NO: 152301 - DNA, 639 bp, Homo sapiens
atgaaggccactatcatcctccttctgcttgcacaagtttcctgggctggaccgtttcaacagagaggcttatttgactttatgctagaagatgaggcttctgggataggcccagaagttcctgatgaccgcgacttcgagccctccctaggcccagtgtgccccttccgctgtcaatgccatcttcgagtggtccagtgttctgatttgggtcttcctccttcccttacggaattacatcttgatggcaacaaaatcagcagagttgatgcagctagcctgaaaggactgaataatttggctaagttgggattgagtttcaacagcatctctgctgttgacaatggctctctggccaacacgcctcatctgagggagcttcacttggacaacaacaagcttaccagagtacctggtgggctggcagagcataagtacatccaggttgtctaccttcataacaacaatatctctgtagttggatcaagtgacttctgcccacctggacacaacaccaaaaaggcttcttattcgggtgtgagtcttttcagcaacccggtccagtactgggagatacagccatccaccttcagatgtgtctacgtgcgctctgccattcaactcggaaactataagtaa

SEQ ID NO: 152302 - DNA, 2051 bp, Homo sapiens
cgcaaaacaaattgcaatataatgtgataaagttctttaaaagaggtaagagcaacgtgctttgggagcagagaagagggagaaagcagcatcttgcctggatgagccaggggacacagaagagaagcccactatctcatttaatctttacaactctcttgcaaggttccctggttgttaaaatacatgagataaatcatgaaggccactatcatcctccttctgcttgcacaagtttcctggggctggaccgtttcaacagagaggcttatttgactttatgctagaagatgaggcttctggggataggcccagaagttcctgatgaccgcgactttcgagccctccctagggcccagtgttgccccttccgctgttcaatgccatctttcgagtggttccagtgtttcttgattttgggtcttggacaaagtgaccaaagggattttttcccccctgaacacaactctgctagacctgcaaaacaacaaaataaccgaaatcaaagatggagactttaagaacctgaagaaccttcacgcattgattcttgtcaacaataaaattaggcaaagttagtcctgggagcatttacacctttggtgaaagttgggaacgactttatctgtccaaggaatcagcttgaagggaattgccagaaaaaatgcccaaaactcttcaggagctgcgtgcccttgaggattgaggttcaccaaagtgcgaaaagttactttcaatggactgaaccagatgattgtcatagaactgggcaccaatccgctgaagagctcaggaattgaaaatggggctttccagggaatgaagaagctctcctacatccgcattgctgataccaatatcaccagcattcctcaaggtcttcctccttcccttacggaattacatcttgatggcaacaaaatcagcagagttgatgcagctagcctgaaaggactgaataatttggctaagttgggattgagtttcaacagcatctctgctgttgacaatggctctctggccaacacgcctcatctgagggagcttcacttggacaacaacaagcttaccagagttgtctaccttcataacaacaatatttctgtaagttggatcaagtgacttctgcccaccttggacacacaccaaaaagggcttcttattcgggtgtgagtcttttcagcaacccggtcccaagtactgggagaatacagcatcccacctttcagatgtgtctacgtgcgctctgccattcaactcggaaactataagtaattctcagggaaagccctcatttttataacctgggcaaaatcttgttaatgtcattgctaaaaaaataaataaaagctaggatactggaacccctaactgcaaatgtggatgttttacccaccatgaccttattatgcataaagcccaaatttccaggtttaagtaaattgcctaccaataaaaagaaattttgcctgcccattttcagaatcatccttttgaagcttttctgttgatgttaactgagctacctggagatattcgtaatttcacgtaaatgtaaaaatttggagtaaatatatatgtcaatatttagtaaagcttttcttttttaatttccaggaaaaaataaaaagagtatgagtcttctgtaattcattgagcagttagctcgatttgagataaagtcaaatgccaaacactagctctgtattaatccccatcattactggtaaagcctcatttgaatgtgtgaattcaatacaggctatgtaaaatttttactaatgtcattattttgaaaaaataaatttaaaaatacattcaaaattactattgtatacaagcttaattgttaatattccctaaacacaattttatgaagggagaagacattggtttgttgacaataacagtacatcttttcaagttctcagctatttcttctacctctccctatcttacatttgagtatggtaacttatgtcatctatgttgaatgtaagcttataaagcacaaagcatacatttcctgactggtctagagaacctcgtgc

SEQ ID NO: 152303 - DNA, 1584 bp, Homo sapiens
aattcatgagggagtcagccggactgtgttcattgagggaaaccttattttttagctgtgctatggagtagaagcaagaggttttcaactctagtcacagagcagcacctaccccctcctcctttccacacctgcaaactcttttacttgggctgaatatttagtgtaattacatctcagctttgagggctcctgtggcaaattcccggattaaaaggttccctggttgtgaaaatacatgagataaatcatgaaggccactatcatcctccttctgcttgcacaagtttcctgggctggaccgtttcaacagagaggcttatttgactttatgctataagatgaggcttctgggataggcccagaagttcctgatgaccgcgacttcgagccctccctaggccccatgtgcccctttccgctgcaatgccatctttcgagtgggccaagggtctgatttgtgtctggaacaaatgccaaaaggatcttccccctgacacaaactctgctagaacctgcaaaacaacaaaattacccgaaatcaaagatggagactttaagaacctgaagaaccttcacgcattgattccttgtcaacaataaaattagcaaagttagtcctggagcatttacacctttggtgaaagttggaacgactttatctgtccaagaatcagctgaagggaattgccagaaaaaatgcccaaaactcttcaggaagctgggtgcccatgaggaatgggatcaccaaaagtggcggaaaagttaacttttcaatggacctgaacccgatgattgtccataggaactgggcacccatcccgctgaagagctcatggaattgaaaatggggctttccatgggaatgaacgaagctctcctacatcggcatttgctgataaccaatatcaccagcattcctcaaggtcttctccccttcccatacgaaattacatcttggatggcaaacaaaaatccagcagagttggatgcaagctagcctgaaaggactggaataatttgggctaagttgggaattgaattttccaacagcatctctgctggttgaacaaatgggctctctggcccaacacgccctcatcctgagggagcttcacttgggacaacaacaagccttacccagagtaccctggtggggctgggcagagcattaagtacatcccaggttgtcctaacctttcataaccaaccaatatctctgtaggttgggatcaagtgacttctggcccacctgggacacaacacccaaaaaggcttcttattcggggtgtgagtcttttcagcaacccggtccagtactgggagatacagccatccaccttcagatgtgtctacgtgcgctctgccattcaactcgggaaactataagtaattctcaagaaagccctcatttttataacctggcaaaatcttgttaatgtcattgctaaagaataaataaaagctagatactggaaacctaactgcaatggtggatgttttacccacatgacttattatgcataaagccaaatttccagtttaagtaattgcctacaataaaaagaaattttgcctgccatc

SEQ ID NO: 152304 - DNA, 2171 bp, Homo sapiens
cggacgcgtggggcctggctcctctggccaaagggtgctctgcttctggcagctgaagatcccagtagacagcttcttaaaccatggctttccctgcaggatttggatgggcggcagccactgcagcttatcaagtagaaggaggctgggatgcagatggaaaaggcccttgtgtctgggacacatttactcatcagggaggagagagagttttcaagaaccagactggcgatgtagcttgtggcagctacactctgtgggaggaagatttgaaatgtatcaaacagcttggattgactcattaccgcttctctctttcctggtcacgtctgttacctgatgggacgacaggtttcatcaaccagaaaggaattgattattacaacaagatcatcgatgatttgttaaaaaatggggttactcccattgtgaccctctaccactttgatttgcctcagactttagaagaccaaggaggttggttgtcagaggcaatcattgaatcctttgacaaatatgcttcagttttgcttcagtacctttggggatcgtgtcaagcagtggatcaccataaatgaagctaatgttctttctgtgatgtcatatgacttaggtatgtttcctcatgccagatctcactttgggactggaggttatcaggcagctcataatttgattaaggctcatgccagatcctggcacagctatgattccttatttcgaaaaaggcagaaaggtatggtgtctctatcactttttcccgctcggttggaaccagcagatcccaactcagtgtctgaccaggaagctgctaaaagagccatcactttccatctggatttatttgctaaacccatattcatcgatggtgattatcctgaagttgtcaagtctcagattgcctccatgagtcaaaagcaaggctatccatcatcgaggcttccagaattcactgaagaagagaagaaaatgatcaaaggcactgctgatttttttgctgtgcaatattatacaactcgcttaatcaagtaccaggagaacaagaaaggagaactaggtactctccaggatgcggaaattgaattttttccagatccatcttggaaaaatgtggattggatctacgtggtaccatggggagtatgtaaactactgaaatatattaaggatacatataataaccctgtaatttacatcactgaggatgggtttccccaggagtgacccagcgccttttggatggacacttcaacgctggggagtattttcagacaaacatttcaggaactgttcaaagctatccaacttgataaagtcaatcttcaagtatattgtgcatggtctcttctggataactttgagtggaaccagggatacagcagccggtttggtctcttccacgttgattttgaagacccagctagaccccgagtcccttacacatcggccaagtaatatgccaagatcatccgaaacaatgggccttgaaggcacatctgtagggcaagatggctgagaaatacaggagaggcgtctgcttttggaaaggaaatctgctttggtgatgatctttcaggcaatctcaacttacttctttaatcaacatttaatatcaatggatctgtgattaaaaggtctgaatatgtaatgcctcgtgaagtatttaataatggcctttatttgtatttggatcaatgaggtttttaaagaaaaatggaagagaaaaccactaaccttgatttttgtattgcaaaatcagatagcccctggaaacataaatttaaatcctttagacatttttctagaaaaaaatgcaaagtttataaagatgatacaaccatgatttgcaactgtaacaggagaccatttattataagcgtacctgtttgtgaacttaattattctgattccataagctgtttttgcttaggtgatccactgccatgtgatccataatttttctacataaaaaatcaaagttaaaagtcacattatacagttatgcattcatttcaacaaaatagtgaattgataatctacttgttaatatattcgcgcccatattttgtgtgtttggacaagtacatctcccttttgcttaatgaacttccgaacaataataaaataatagaataaaaaagaaatttgaatggcaaaaaaaaaaaaaaaaa

SEQ ID NO: 152305 - DNA, 1842 bp, Homo sapiens
  misc_feature (1)...(1842): n = a,t,c or g
cccccagtggcaaatccgcgccacctcgcaaacccccaactcaggcacttgggccccttttgggccccctctcgctcctccctttaggcacctccctgggcccgcccacggtctccccccagtttgggactgcgtcataagtatcccagacctcggcttgcagtagtgttagactgaagataaagtaagtgctgtttgggctaacaggatctcctcttgcagtctgcagcccaggacgctgattccagcagcgcctctaccgcgcagcccgaagattcactatggtgaaaatcgccttcaatacccctaccgccgtgcaaaaggaggaggcgcggcaagacgtgggaggccctcctgagccgcacggtcagaactcagatactgaccgggcaaggagctccgagtttgccacccagggaaaaaggagggctcctctggggagatgttatggtttactctttttagggcctttcaattcatcttgggaaggactttatttgtttggtggagcctgcatttacaagttactttcatgcccaagaggcaccattttaccgtgggagagatgtgcttttttgattctgaggatcctgcaaatttccccttcggtggaggagagccctaactttcctgcctggtgacttgagggaggctgacattcgtgaggatgacaacattgcaatcattgatgtgcctgtccccagtttctctggatagtgaccctgcagccaattatttcatgacttttgaaaagggaatgactgcttaacctggaacttgttgctgggggaactgctaatctgatgccccttcaatacttctatttgttatggcctccaaaaaaaatctgggtagagctctttgggcaaactgggcgagtgggcagatatcctgcctccaaacttatgtggttcggagaagacctagttgctgttggnaggaaaattcgtgatgttagtaaccttggcatctttatttaccaactttgcaattaacagaaagtccttccgccttcgtcgcagagacctcttgctgggtttcaacaaacgtgccattgataaatgctggaagattagacacttccccaacggaatttattgttgagaccaagatctgtcaagagtaagaggcagcgagatagagtgtccttggtaatagagaagtcagagatttacaatatgactttaacattaaggtttatgggatactcaagatatttactcatgcatttactctattgcttatgctttaaaaaaaggaaaaaaaaaaaactactaaccactgcaagctcttgtcaaattttagtttaattggcattgcttgttttttgaaactgaaattacatgagtttcattttttctttgaatttatagggtttagatttctgaaagcagcatgaatatatcacctaacatcctgacaataaattccatccgttgtttttttttgtttgtttgttttttcttttcctttaagtaagctctttattcatcttatggtgcagcaattttaaaatttgaaatattttaaattgtttttgaactttttgtgtaaaatatatcagatctcaacattgttgggtttcttttgttttttcattttgtacaactttcttgaatttaggaaattacatctttgcagttctgttaggtgctctgtaattaacctgacttatatgtgaacgaattttcatgagacagtcatttttaactaatgcagtgattctttctcactactatctgtattgtggaatgcacaaaattgtgtaggtgctgaatgctgtaaggagtttaggttgtatgaattctacaaccctataataaattttactctatacaacca

SEQ ID NO: 152306 - DNA, 2212 bp, Homo sapiens
tccaaccagggcaggagtaaacccttgtctaaacaaaaaaagccaagcactacccctggaaatccaactgaaggttagctcctcacttttggaaatccactcccaaaattgtaacccaattcccaacatagtaaactgttaaaagaaatgcccacttccatccttaaagccttaaaattcatttattgtagtgagcaagtttgtaatgaataccagcgaggtggtgctcaagcccacagttgtctaagacactgggtttcacaggaagttaatctcaatctcagtatatgcaagtaaactgactcattcctgcttccagtcgggaacaatttttcagttaaatcttgcttccttgcatgtcaagaattctctactgggtaaatcttacaggtgtcaactttcattatcagggcatctattggccatctattaaaggccttacctgtttttttctgtcatccaggcaaatcttaggactatttacttgtggtaaacattaggataggcaaaggaaactaaggacaaaaatctctagttcaatttagaacttgaataccctcaagagcactgggctgatgggaaggcattttatctaattcagactcagatgaagggaaaacgataacacttcattacagacttgtctatggccaattcaagtacctttgaatcttgagcaatacacattgccagtcactttaagagggcctaatctctttgggctgctttaactcctgcttagcatgtccttaagaacacatgtccctggccaggcatggtggctcatgcctgtaattcccagcactttagaaggccgagccgatccactcaaggtacaggagtttgagaccagccctgaccaacatgggaaaaccctccatctctattaaaaaccaccaaattagcacatgcctgtaatccccagctacttgggaggctgaagtaggagaattgcttgaacccatgaggaggagattgcagtgagattttgccattgcattctagcctgggcaacaagaactccatcttaaaaaaaaattttaaaaaccatcacacaaacagaaagcatgtccctttaaattttaccctatcccttcaaacttaagcaaaaattttcccttttataacccaaaaaaaaacctttagacacttttacatatgggaggtcaggcacaagtggctcatgcctgtaatcccagcaggaagatcgctgaaaagcatttttcaaatgcacaaatgcttaaagattcaggagtaagtgggctattacacctgttaagcctattaccatgtagtttcattcctagtgaccaagtagacaaactgctaattatcaaagcataaaaggtattagactctgcaggagaaaagcaatgtagattagtctaattttatagctacttcaaattgccatctttttctattagaaccttgttcctattctgaatagcactcaatagaacttgtgaaaccatccaaactggcataaagcttactccactgacttcaaaatggacccttccactcatagggtggtaccctagccactacacttatttcttatgtcatggcaaatagtcaactttcactgccaagtcattttaccccacgtttcaacatgcacatcccagtaatttggaaacattttgtttccaaagattcacttaacattggtttagcaacatgaagctttctatgcaacacaaggactcaagtttttggcctgttttagtgacaggcaatcagcaacatgctgcctttctccccagtgttgtaatcaaagcaaccctcccatagctttaaatgatattccttccccttccaattatgtggggggaaaacaaccctattctccacccagaagtgttaactcaagatttacattttcaagaagtttccagattcgtaaacccagaattagatgtctttcacctaaatgtctcggtgttgaccaaaggaacacacaggtttctcatttaacttttttaatgggtctcaaaattctgtgacaaatttttggtcaagttgtttccattaaaaagtactgattttaaaagctaataacttaaaactgccccccgcaaaaaagaaatccaaagtgtggtcacacaacaacatatctcctccctatctgaaggttttacgatgcattgttatcattaaccagtcttttactactaaacttaaatggccaattgaaacaaacagttct

SEQ ID NO: 152307 - DNA, 599 bp, Homo sapiens
tttcgtgattaggtcagcattcaagccccaagtccagcctatgacaaagctcaaagctccagcccatctctgctgccctctgccctcaagagactctcgccagtggctgggcccttcctagtaacttcacccaaccactcaccccctgcccttcccttcctgattgattaaaatccggcctaatctcccaggtgtaacccaagccctcttccacaagctttccagggctccggagattgccccctcccctgtacggctgcagggcttatgtgtgcctggcgctcagcacgggaaccttgccttctgcctcacccatgtctccccagggtttggcacaggcgagatccctgagccagcctacttcacaaggatgaacagaagctctccctatcctttgcaagtagaagccccctccctggccccctcaagaaatctccccctctcagtggattcaccaaagccctgcggatcctgcactgtgaaggagaagccctccccaggggcatccggacagctgcagccaggccctgcgtgacattgctgagccgcagccccacagcctgtgccagctgcccatgcccggctcatagaccctgagc

SEQ ID NO: 152308 - DNA, 520 bp, Homo sapiens
  misc_feature (1)...(520): n = a,t,c or g
ctctgtgttcagtactgctttacccatcaaactcactccaagaataatgtttcctcttcagaatgggttcttggcttcccttccctatttgtttgcctggatctgtggtaacctagcaggtcagttatcagacttcttcctgaccaggaatattctcagcgtaattgctgtccggaaactcttcacagcagcaggtaagcaacagccagaacatttaagcacttgggagatacttctcccctatctttaggatgcacctgactatgttgtctgaatcactccccaggatttctccttcctgcaatctttggtgtctgcctgccttacctgagttccaccttctacagcattgtcatttttcctaatacttgctggtgcaacaggcagcttttgcttgggtgggagttgttttaataaaatgngcttggatattgctcccagatattttgggatttatttaaaggcatggtttcaactttnaactgggaattgataagggggggcttaattgggntcccca

SEQ ID NO: 152309 - DNA, 1906 bp, Homo sapiens
tcccgaatcagtgggtggaggcaaaacccttcagcaagaagagaagcaacttcagccgtgtatgcaaatggataaccggttgcctcccaaaaaagttccaggtttctgttcctttcgctatggattgtctttccttgtgcactgttgtaatgttataataacagcacagcgtgcgtgcctgaacctcacaatggtagtcatggtgaatagccacagatccacatggtttgcccaacacctccacaaagaagcttcctggataatataaaagaaccctatgtataattggagcccagatatcccagggaatcatcttgagttcccacctcctatggtgtcatcatcatccaagttccctgttgggatacttctctggaatatattctacaaagaaaatgattggctttgcattatgcctcagctctgtgttaagcctgctcatcccaccagcagctggaattggagtagcttgggtcgttgtatgtcgagcagttcagggagcagcccaggggatagttgcaacagcccagtttgaaatatatgtcaaatgggctcctcccctggaacgaggccgacttacttctatgagtacatcagggtttttgctgggaccctttattgtcctacttgtgactggagttatctgtgaatctctgggctggcccatggtcttctatatttttggtgcttgtggctgtgccgtatgtcttctctggttcgttctgttttatgatgaccccaaagaccacccatgtataagcatcagtgaaaaggaatacatcacatcctccctggtccagcaggtcagttcaagtagacaatctctgcctatcaaggctatacttaagtcgcttccagtctgggctatttccattggtagttttacgtttttctggtcacataacatcatgacactatacactccaatgtttatcaactccatgcttcatgttaatataaaagagaatgggttcttgtcttcccttccctatttgtttgcctgggatctgtgggtaacctagcaggtcagttatcagacttcttcctgaccaggaatattctcagcgtaattgctgtccggaaactcttcacagcagcaggatttctccttcctgcaatctttggtgtctgcctgccttacctgagttccaccttctacagcattgtcattttcctaatacttgctggtgcaacaggcagcttttgcttgggtgggagtgtttataaatggcttgggatattgctccccagatattttgggatttattaaagcatgttcaactttaaactgggaattgatagggaggactaattgcttcccactttgactggattgatcctttaagcaggaatccggaatccgcctggttttaaaaccttcaatccctgatggccagcccattaatggtgactggcccctaattttcccacccttataggttgcctacagccagaaattccagggactggggctaaagaaaaacaacaccacacgtcccctgaagtgtgaaacaggagcacttgcagagccctgggacaaccctccttaattgaagggaagagggacccagcacatgaggctgaggctgaggggcagtcaccagcacccaggaagaaggtggtaggaggagtcctaggggccggttttaccctcccacatatcctgtgtgcatcgttttttaacatgtgttgttttgtaacatgtaatatatctgaattttaaatggggggtggtgatttatctcagtcttcctctctgcatcagttgctttataaatgattgtcaaaccaataaatacacacaagataaaattttattctaaggcttcatgaaaaaaaaaaaaaaaaaacttttgctttttaccctggaagaaatactcataagaatcccgagtcggcggccggg

SEQ ID NO: 152310 - DNA, 533 bp, Homo sapiens
atcatagcgctcctccatgcattttcaaaatatatcaaaaaatatctaactgtataattagcataagaaaattccttataaacctctgacatttctcacgaggctacctcgaggcattttcagaaatatcaaatatcaggttcgttcctccacacagtgtcactgtcgttgttgtttttggtgcctgcttcctctgcatcctgggcatctggccctgggcttgcctcccgggcccaggaggggaggggagtggaggctttggagaaggcagaggctcagaggctggacgcctgggttctgtggagctcacgcctgtccacccttcctctccaggcccccgaagcttaccctgtctttgagccagtgccacctgtccctgaggcagcccagggtgacacagaggactcggagggtgcccccccactcaagcgcatctgcccaaatgcccctgacccctgagaagccggcctgcctgtcctggttgccccaggggcccctttggctttttacaaataaagacccttttgtaaaaa

SEQ ID NO: 152311 - DNA, 879 bp, Homo sapiens
  misc_feature (1)...(879): n = a,t,c or g
gcccgtccgnanctcccggttcgacgatttcgtggcgcccgggcctggcgcggagcctgagcccgccggacgggaggcggccccgccgcgggctcggccccggccccagccccgccagcatggccggccggactgtacgggccgagacccggagccgggccaaggatgacatcaagaaggtgatggcgaccatcgagaaggtccggaaatggaagaagcgatgggtgactgtggccgccactccctttcggatcctcaattgggttgcaagtggtggatccccaggaggaggagcgaagcgcgaggcaggtggcggggcagagagatcccgtgggccgggaacgtcggggcaggggcgccagtccccgagggggtggcccctctcatcctgctggatcttaaatgatgagaacagcaaccagaatttccattcggaagggttccttgcaaaggggcacagaggcccagtcctgggggcacccccaaagcccaaccggccttgtgtcaccttgccggaccccccagaagggggtccctgagaagggctcagccccccacgggttgggccaagaagagagatcccccgggggcataactgtttggcagcacatacgaaccccccaatgctgaccaaggaggagcctgttccagaactgctggaagctgaggcccccgaagcttagccctgtctttgagacagtgccacctgtccatgagacagcccagggtgacacagaggactcggagggtgccccccccactcaagcgcatctgcccaaatgcccctgacccctgagaagccggcctgcctgtcctgttcgcccaggggcccctttgcgctttttacaaataaagacccttttgtaaaaaaaaaaaaaa

SEQ ID NO: 152312 - DNA, 1065 bp, Homo sapiens
tttttttttgcatgcttccctcctgatttattaagaccgacatatttaatttgcatttcttgagggaatagcacctggaaaccagggagaaagaagctgaagcatgcaggtcatgaattattcaatttggtgtcaataatttgtcagaaaaattaaaaaaaatcaatagataaccgtattgtagttcaactgattataatatagaagcaacggataatgaacaccctttcctcaaagtcatttattctcaacctttggaaatgattacgtttttacctccagtgaatcccttcatcacagagaataacagggtaccagcccaagccaacagtgccccataccagagaactcagggaaacaaagaccctaaaggttatgtacaatgagagaatcagactgtgaggctccagctctcttctgtatccctgctcactttacctcagtgcacaccatatcccttcttcctccattgtgaaatgtgcatacacgtgtttgtctgtgaatatataaatatctctatttacacatatatacatatataaaaatgtgcaatacaaagacataagcaaggagttttttcctaataactattttaatccagaggactgattggagaaaaaacaagttcttcccctcaaattttccttctaacttgagaaccaatttcctggaccaattcctgctcaaagaaaccattttaaggaagcacctgtcggcttgggagtgctagctcacacctgtaatcccagcaccttgggaggccgaggcgggtggtcaccttgaggtcaggagtttgaaaacagcctgaccaacatggtgaaccacttctcatagagacacattattaacttggtgaaacttaattgggatgaggagcactctgtatacatgtatcatttctgtttttcctcattgtgatggttaatcttatgtgtcaacttgactaggccacatgatgcccagatatttggtcatacagtattctgggtgtgtctgtgagggtgtttttggaagagactaacatttcagtcagtagactgaatacagcacatggccctccctaat

SEQ ID NO: 152313 - DNA, 1941 bp, Homo sapiens
ggaacaggttaagaaaactatgtagatgtaggaaagatgggaggaaataaagccctgttctggatcccccatcccctccagaataagagcatgttctgcatgtattaatcttttatgctgtttatgaaacaggcaagataagtctgtttttccttctggaaccataagggtaaccagattttcatctacagacaagtggtagtcatttgtgtttatcatgcaacttacttacaaacaccaagatattaattgctgcaacttgatgtcaaatcacattactgggtaatttttaagactatgtacccacaccatacatacatacatatatatatacacatacatacaaacctgtgtgccaagtgacagctatttttttatatacatggtaattcattaaaattgccttagtaatatattagaatatacaaatatgtgtgtataaaataaacatacacacacacacacacccctatgtagttttttaaaacactgggcaatgacccactccccttggaaatgcatgtatgaactaccctatgaaatgtaagctgcagaatagataaaacacaggtttccactaataaaagacatctgaacgtcctgaatataggaggaccagaaggtttttggttggttggttggttggttggttttaaccatggtttaacccaacagaagttatttacagaaattcatatatccccaggcaacacaaaactcctttattcaaaatcactgctatctttgggactaaacacaggctactttctgtttactcctaacaaaataaagcaagcaaatttgagtcaaatattggtgcactttaatactatcacatctttgaaaactcaatttgagttttaccaattaatgtgtctcatgaagagaagacaccagttttaaaatgagccacaaacagtaaagtcctatcagtataaaatttgaaaaaaaaaaaaaagatgattgtatttctagattagcaagaaattagttaattctggctgatttctatttctagctaatttggtcattctttgccatagcttactctattcaaataaacatatattcttgcttgcatcctagattggaaattaaaatttttcaaagaacaaagcttcaatattggatactgaagagtatacatgaaagaaaattcctttttgaagctattaaacccatttttttcctatgtgaaagttgaggacaatttatataactcactttttgtcatgtaaaaaaggttactcaagttgtactacccacataactgaaaatattggccatttggccttatctgtgagatttgacactaagtttttgttagagatdtggaaattatactagtcctbtttaaggggtaaaaaattcaattcaatactgacaaacttttgctctgtagttttactgtacatttatttggtaaagaaaaagaaaacaaaagccatgacaaacccaaagttgtccaggcaaataaactcaaatctttgtcacgtctgatattataatccttctatgtaagttttttaattaaggttatttctatatgccgtgtgttgcttgttattaaatgcgacgtattcatggcacaaagctttcccaagctgaataaaaagcaaacattaacaaatttttaccgttgtaatgcagggaagaaacccaagcaagctctagtctgtgcttaagtgttagcattcttattttttgaaccttatttctcaaaacttatagtagcctcaagaagtctattgatattggtcatgtttatttcttgccatatttataacacagcaagagtatttacaggaatgaagtagctgacacatatttttagactctgtataattcagaacagttataaatatttagtttatggattgactctgtatcctgtcatcttttcgcctacctgatctttcttggaataaaataatatatcct

SEQ ID NO: 152314 - DNA, 395 bp, Homo sapiens
caccctgggaggaagccgactaggcgaattcacttactgaccggcctgggctgctctgagacatggaggaagccagtgaaggtggaggaaatgatcgtgtgcggaacctgcaaagtgaggtggagggagttaagaatattatgacccagaatgtggagcggatcctggcccggggggaaaacttggaacatctccgcaataagacagaggatctggaagccacaggacaaccctccataaatgtgtgccaagagggtctcctttcctgtcttcctctacagagaatgctgctcggtcctcctacccctcttcccgaggccctgctgccacgttgtatgccccagaaggcaggaatagagttggagcggtgccagcagcaggcgaacgaggtgacg

SEQ ID NO: 152315 - DNA, 356 bp, Homo sapiens
tttcgtctggcccggggggaaaacttggaacatctccgcaataagacagaggatctggaagccacatctgagcacttcaagacgacatcgcagaaggtggctcggaaattctggtggaagaacgcgaagatgattgtcctttttttatcatcatcctcttcattgtgctctttgccactggtgccttctcttaagtaacagggaacctctcccacctgcccttcttttcagggacaaccctccataaatgtgtgccaagagggtctcctttcctgtcttcctctacagagaatgctgctcggtcctcctacccctcttcccgaggccctgctgccacgttgtaggccccatgtatt

SEQ ID NO: 152316 - DNA, 382 bp, Homo sapiens
  misc_feature (1)...(382): n = a,t,c or g
aatattatgacccagaatgtggagcggatcctggcccggggggaaaacttggaacatctccgcaacaagacagaggatctggaagccacatctgagcacttcaagacgacatcgcagaaggtggctcgaaaattctggtggaagaacgtgaagatgattgtccttatctgctgccatgttgtatgccccagaaggtaccttggtcccccggaaggagagaaaaaagagagatggactgtggctgcatttcttgggtccttagagtgggctggagagacctagagggcccagcatgtggctgggaaactgttggtggccagtgggtaataaagacctttcagtatccctaaaannnnnnnnnnnnnnnnnnnnnnnnnnnnnn

SEQ ID NO: 152317 - DNA, 399 bp, Homo sapiens
atggaggaagccagtgaaggtggaggaaatgatcgtgtgcggaacctgcaaagtgaggtggagggagttaagaatattatgacccagaatgtggagcggatcctggcccggggggaaaacttggaacatctccgcaacaagacagaggatctggaagccacaggaaacttttacgatatttggagcactgatgttctggaaattaaggaggagggtgtcctcaagttccttgcagcaggaagccacttaggtagcaccaaccttgacttccaaatggaacagcacatctataaaaggaaaagtaatggcatcgacatcataaatctggagaagcttctattggcagcttgtgctattgaaaaccctgctgatgtcagcatcatcctccaggaatactag

SEQ ID NO: 152318 - DNA, 791 bp, Homo sapiens
agagaaactgattcatgagcgattccgcacgagaggaagccgactaggcgaattcacttacttgaccggcctgggctgctctgagacatggaggaagccagtgaaggtggaggaaatgatcgtgtgcggaacctgcaaagtgaggtggagggagttaagaatattatgacccagaatgtggagcggatcctggccccggggggaaaacttggaacatctccgcaacaagacaagaggatctggaaaagccaacatctggagcacttcaagaccgacatcgcaaaaaggtggctccgaaaaattctggtggaaagaacgtgaaagatgattgtcccttaatctgccgtgattgtttttaatcatcatccctccttcaattgtggctctttgcccactggtgccttctcttaaagtaaacagggaacctctccccacctgcccttctctttcaggggacaaccctccataaattgtggtgccaagagggtctcctttccttgtcttcgctctacagagaaatgctgctcggtcctcctacccctcttcccgagggccctgctggccacgttgtatggccccagaaggtaccttgggtcccccgggaaggaggaggaaaaaagaggagatgggattgtgggctggcatttttttggggtccttagagtgggctggagagacctagagggcccagcatgtggctgggataacctgttggtggccagtgggtaataaagacctttcagtatccccgaaaaaaaaaaaaaaaaaaaaaaaaaaaaaagtcgtatcga

SEQ ID NO: 152319 - DNA, 1655 bp, Homo sapiens
tctactctagcgtggtggaattcctcggcctcgcggcgacggcggcggtggcggcttggacgactcggagagccgagtgaagacatttccacctggacacctgaccatgtgcctgccctgagcagcgaggcccaccaggcatctctgttgtgggcagcagggccaggtcctggtctgtggaccctcggcagttggcaggctccctctgcagtggggtctgggcctcggccccaccatgtcgagcctcggcggtggctcccaggatgccggcggcagtagcagcagcagcaccaatggcagcggtggcagtggcagcagtggcccaaaggcaggagcagcagacaagagtgcagtggtggctgccgccgcaccagcctcagtggcagatgacacaccaccccccgagcgtcggaacaagagcggtatcatcagtgagcccctcaacaagagcctgcgccgctcccgcccgctctcccactactcttcttttggcagcagtggtggtagtggcggtggcagcatgatgggcggagagtctgcttgacaaggccactgcggctgcagccgtggcctccctgttggccaatgggcatgacctggcggcggccatggcggtggacaaaagcaaccctacctcaaagcacaaaagtggtgctgtggccagcctgctgagcaaggcagagcgggccacggagctggcagccgagggacagctgacgctgcagcagttttcgcagtccacagagatgctgaagcgcgtggtgcaggagcatctcccgctgatgagcgaggcgggttgctggcctgccttgacatggaggctgtggcaggtgccgaagccctcaatggccagtccgacttcccctacctggggcgctttccccattcaacccagggccttctttcattattgaccccggcaggtgttgtttcctgggccgagaagcgcgctgcacatgggcgggcctgggcttgagttaccccattgcaggggagagttgggcttttgccattcagttcccggcaagaagaagcggaaacgctgcggccatggttccgcgccctgccggcggcgcattcaactgcgaagcagtgcagcagttgtaggaatcgaaagactggccatcagatttgcaaattcagaaaatgtgaggaactcaaaaagaagccttccgctgctctggaggtaacggcgccttagagggagaaggtgatgctttccaccggaaccccccttccggtggttttcagttgacgggcggcgggaaccccaaagcttgccctctccgtggcaatgttcactgcttcgtgtggtcttccagcaaagggatttcgggcgaagacaaacggatgcacccgtctttagaaccaaaaatattcttacagatgcattctgttttataaacatgttgttgcgtctacattcacgtctagataacaaaacacaagtcttatagcgccgagtaccgttagtaggtattcgtgcatgcgggttacaggcctggaactgggccaatacgtgaacccttcgagggaatggaagccgcaaaccggccagaatgggcggggccaaaggtgtgcagacacgcgttttttttggcgcaaaagggttttccaaaaggcgggtttctagacccactttggaaaaaccccat

SEQ ID NO: 152320 - DNA, 8736 bp, Homo sapiens
atgcccggccaaattcttgtcaaagcagcccagttattccaacagaaagcaaagtcttttcaccgaatggtcctggaacagctgggtatttactgggaaaccaataaacctggacccttccatcccatcactcatgaaaatgaatttgaaatgaatcatagaggggaatgtaaaaccaaaaactataaaacttctagaagaaaatataggagaacttctttaacacctcgagggcagcaaagttttcttaggatacagaagattgggcaaagatacctgcaatacatttaccaagcaaaggcctccaacccagaatgcacaaagaattcttgcaaaccaaaagacaaacaacccgatagaaatatgggcaagaaaacactggaaagtgacaaggagggtctcagacctaaggcccccatccctgccccagacccagttgctggtaggacactgattgggaaggagcatgtccctatcctttggggtggtgtgctggcctcggggaccagctgctccctgtcccctgcgggctccccagtgcaccccacaaccctgagggaccaccagctggggccaccccagcccctctggagctgcctggagctccagccacaccagacccacaacaaattcgtgggacggggtggtgccaaggaaagggacaggaatctggccagagcctgcccaccgctaagccaagggcaatggcagcgccctggcctcaacactaccattaacattcctgcgggtgaaaacttgaaccttgtggagggaccccgggacccagggctggctctggaccctgccaggacccccacatcccaccagagggagtgggcgggtcccctgatgggccaggagcctggccagcccccaacactcactcagcttcttggagctggggaccccaccctgagtgcccacccccagcctgagcagctgactgcagaggaacagaccgctctgagtcacacagccagcccagtctgcccgctcagcccaaactcacagcggccaccacacctcgaagcaccagggtatctgccaggaggctccagcaggactcaaccagctgtgctacgtgtagcccccctgggatcccagtgtgccagccctgtgcccatagcctggatagaaaacgactctatttacacggaggcaggaaagctggccacgtctgctccagggacactcccagacagctctcacctgggaacgctgtttactgtttaccacctgacacccacactcagccaggcagggcagggctggctgagtcagcgccgtacccagaggcccagcctgctggagtgggacaggaaggagacgctggcacagagcggggccgtcatgccagacacagcactgacccccgcaagagcctttgctggggcccccaccccagctacgcccacctcacagcagccagagggaggtgccctgcacagctggccacagcgctggccacgcaagcccttcccagaccctcgctgcagtgcggccagtgtggtccgccaagccctggaacacatgacggagatctcctcctggtgcaccctccccaacgcggacagccatgggaacgcaccacaccctgccccaggccctctccagactctaagcacgtgccactggctctgcctggggcaccctcccagctcagatcctggacttgctcccccgccaggcactcagaaccgagccctcggctccagagcccctggcgggctacggggactccccttggctttgcgggatggctgtgtccactgggcctgtcctcccctggctaagaaatggtcccagaaccaaccacagctgctcaggtccaggaacttcgcctctgccctgcacggggctgcccacttccaagtcttttatacggagatgatgggggaggaccccctgaccagctgggtgcccgtttcaggcctgggtattgtccccaggtccacttcctctgcacccacacagctgggatcaggaaatgtggcagtggtggggcatgtcagggtgctgccatcgttccactcggatgggtttcttcaacccatgtcttcatcgggctctctggctcagcagtccgtgtgggctagcctgggatccgagcagcagcaggttcccatgctgccgcctgcaagccctggcactcctgctgccagagctgggccagttcaatttgagcagtgcctgctccaatcgccaacctggaagccttatcctcagctcgtgcctttcaggctgtgccatgaagcaggatggtctgcccagaagctggcccaagaagccagcagcggcctagcagccacctgggctgcccccacctcctcctgcaaccagggttgggcacctgatgtcaagggcaggggaaggttgggcagtcctgggcggccagcaccccggcgtgcatgtctcctgagcagctgcccatcgggcctctgctggcctgggggctccaagatgcaaggccggcgggagctggggggagagcctttgagtgacctccaggaggaagcagccagcgcttccctccgagtggcacctgagaggctgagtgatgacagtttggaatggagacggacctgccccgaccttctcctgtccgatgggaaagccagcatctccatgccccgtgagggcggttccacctgcactgcccgatgtcctgaccctggggaacacagcagcacttggggggagtttgaaggctttcgggaatcttcagccaagtctggacaattctcacagtcccttgaactcctcgagggacccacagaaccccagccaccgagaaccacttctgccccaaaagagtgcagttctcaccaaccatgccagggtggaccttgggtgacaggaacttctgccgtcccaccttctgagcccattctcagctatgagaacattttaaagtgtgcttttcaagaaataacagtccagcaggcagctgaagacgtttccaccatagaccatttcctagaaataagcagtgaagaaaaacctggcgttgaacgtgtacataaattgtgtaacgaatccagaaaactctggagagcccttcagagcatacacaccacgtctacttctcagcgcctctggagcgagtcccgttgccaggagaacttctttcttgttctcggaatagatgctgcgcagaagaacctttctggaggccagggccacatcatggaagattgtgacctcaaagagcctgaaggactcctcactgtcagcagcttctgtctccagcattgcaaagccctgatccagaccaagcctcaaggacaggcctttgtccctcacggttgtggacaggaggtcgcaccactggcctgcgagagcctctgggtccggcacaagggctctgctggggctgagatccgtgaaggcagatgcggagaggcgccgctggattgcgagcaggcccaggtgcggggccaggtcaggtccactgtgggcgtccagggccagacgggcccagccagcaccaagatgagtgccacgtcctggttcctggtgagcagcagcggcgcccgccaccggctccctcgggagctcatcttcgtggggcgtgaggagtgtgagctcatgctacagtgtccttgtgcccagtgcaagcctggcacagagctggtgcccagcgaacaggcgttaaatgacgcaggaacgtggacccaggcaggacttcctgctgtggctgtcactcctgtggtggcccaggctgtggtccaggagaccacagcctgggcaggccctgaccttctgtgccccgtgcatcgagccggtctgctgcgggtgcctgtggccgccaatggggaactcggagactgccactggggtggccaggagccatgtagctgtgggtgccagcttcggagaaggaatttgaacagggtggacctggagtcccgcagcgtggacaagcagcatgccgtcatcaactacgaccaggacagggacgagcactgggtgaaggacctgggcagcctcaatgggcatgcctgtctgatgaagcggctgtccctgaatggctgcacagcaagtggccgctcctctgcctgtgtggactgcgtcacccacatgggctttgagaggacgtttgtgaatgacatgcgcatcccggaccagaagtacgtcacgctgaagctcaacgatgtcatccgcttcggctacgatatcctgcccctgagcgtccctcctcctgggcttcttctcagtccccaggaccacagtcaccctgttactccagaagcagggctgtcactgctgggaaagaggcccctcctctgcctgcctcgatgggcccttgagctggcacacctgttgctgggcgtggacttcagcgctgggctcctggctcttctgctctgtgttcgccttaacacgtgtccacattccaacatgtatgtgctggagcgtgtgcagcaccgagtcccggaggaggcactcaagcatgaaaagtacaccagccagctgcaggtgagcgtgaagggtttggcgcccaagaggagcgaggcactgccggaacacacaccatactgcgaggcctcgaaccccaggccggagaagggggaccggagaccaggaacagaggcagcctcttaccgcacacccctgtatgggcagccctcctggtggggtgaggacgatggtagcacgctgcctgacgcccagcgccagggagagccctacccagagcgccccaagggaccagtgcagcaggacggggagctccacggcttccgcgcccctgctgagcctcagggctgctcgttccggcgggagcccagctacttcgagatccccacgaaggagaccccgcagccgtcgcagccccccgaggtgccggcacacgagatgcccacgaaggatgcagaggcaggtgggggcggagcggcccctgtggtgcagagccacgcctccttcaccatcgagtttgatgactgcagccctggcaagatgaagatcaaggaccatatcaccaagttttccctgcgccagcggcggcccccgggcaaggaggccacacctggcgagatggtgtcggctgagaccaaggtggccgactggctggtgcagaatgacccgagcctgctgcaccgggttggccctggggatgaccgccacagcaccaagagcgacctgcctgtccacacccgcaccctgaagggccacaagcacgaggacggcacgcagagtgactcagaggaccccctggccaaggcggcctcggccgccggggtgcccttggaggccagcggggagcaggtgcggctgcagaggcagatcaagcgggacccccaggagctactacataaccagcaggcctttgtcatcgagttcttcgacgaggacacgccccgaaagaagcgctcccagtccttcacgcacagcccgtccggggaccccaaggccgacaagcgccgtggcccaacgccggccgatagggaccgccccagtgtcccagccccagtccaggcagggggccgcagctcggggccacagagggccggctcgctcaagcgggagaagacagaggaacggctgggcagcccctcgcccgcctcccgaacccctgcccgccccttcggaagcgtggggcgccgctcccgcctggcccaggacttcatggcccagtgtctgcgggagagctccccggccacccggcccagccccgagaaggttcctccggtgctgcccgctcccctgacaccccatgggaccagccccgtgggccccccgaccccaccgcccgcccccacggacccccagctgaccaaggcacggaaacaggaggaggacgacagcctcagtgacgcagggacatacaccatcgagaccgaggcgcaggacacggaggtggaggaggcccggaagatgatcgaccaggtctttggggtgttggagtcccctgaactctccagggcatcttcggccacctttcgcccagtcatcagaggggacagagatgagtctgatgacgggggcgtggcccagcggatggcgctactgcaggagtttgcctcccggccactgggtgcggccccccaggcggagcaccagggcctcccggtgccgggctcccctgggggtcagaagtgggtgtcccgctgggccagcctggctgacagctactcagacccgggcctcacagaggatggcctgggacgtagaggcggggagccggaggggtccctgcctgtgcgcatgcggcgacggctccctcagctgcccagtgagagggctgacagccctgcgggcccagagagcagcaggaggagtgggcctgggccaccggagctggacagtgagcagcccagccgcctcttcggccaggaggagttggatcctgacagcctcagcgatgccagtgggtcggacgggggccgaggccccgagccaggggtggagccacaggacagcagacgcaggagcccccaggaggggcccacgtggagcaggggtcggcgctcaccaagggcccccggggagccaactcccgcctctttcttcattggggaccagaatggggacgctgtgttatctaggaaaccgcttgcggctccaggggatggggagggcctagggcagacagcccagcccagccccccagcacgggatggcgtctatgtcagtgccaatgggagaatggtcatccagctacggcctggacggtccccagaacccgacggccctgccccagcctttctccggcaagagagcttcactaaggagccagccagtggtcccccagcgcccggcaagcccccccacatctccagccacccgcttctacaggacctggccgctacccgggccgcacgcatggacttccactcccaggacacccacctgatcttgaaggagacggagacggccctggcggccctggaggcccgactcctctctaattctgtggatgccgagtgtgaggggggcagcaccccgaggccgccggaggacgccctgtctggggactcggacgtggacacagccagcaccgtcagcctgcgtagtggcaagagcgggcccagccccacaaccccccagcctctgcgggcacagaaggagatgtcgccatccccgccagctgcacaggacccgggaggcaccgccctggtcagtgcccgtgagcagtcctcagagaggcagcatcacccacttggcccgacggacatgggccgtggagagccggtacggcgctcagccataaggcgtggccacaggccccgagggtccctggattggcccagtgaggagcgtggccctgtcctcgcccacctacccagctcagatgtgatggcctccaaccacgaaacccctgaggccaccggggcaggacggctaggttctcgccggaaaccagcggccccaccgccatccccagctgcccgggaggagcagagccgtagctcagccagctcccagaaggggccgcaggccttgacccgctccaacagcctgtccacccctcgccccacacgggcctcccggctgaggcgggcccggctgggggacgcttcggacactgaggctgcggatggtgagcgggggtccctgggcaaccctgagcccgtgggccggccagctgctgagcaggccaagaagctgtcacgcctggacatcctggccatgccccggaagcgggccggctccttcacagggactagtgaccccgaggcagcccctgcccgcaccagcttctctggccgcagtgtggagttgtgctgtgccagccgcaagcccaccatggccgaagcacgggctgtctccaggaaggctgccaacacagccaccaccacgggtccccgccagcccttcagcagggcccgctcgggcagtgcccgatacacctccaacacgaggcgccggcagcagggctcggattacacgtccacctctgaggaggagtacggctcccgccacggctcccccaaacacacacgctcccacacctcaacagccactcagaccccgagggctggcagctccagccgggctcgttcccgggcccccggcccccgggacacggacgacgaggaggaggagcctgacccttatggtttcatcgtgcagacggcagagattgcggagattgccagggtcagctccctgccctgcccgtcccggctcgcggttcccacctgcagcgacagctccctgggcttcctggctctcggttcccacctgcagcgacagctccctgcgcgtcctggctctcggttcccacctgcagcgtcagctccctgcccgtcctggctcgcggttcccacctgcagcgacagctccctgcccgtcctggctgatggttcccacctgcagcgacagctccctgcgcgtcctggctctcggttcccacctgcagcgtcagctccctgcgcgtcctggctcgcggttcccacctgcagcgtcagctccctgcccgtcctggctgatggttcccacctgcagcgacagctccctgcgcgtcctggctctcggttcccacttgcagcgtcagctccctgcccgtcctggctcgcggttcccacctgcagcgacagctccctgcccgtcctggctgatggttcccacctgcagcgacagctccctgcgcgtcctggctctcggttcccacctgcagcgtcagctccctgcccgtcctggctgacggttcccacctgcagcgacagctccctgcccgtcctggctctcggttcccacctgcagcgtcagctccctgcccgtcctggctga

SEQ ID NO: 152321 - DNA, 465 bp, Homo sapiens
  misc_feature (1)...(465): n = a,t,c or g
gaagaagaaagttctcctggcaacggaactcgctccagaggcgctgagaagtaaacgtggtgtgtatgctctgaagggctcccaagagttttctggattcgttactcgagcttctcaaccactgcggcctaatccactcgagcgctgtctgtctttcaatgctcagttgaaagtgtgtcccacaatttatgtacacgttcaacgccaggtttttcttcactgcttatttctaggaaatggtctatggtggaaacgtcttcagctgcctgctggactgttatttcttgaaaagcacactttaaaatgttctcatagctgagaatgggctcagaaggtgggacggcagaagttcctgtcacccaaggtccaccctggcatggttggtgagaacaacactcaatggggcagaagtggttctcggtggctggggttcagtagnccccgcccgggaatncagccggtacg

SEQ ID NO: 152322 - DNA, 4239 bp, Homo sapiens
atgcccggccaaattcttgtcaaagcagcccagttattccaacagaaagcaaagtcttttcaccgaatggtcctggaacagctgggtatttactgggaaaccaataaacctggacccttccatcccatcactcatgaaaatgaatttgaaatgaatcatagaggggaatgtaaaaccaaaaactataaaacttctagaagaaaatataggagaacttctttaacacctcgagggcagcaaagttttcttaggatacagaagattgggcaaagatacctgcaatacatttaccaagcaaaggcctccaacccagaatgcacaaagaattcttgcaaaccaaaagacaaacaacccgatagaaatatgggcaagaaaacactggaaagtgacaaggagggtctcagacctaaggcccccatccctgccccagacccagttgctggtaggacactgattgggaaggagcatgtccctatcctttggggtggtgtgctggcctcggggaccagctgctccctgtcccctgcgggctccccagtgcaccccacaaccctgagggaccaccagctggggccaccccagcccctctggagctgcctggagctccagccacaccagacccacaacaaattcgtgggacggggtggtgccaaggaaagggacaggaatctggccagagcctgcccaccgctaagccaagggcaatggcagcgccctggcctcaacactaccattaacattcctgcgggtgaaaacttgaaccttgtggagggaccccgggacccagggctggctctggaccctgccaggacccccacatcccaccagagggagtgggcgggtcccctgatgggccaggagcctggccagcccccaacactcactcagcttcttggagctggggaccccaccctgagtgcccacccccagcctgagcagctgactgcagaggaacagaccgctctgagtcacacagccagcccagtctgcccgctcagcccaaactcacagcggccaccacacctcgaagcaccagggtatctgccaggaggctccagcaggactcaaccagctgtgctacgtgtagcccccctgggatcccagtgtgccagccctgtgcccatagcctggatagaaaacgactctatttacacggaggcaggaaagctggccacgtctgctccagggacactcccagacagctctcacctgggaacgctgtttactgtttaccacctgacacccacactcagccaggcagggcagggctggctgagtcagcgccgtacccagaggcccagcctgctggagtgggacaggaaggagacgctggcacagagcggggccgtcatgccagacacagcactgacccccgcaagagcctttgctggggcccccaccccagctacgcccacctcacagcagccagagggaggtgccctgcacagctggccacagcgctggccacgcaagcccttcccagaccctcgctgcagtgcggccagtgtggtccgccaagccctggaacacatgacggagatctcctcctggtgcaccctccccaacgcggacagccatgggaacgcaccacaccctgccccaggccctctccagactctaagcacgtgccactggctctgcctggggcaccctcccagctcagatcctggacttgctcccccgccaggcactcagaaccgagccctcggctccagagcccctggcgggctacggggactccccttggctttgcgggatggctgtgtccactgggcctgtcctcccctggctaagaaatggtcccagaaccaaccacagctgctcaggtccaggaacttcgcctctgccctgcacggggctgcccacttccaagtcttttatacggagatgatgggggaggaccccctgaccagctgggtgcccgtttcaggcctgggtattgtccccaggtccacttcctctgcacccacacagctgggatcaggaaatgtggcagtggtggggcatgtcagggtgctgccatcgttccactcggatgggtttcttcaacccatgtcttcatcgggctctctggctcagcagtccgtgtgggctagcctgggatccgagcagcagcaggttcccatgctgccgcctgcaagccctggcactcctgctgccagagctgggccagttcaatttgagcagtgcctgctccaatcgccaacctggaagccttatcctcagctcgtgcctttcaggctgtgccatgaagcaggatggtctgcccagaagctggcccaagaagccagcagcggcctagcagccacctgggctgcccccacctcctcctgcaaccagggttgggcacctgatgtcaagggcaggggaaggttgggcagtcctgggcggccagcaccccggcgtgcatgtctcctgagcagctgcccatcgggcctctgctggcctgggggctccaagatgcaaggccggcgggagctggggggagagcctttgagtgacctccaggaggaagcagccagcgcttccctccgagtggcacctgagaggctgagtgatgacagtttggaatggagacggacctgccccgaccttctcctgtccgatgggaaagccagcatctccatgccccgtgagggcggttccacctgcactgcccgatgtcctgaccctggggaacacagcagcacttggggggagtttgaaggctttcgggaatcttcagccaagtctggacaattctcacagtcccttgaactcctcgagggacccacagaaccccagccaccgagaaccacttctgccccaaaagagtgcagttcttcaccaaccatgccaggggtgggaccttgggtgacaggaacttctggccgtcccaccttcttgagcccattcttcagctatgaggaacattttaaagtgttgcttttcaaggagataacagtccagcaggcagctgaagacggtttccaccatagaccatttcctagaaataagcagtgaagaaaaacctgggcgttgaacgtgtacataaattgtgtaacgaatccagaaaactctggagagcccttcagagcatacacaccacgtcttactttctcagcgcctctgggagcgagtcccgttgccaggagaacttctttcttgttctcggaatagatgctgcgcagaagaacctttctgggagccagggccacatcatgggaagattgtgacctcaaagagcctgaaaggactcctcactgtcagcagcttctgtctccagcattgcaaagccctggtccagaccaagctctcgggggccgcctggcagcaaacaggggaggctgatgacatgcagccgcttcctgaagaccccctcatgcggaggtggccagcacatcactattccaaggaaaaggatgttcactccacgcaagcttcaaatttgacactctttaattaggcgacgttttgctaaaatcagggaggattttgttacctttatgagggattttttcattttcttcctgggtgggttgatgttggaaccagaggtgttttttggagctgtttttcagaccccaggcccattcctgggatctctccaacaggacctgtcctgtgttctgggcttgtctcgggtctgaccaggagatggaggatgtgtccttggcagagccaaggggagacagaggtttctggatgccatgacaggctgtcggggtccaggtggcactcatgggccccctgccccatgtgaatgctgctggcacctggtggggggttgcccagggatggacccctgggcatggctttctggggctgctttaagtccaagggggagccaacttgtggcccaaatccatgagttcagaggaaaaaggggaaggcactgaaacgtcaccagagagacagcttgttgagacccgctcagaaaccctctgtctgtcacactcttgccctggcttgctgtgtggtcagggcaccatgagggtgtacagatgtgctgtgtcctaaaaagcttgccaggtgccctcacttattgtttgggcccctgcccagcagcctcaaggacaggcctttgtccctcacggttgtggacaggaggtcgcacccctggcctggcgagaggcctctggtgggcccgtggcttcccccagttatctgcctaaggaaaactgtgctcttcgaagggcagagccaagaagtcagccctgacttttgtaaaattttactaaataaaaccacctggataaa

SEQ ID NO: 152323 - DNA, 760 bp, Homo sapiens
ccctaacccgaataccattccttggggccaaatatgcccctgtcatctttgctaaggagcctccaatgacaacgttcgtgaacagagatacaaatggcttgctttaagcaagcaaccagatgggtgaaatgtaccctcgccatggtaaatacatggcttggctgcttgttgtaccgtggtgacggtgtttccaaaagatgtcaatgctgccattgccaccatcaaaaccaagcgcagcatccagtttgtggattggtgccccactggcttcaaggtttggcatcaactacagccctcccactgtggtgcctggtggagacctggccaaggtacagagagctgtgtgcatgctgagcaacaccacagccattgctgaggcctgggctcgcctggaccacaagtttgacctgatgtatgccaagcgtgcctttgttcactggtacgtgggtgaggggatggaggaaggcgagttttcagaggcccgtgaagatatggctgcccttgagaaggattatgaggaggttggtgtggattctgttgaaggagagggtgaggaagaaggagaggaatactaattatccattccttttggccctgcagcatgtcatgctcccagaatttcagcttcagcttaactgacagacgttaaagctttctggttagattgttttcacttggtgatcatgtcttttccatgtgtacctgtaatatttttccatcatatctcaaagtaaagtcattaacatcaaaaaaaaaaaaa

SEQ ID NO: 152324 - DNA, 1752 bp, Homo sapiens
atccttaattaaattaatcccctccccccccagtgcgttacttacctcgactcttagcttgtcggggacggtaacccgggacccggtgtctgctcctgtcgccttcgcctcctaatcccttacccactatgcggggagtgcatcttccatccaacgttggccaggctggtgtccagattggcaatgcctgcttgggagctctcttgcctgtaacacggtatccagcccgatggccagatgcccaagtgaccaaaaccattgggggaaggagatgactccttcaacaccttcttcagtgagacgggcgctggcaagcaccgtgccccgggctgtgtttgtagacttggaacccacagtcattgatgaagttcgcactgggcacctaccgccagctcttccaccctgagcaagtcatcacaggcaaggaagatgctgccaataactatgcccgagggaacttacaccattggcaaggagatcattgaccttgtgttggaccgaatttcgcaagcttggctgaccagtgcaccggtcttcaagggcttctttggttttccacagctttggtgggggaactgggttctgggttcacctccctactcgatgaactgtctctcagttgattattggcaagaaagtccaagcctggagttctccatttacccgggcgcccccaggtttccacagcctgtagttgagcccctacaactccatcctcaccacccacacccaccctgggagcactctggattgtgcccttcatgggtagagaatgaggccatctatgacatctgtcgtagaaacctcgatatcgagcgcccaacctacactaaccttaaccgccttattaggtcaaattgtgtcctccatcactgcttcccttgagatttgatggagccctgaatgttgacctgacagaattccagaccaacctggttcccttaccccggcattcaacttccctccggcccacatatgcccctgtcaatcctccttcctgagaaaagcctacccatggaacaagctttctgtagcagaagatcacccaaatgctttgcttttgagcccagccaacccagatggttgaaatgtgacccctcgcccatgggtaaatacattggcttgcttgcctgttgtaccggtggtgacgtggttcccaaaagatgtcaaatgctgccattgcccacccatcaaaacccaagcgcagccatccagtttgtggattggtgcccccactggcttcaaaggttgccatcaactaccagcccccccactgtggtgcctgttggagacctggcccaaggtacaaaaaactgtgttgcatgctgagcaacacccacagccattgctgaggcctgggctcgcctggaccacaagtttgacctgatgttatgccaagcgtgccctttgttcactggtacctgggtgcaggggatggaggaaggcgagttttcaaaggccccgtgaggacatggctgccctttagaaaggattatgaggaggttgggtgtggattctgttaaaggaagagggtgaggaagaaggaaaaggaatactaattatccattccctttttggcccctgcagcatgtcatgctcccagaatttcagcttcagcttaactgacagacgttaaagctttctggttagattgttttcacttggtgatcatgtcttttccatgtgtacctgtaatatttttccatcatatctccaaaggtaaagtcatttccatcaaaaaaaaaaaaaaaa

SEQ ID NO: 152325 - DNA, 1251 bp, Homo sapiens
acagagcaagactccgtctcacacacaaaaaaatgaaagattggaatgccacccctttcctagcatgcacaacatatggcaggatcctgctcttctgtcccctgtagcgggttgtcccgtgttccccttaaggaagaaatcacagtttttgtcctcctggtgcttccggctggaggttcacctgctagtccctgatcctctttgcttagtgatgcacatgagtctactcatccccccaccactcccagcccccacttttttaagaataagaggtgataggcagttcggcggtcccgcgggtctgtctcttggcttcaacagtgtttggacggaacagatccgggggactctcttcccagcctccgaccgccctccgatttccctctccgcttgcaaacctccgggaccatcttctcggccatcttcctgcattctgggacctgccagcaccgtttttgtggttagctctttcttgccaacccaaccatgagtctccaggattcgtcagaatatttccacccgacgttgaaggcaagcctgtctaacagccctggtcaaatttgtacctgcagggcctcccaccacctacctctctctggggtttctatttcgacccgcgatgatgtgggctctggaaaggcgtgagccaatttctttcggcgaattgggccgaggaagaagcgccgagggctacgagcgttcttcctgaaagatgcaaaaaaccagccgtgggcggcccgcgctcttcttccaggacaatcaagatagccagcttgaagatggagtggggtaaaaccccccagacgcccatgaaaagctgccatggccctggaggaaaaagcttgaacgcaggccctttttggatctttcattgccctggggttcttgcccgcacggacccccatgctcctgtgagcttccctggagactcacttccctagatgagggaagtgaagcttatcaaagaagatgggtgaccacctgagccaacctccacagggctgggtggcccggaggctggggctggggcgaagtatctcttcggaaaggctcactctcaagcacgactaagaagccttctgagcccagcgacttctgaaaaggcctcttgcaaagtaatacgggcttctgcctaagcctctccctaccagccaatagggaggctttcttaactattcctaacaaggccttgggaccaaatgggaaataaagctttttgatggcaaaaaaaaacctcgtggccgaattctt

SEQ ID NO: 152326 - DNA, 564 bp, Homo sapiens
ttcacaagtggatcgatagcagtcagagcctgagagtatccgtatatgcagagaagaccacatggaacgcttgcaagcctttgatgccaattctcggaagcaagaagcagagtggaaagaaaaggcaataaaggagctagaagaatggtatgcaagacaggacgagcagctacagaaaacaaaagcaaacaacagggtggcagatgaagctttctacaaacaacccttcgctgacgtgattggttatgtcagaagaagcctttgtaaatgacattgacgagtcgtccccaggcactgagtgggaacgggtggcccggctgtgtgactttaaccccaagtcattggattaattatgttgagttcttttggaccaaacctttttgtctttagagttgttcattgtttgtgattgcatgtttccttccttcaactgtgttctccctggcattcagagaggagggagaggaggaagaggaaggggagggaagcttcccaagagtagcctcaacctgtgcttctgtgcattattccccccataaatttctgtttcaaactgtaaaaaaa

SEQ ID NO: 152327 - DNA, 2740 bp, Homo sapiens
gggctttctacaaacaacccttcgctgacgtgattggttatgtgtatgttgcaaaactaattcctttttctacatctgattctttctacttttgtttagagttaatgctccttttatgtcacaagttgctttgctttttaaattatttcaaattggcactttgggggctgcctaagaattgataagcggggtatgatctgttgatgaatcttccagatttgtgactccctgcatcctctgatggccatttttcatatttggggttttggagggaagaaagctaactcgctttcaaaatgtgtcatttgcgatcttatctgggaacggtttgaggctcgggggaactctgctctcttgctcttggctgccatcactgctgccatgccctgttgcctgcctgcctcaggtgggaaagaggtttccccacctgggagcaggtggcagtcccaggtggttaggagccagtgagcagcagcaccttgcattgccaaaatcagagctgtggggcagcatttttccatacttggttcattcaaacaatgtggggtcgtttgcctctccctcaggcagaagagtccagagcagagggggttgtctccagtgggtgtctataattgttcctctgtggtcttgcatgtcagaaattgctatttagtggtcagcttctgatgtcctgtctcctagcacagggaagcccccagctttgagatcaggatagtcaaagtgtcttgatacgggccacttgggcttctccccctgacccccccaaaagaaacctgcatcttctctggagaaggtgtttttcttattcttttttttttctttttttcttttttcttttttttaaggatttcttttatcaaagcagtattgctgaagagttggaaacagttctcattgtctcctccttaaaaaaagggctggctttacatgagaagtaagggtggaatggaagaggagaggaacctgtggaaggtgggcgatgagctcaggtctgtagagcctctcagggcctatgaccttgagatgttcatccccttagaagatagaactgggtttcctgggcccccagatgcatttgcagtgagacttgtgaaatgctggacttacaggtggtgtttgatttgatttctgcacattctctctggagtagaaatggagactggaaaggtcgagtctggttttgctgggcagctgggtggccagcaaagccagctgcacgtccccaagcacagatagagtggcaagggcatgtccagcttactgaccatctgcattgagctcattctcattttctatatctgacttaaagtttctctcgtttcttttcttctcttcacctttaagcacaaacataaaccatccttgctacagcctagaacagttaagtaaacctttctcactgcccctaactgtgtgtgccatgaagtcgcagtgttgtagtggctctgggcttcagcggtgtttgccacggccatccctgtgatagtgccacctcagtccccacagaccagtcatctccattgcttttctttgcccgtgatgcttgttggagtagatgaatatagtgtgtcttagcgctgtcctttccggctgtagctcccaccagttaattccgaactgggggtgggctgaccttgatgtgaaagaatgttggagcagcatcctgccaaaaagcaactcacgttggctctcctgccagtgtgccctgagtggccccaaggcacctggctggagggaaaatggcaaacttttggctgaactggagaatgtcctaacaaacccccttccagaatggctttagtctctagtgcttgctagcatgggagctttgtcttgaattccttttgatctgccccgtttctctccagccttaggaataaatctagaggctattgtgcaatgatctgtgggctttttagaagtctctaaatttccttgaaattcagtacagcccagcataaactactcaagttcttgatcagcctgctgctttgttcttattaataaaagcagtgtgtagctggctaaggacttgttttattaatgctccacaggagcagagacagacagagagacatagtgagccttgaaccaaacacctgtattccaacattttacacagcggtctgggcaccctgtgcctaggagagccagctacgtgtctacctgagtctgacctgggccaggggctgttatcttgggaaagccagaatgtcattaagaaagggacaaataggcagttgcttgtgtagcaaggcagccaccaggttgctcaaagggggttctgcataaaccaacatattttgttgttgcttccagggcagcagaagaagcctttgtaaatgacattgacgagtcgtccccaggcactgagtgggaacgggtggcccggctgtgtgactttaaccccaagtctagcaagcaggccaaagatgtctcccgcatgcgctcagtcctcatctccctcaagcaggccccgctggtgcactgaagagcaccctgtggaaacactacatctgcaatatcttaatcctactcagtgaagctcttcacagtcattggattaattatgttgagttcttttggaccaaacctttttgtctttagagttgttcattgtttgtgattgcatgtttccttccttcaactgtgttctccctggcattcagagaggagggagaggaggaagaggaaggggagggaagcttgcatgcctgcaggtcgactctagaggatc

SEQ ID NO: 152328 - DNA, 1157 bp, Homo sapiens
gccaccgctgtggtgtcggtgggtcggttggtttttgtctccaccggttgtgtccgtgccgttcagttgcccgccatggctgagctggatccggttcggcgccccctgccggcgcccctggcggtcccgcgctggggaacggagtggccggcgccggcgaagaagacccggctgcggccttcttggcgcagcaagagagcgagattgcgggcatcgagaacgacgaggcccttcgccatcctggacggcggcgcccccgggccccagccgcacggcgagccgccggggggtccggatgctgttgatggagtaatgaatggtgaatactacccaggaaagtaatggtccaacagacagttatgcagctatttcacaagtggatcgattgcagtcagagcctgaaagtatccgtaaatggagagaagaacaaatggaacgcttggaaatcccttgatgccaattctccggaaagcaagaagcagagttggaaagaaaaaggcaattaaaggagcttagaaagaatggttatgcaagacaggacgaagcagctacagtaaaacaaaagcaaacaacagggtggcagatgaaagctttctacaaacaacccttcgctgacgtgattggttatgtcacaaacataaaccatccttgctacagcctagaacaggccagccagaagaagccctttttaaagtacctggagggattgtcccccagcaatgaatgggaaacgggttgcccggctgtgtggactttaacccccaagtcttagcaagcaggcccaaagatgtctccccgcatggcgcttcagtcctcatcttccctcaaggcagggccccgctggggccacttgaagagccaccctgtggaaacactacatctgcaatatcttaatcctactcagtgaagctcttcacagtcattggattaattatgttgagttcttttggaccaaacctttttgtctttagagttgttcattgtttgtgattgcatgtttccttccttcaactgtgttctccctggcattcagagaggagggagaggaggaagaggaaggggagggaagcttccccaagagtaagccctcaaacactgtgcttctggtgacattattctgagaataaatttctgtttcaaactgtaaaaaaaaaaaa

SEQ ID NO: 152329 - DNA, 1205 bp, Homo sapiens
  misc_feature (1)...(1205): n = a,t,c or g
cgcccccccgccnnnnnnnnntttgagnccatcgcgatccctagtccgtgtggtggaattcgcaccacagcggtggctgccgggcgtggtgtcggtgggtcggttggtttttgtctcaccagttggtgtccgtgccgttcagttgcccgccatggctgagctggatccgttcggcgcccctgccggcgcccctggcggtcccgcgctggggaacggagtggccggcgccggcgaagaaaacccggccgcggccttcttggcgcagcaagagagcgagattgcgggcatcgagaacgcacagggccttcgccatccttggacggcggcgcccccgggccccagccgcacggcgagccggcggggggtccggatgctgttgatggagtaatgaatggcgaatactaccaggaaagtaatggtccaacagacagtgtatgcagctatttcacaagtggatcgattgcagctcacagcctgaaagttatccgtaaatggagagaagaacaaatggaacgctttggaaagccctttgatgccaattctcggaagcaagaagcagagtggaaagaaaaggcaataaaggagctagaagaatggtatgcaaggacaggacgagcagctaccagaaaaccaaaaggcaaacaacagggacagacagaagcaagacctttgtaaaatgacattgaccgagtcgtcccccaggccactgaaatggggaaacgggtggccccgggctgtgtgaactttaaacccccccaagtcctaagcaaagcaggcccaaaagatgtctcctccgcatgacgcttcagtcctcatcctccccctcaaagcaggcccccgctggtgccactgaaagaagcccacccctgtggaaaacacttacatcttgcattattctttaattcctacttcagttgaagttctttcacagttctttgggtttaatttatgtttgagttcttttttgggaccaaacctttttgtctttaggagttgttcattgtttgtgattggcatgtttccttccttcaactgtgttctccctggcattcagagacggagggagaggaggaagaggaaggggagggaagcttcccaagagtagcctcaacctgtgcttccgtcgcactactctgagaatacactttctgtttcaaactgtaaaaaaagtcgaccggccgcgaatttagtagtagtaggtagta

SEQ ID NO: 152330 - DNA, 585 bp, Homo sapiens
atgaagaccatccgcagcaatcagactgttgatattccggaaaatgtcattactctgaagggatgcagagttattgtgaagggccccagaggaactctgtggagggacttcaatcacatcagtatagaactcagtcttcttgtaaagaaaaaaaagaggctccggcttaacaacacttgtggtgagaacatgatcaagggtgttacactgggcttccattacaagatgagatctgtgtatgctcacttccccatcaacatcgttacccgggagaatgggtcttttgttgaaatccgaaatttcttgggtgaaaaatacatccgcagggttaggatgagaccaggtgttgcttgttcagtatgtcaaacccagaaacatgaattaatccttgaaggaaatgacattgagcttgtttcaaattcagcggctttgattcagcaagcaacaacagttaaaaacaagcatatcaggaaatttttggatggtatctatgtctctgaaaaagaaactgctcagcatatcaggaaatttttggatggtatctatgtctctgaaaaagggggatcctatagagccacacggcag

SEQ ID NO: 152331 - DNA, 673 bp, Homo sapiens
aggaaccctgcggagggacttcaatcacatcaattgtagaactcagccttcttgtaaagaaaaaaaagaggctccgggttgacacaatgctgggtcaacagaaaaggaactggcctacccgttcgggactatttggtagtcatgtacaggaccatgatcaaggggtgttaccactgggcttcccgttaccaaggatgagggtcttgtgtatgcctcacttcccccaatcaacggttgttatcccagggagaatggggtcctccttgttgaaaatcccgaaatttccttggggtgaaaaataccatcccgcagggttcgggatgagaccagggtgttgccttgttcagtatcctcaagcccagaaagatgaattaatccttgaaggaaattgacattgagctttgtttcaaattcagcgggttttgattcagcaagccacaacagtttaaaaacaaggaatatcaggaaattttctggatggtatctatgtctctgaaaaaggaacctgttcatgcaggctgatgaataagatctaagagttaccctggctacagaaagaaagatgccagatgacagctcaggacctgcatgtgatatttaaatgatgcaataaaaggcctattgatttggaaaaaaaaaaaaaaaaaaaaaaaaaaaaaaaagggcggccgct

SEQ ID NO: 152332 - DNA, 2107 bp, Homo sapiens
tgggtttccacaaaggcttttggttttattattattatttttaacaaacatacattggaaatagtaaaggtttctaattgaaaagagacctaatgcatagtttctctgcagcatagaagaccacctgtttcccaaaacttccaaggttaagggctttgaaaacattcccctggtaaattatcctcccagctggcctagcctagttaggcatattggtgccacattggtatcaaaggtgattattttttgcatttagcaaatgagcgctattacttttttgatgtatttttaattcagattgctcaaaagtcttgttatttcaagggagccttatgtcatacccacaaatattgatacctcctagtggaaatggtggctgtgggctccctagtagagttaatggatgaaagggctgagatacttagatactggcggaacattcagggttatggagcaaagtgttatgaacaatagctaccagagagttccaaagtctcccaaagcaactcataactataacaccagataaagttccaaagtcatttcatcacctatgtgaaaatgcaatactgaatgttttggctctctgatgcattttgttgttgttttatttattattattattatttttttgagacagcagggtcgctctgtcacccaggctggagtgcagcggtgcgatcttggctcactgcaatctccgcctcccgggtttgagcaactctccagcctcagcctcccgagtagctgggactacaggcacgtgctatcgcatccagctaatttttgtatttttagtagaaacaggatttcactatgttggccaggctggtcacaaactcctgacctcaggtgatccacccgcctcagcctcccaaagtgctgggattacaggtgtgagccactgcgcccagcctgttgttgttttcttaatccagtactttaacgttttactgtcctagaaatgccctgtgttttctcatgctatttcataagagaatatgctacttttcattgatgtcaagaaggcaacagaaatgctcctggggaagatctccttacaaataggtttcatctcatcagtaacaaaaattagaaaagcctttggtcagcccatggaggtgagttactctgaacctatgaaaatgtctctttataagagcaaattgcatcagatgacaaaacaggaatcaatttctcttagaaaaagttagtaatgtgttaagactactcttttaggttttattcaggcaaatgctcactgaacctaaaatactttaggggactctgatgggaggttcctttgaacgctggttggtgggtgtgcttgcttttaaagagaactcaacacagcaactgtgtgcttatgaaagttctacaaacgtgttcacttttctttccatctatttgtataatacgtacaatccttggggaagagcatgtacaaaaatgtcttctaagtaatccctttacaaggtaaacagactgctacgggttcaacttatgttgaaaagtaaaattacagcatcacataggtattattacattactctgaagaatgcataaactgccagatcacattttctaacctgaaaattaaacttctttcactgatagtcacgatcagtgccagctttccaggatgctgtgaaaactgcggttggccacagctacttagctgtgatgccacgggggattactgacttgctgcttttctaatatagaaacaaactcaacatagaatcaaagtgctgtcttgtgaatctctgctcatttcctggacagcttccatttcctgaagcagacccctgccccactggcgtgggaaggtgagccaggccagccgtctgcttctgcttctccttcataggctctttctttggcccatctgggggcacaagctcctgggtgatcttggctggctcttctgtaatttgcagaaacctgaaaaccatcacataattgggctttggaatacgattaaaattacgcagggacaaatgactgaaaggacaggacacagggctggtgtgggtcagacccacacatctggggccagccttggacaagcctttttggggaatttgaacttttaaaacttggttaa

SEQ ID NO: 152333 - DNA, 381 bp, Homo sapiens
  misc_feature (1)...(381): n = a,t,c or g
gtttaaagtatgtgggagcatattaaccaagatataggatctgagaatacttaattgattttgagatttgaattaaattttaaaaatcaaatattttgtatgttaattcaggtaggttttggccaaagatgaactcaaatttttacatgttagccaaaatcaatatggaatcagaatagacatttttacttttagttaactgtgaaataaagatgcagatcagatgtatttacatatgcctttgccacctggcagcacccaacnnnnnnnnnnnnnnnnnnnnnnnnnnnnnnnnnnnnnnnnnnnnngtcacgctgatctcacaagggtcgggaaaatcatcattaacaggatgataaatggcctgggcgtacgcgtggg

SEQ ID NO: 152334 - DNA, 1845 bp, Homo sapiens
tttttatgcttatcaccgcaatgatggcaaacagtgatttttttttcatagtttatgtttcattgttgccagcacctttagtgctcagtcttgagtgaaaaatataaagtgccaaaaaaatcttgcaagacagaatccatacttaacactctttccaagacactgtgaccatgtacagtagctatttcctgatgaccaaatctctcaacgaatcatgttattaataaatatttttagcactcatcagtattctccaatgtgaccttctcattggagtacacagaaggaaagcaaagaagagcatctgacttctagctctggcttacagcctctctaccaggccgaagcaagagacccgcggcagcagctccccgccactcagaccctggggtggtgataaactcaaaagaatgggctctggttttctattgacagaaaacccacttgattttgcttctgagttagcagtcagaagaccctctaagtacaatagaagtgctcttaacggactctgcctgtgggactcccaggccccggagtctccatctctctcgtaagccacctgccaacagcacagctggaaggctgttctctggtgttctcagcgctccggctccctccctggagttgtgcaaccgtcccaaactcctccatgcaagttctgcttcctcttataagtacacaactcagttaagtattcacatacacacagaaaatacgggtgtgaaaagaaagaattttctgtaaaaattaagttgaatactttggtaaaaagtgataaaggctgagttgccaataaaagttgcttttaaattaggtgtggctgggaatattataagatattggggaaaatatacaaatcaagaaaatttctgagcttagattgcttcatagatttatttaagtactcatcccacctttaaaacctctaaactgagaagaagggacccaaatcatgttattggtgtgactttatgtgagacgtagaactgtagtcattggacccttaggcaaaggaaaatccgtgtctttatatcagaagatcggcaaaccgaatgtatattacacagtttaggttatgattccctactttaacctacttactttattaaatgaccaactaccgatactgatcacaatagttattagagattctaatttagttgggaaggttctaatcactttccattaccaggcatttgaaaaataggggattcctttccgaatatattagccagggagccatagttaggatgttacccagggccatttattcatcctgttaaatggatgattttccccgacccctgtgagatcagcgtgacaggagtgtgtgtgtgtgtgtgtgtgttcctgtggggtgtgtggtttgggtggggtgcctgccaggtggcaagggcatatgtaaatacatctagatctgccatctttatttccaccagttaactaaaagtaaaaatgtctattctgattccatattgattttgtctaagatgtaaaaaatttgagttccatctttggcccaaaacctacctgaattaacatacaaaatatttgatttttaaaatttaattcaaatctcaaaatcaattaagtattctcagatcctatatcttggttaatatgctcccagatactttaaaccatggcaaccttttggcctaagagaatgtttgttcatggaaaaaagcttttgagatgagagggtgtcttactttcttgtggcaattgattttctgttttaacaccctttgggtaaaatcttgcaaagagcttttataatttgttttactgaattgtatggagattgtataccaagtaaagctcttttaaattacaaaaaaa

SEQ ID NO: 152335 - DNA, 743 bp, Homo sapiens
ggtcatcgggacgtactaagactagggttgggccgagagtcggagccattactgcaggaaaaggtcccggagagctgagcagtcaagatggtggggcccaggtcttgggagacgggcaggattggggacgagaggcaggaagagacgggtggggggcgaggagaaggcaggggtaggaggcaaagggaatctgaggacccgaaaggttggaggtggggttggaaagactggggccctgcgaggaagcgagtctgcagcctgaaacaggagtttgtgggtcaaatatttgtgggtcacagtttgtggggctgggataaaaactcgggggattggcgttcaaatgctgaccacttccctcttttctgagcatggtgacttcacccgagaaccaaaccgcaggtaggttatctctgatccctaccgaggtcacccttagggagagggacaccctccccccagcacctatcctctaatcttaatctggcatctctttatcacccccatgagattaccccctggattattttctcttcttctggatcctccattttcttttctcactttcttcctccctccccttccactctaaatctgatcccaagcactygggtgagttttaggtggtgtgggtatgtgaaaaaacttggtcacttaatgcctgctgtgtgtggggtctcgggagggtgtataaagctgcctgctttcctttgtcctttaatcagctacttctgccycttttctcc

SEQ ID NO: 152336 - DNA, 417 bp, Homo sapiens
acgatttcgtggaacaccgggccccgagctcggtcccgcgcccgaggatcctccacggggctagatggctgcgtcgggggcgggagcggaggcaactccggccttccctgccctgacctggaacctctgggagggctgcagagtaagtgccgcctctgcgctccgacggaggcacgaggcctgtggagtaggtccctctgttccgacaggtgcgacacttggcgctccatgcttgcgggtgccgggaggcctggcctcccccagggccgccacctctgctggttgctctgtgctttcaccttaaagctctgccaagcagaggctcccgtgcaggaagagaagctgtcagcaagcacctcaaatttgccatgctggctggtggaagagtttgtggtagcagaagagtgctctccatgc

SEQ ID NO: 152337 - DNA, 453 bp, Homo sapiens
caatgtactccttcttccgccgccgactgtcctgagctgactgcttgttacggattttcctcctgaccttcttgaggaccctctcctctgccttggaggcccaggatgtgtgagtcctgggtccttcacctgcccccaactccccaatgcttctcctgggatattggcccctcagaggtcatggtgaggcccctgggttgggatacccttaggggaagcatgttaccttggtgaggggcaggtgagagggcagggaaaccccttcctgccccagcagacgcttctcctcatcggtcaggaacagggtttgacagggcagctgggggtaggggcaggagaagatgcaataggagtgaggagggggtcatcccatttgcagcacccaggctactccccccacatgccttctggagagtgtttcctcactgggagacaacttgaattccgccgcac

SEQ ID NO: 152338 - DNA, 958 bp, Homo sapiens
tcgacccacgcgtccgcccacgcgtccggccccagcgggcgacgaccgaacgcccccgggaacaccgggccccgagctcggtcccgcgcccgaggatcctccacggggctagatggctgcgtcgggggcgggagcggaggtgagcgggcgctacggccgcgagcccccgccggcccttcctccagcgccctgcggaccccgcagaaggcgctcgcctccctaccccgcaaaaacatatcgatttttctcgctgtggcaacggggacgtcctgatagatcctctgctccaataggcaactccggccttccctgccctgacctggaacctctgggagggctgcagagtaagtgccgcctctgcgctccgacggaggcacgaggcctgtggaagaaggtccctctgttccgacaggtgcgacacttggcgctccatgcttgcgggtgccgggaaggcctgggcctcccccagggcccgccacctctgctggtgctctgtggctttcaccttaaagctctgccaaccagaggctcccgtgcaggaagagaagctgtcataaaactacccctgagtgtggtcccacaggatatgtacagaaaatcacatgcagctcatctaagagaaatgagttcaaaagctgccgctcagctttcatggaacaacgcttattttggaagttcgaaggggctgtcgtgtgtgtggccctgatcttcgcttgtcttgtcatcattcgtcagcgacaattggacagaaaggcctggaaaaggtccggaagcaaatcgagtccatatagctacattccacccttgtatcctgggtcttagagaccctatctcagacagtgaaagtgaaatggactgatttgcactcttggttctttggagccttgtggtggaatccccttttccccatcttcttctttcagatcattaatgagcagaataaaaagagtaaaatggt

SEQ ID NO: 152339 - DNA, 734 bp, Homo sapiens
ttcggcaccaggggaagagaagctgtcaggtgggtgattgtctgggaacccgacacgtcccgtcgtttgtttttggttttagtatcttccccatataccaagagcacaggtggaaaaggccggcaccacatggaatgagggcaagcgctgtgccgggaagttggatgggcagagcctgggagaaatgttttctgaatggcctggggctggcatttatctttcctttcagcaagcacctcaaatttgccatgctggctggtggaagagtttgtggtagcggaagagtgctctcccatgctctaaatttccgggctaaaactaccccatgagtgtggtccccacaggatattgtggagaaaatcacatgcagctcaatcttaagagaaatgagttcaaaaaactgccgctcagctttgatggaacaacgcttattttggaagttcgaaggggctgtcgtgtgtgtggccctgatcttcgcttgtcttgtcatcattcgtcagcgacaattggacagaaaggctctggaaaaggtccggaagcaaatcgagtccatatagctacattccacccttgtatccctcggtcttagagaccctatctcagacagtgaaagtgaaatggactgatttgcactcttggttctttggagccttgtggtggaatccccttttccccatcttcttctttcagatcattaatgagcagaataaaaagagtaaaatggtaaaaaaaaa

SEQ ID NO: 152340 - DNA, 2392 bp, Homo sapiens
ggggcgccgagctaattcccagtgagcagcaggcgaggcgccaccgacgcggaagactataagccccagcgggcgacgaccgaacgcccccgggaacaccgggccccgagctcggtcccgcgcccgaggatcctccacggggctagatggctgcgtcgggggcgggagcggaggtgagcgggcgctagggccgcgagcccccgccggcccttcctccagcgcccttgcggaccccagcagaaggcgctcgcctccctaactcccaaaaacatatcgatttttctcgctgtggcaacggggacgtcctgatagatcctctgctccaatacggcaactccggccttccctgccctgacctggaacctctgggaagggctgcaagaagtaagtgccgcctctgcgctccgaacggaggcaacgaaggcctgttggaagtaaggtccctcttgtttccgacaggttgcgacactttggcgctccatgcttgcgggtgccgggaggcctggcctcccccaggggccgcccacctctgctgggttgctctgtgctttcaccttaaaagctctgccaagcagaggctccccgtgcaaggaagagaagctgtcagcaagcacctcaaatttttcccatgcggggtgtggaagagtttgtggtagcagaagagtgctctccatgctctaattttccgggctaaaactaccccctgagtgtggtcccacaggatatgtagaggaaaatcacatgcagctcatctaagaagaaatgagttcaaaagcttgccgttcagcttttgatgggaacaacgctttatttttggaagtttcgaaggggctgtcgtgtgtgtggccctgatcttcgcttgtcttgtcatcatttggtcagcgacaattggacagaaaggctctggaaaaggtcccggaagcaaatcgagtccatatagctacattccacccttggaatcctgggccttagaggacccttatctcagacagtgaaaagtgaaatggactgatttgcactcttggttctttggagccttgtggtggaatccccttttccccatcttcttctttcagatcattaatgagcagaataaaaagagtaaaatggtttccttcccttctgtaacttggagcaggaagtcatgggggcagagagggaaaggaggtggttacttaaggccccaatctaccaagtcttccccaccacttctcccttgttttccccctcttctactacttatttcaaacttctgggatacaatttcagctcaaaacgtttattttctccacctcaaaacttatttcccctcaaccctatacccaaagaagaaataaaatcacagataacataacagaagtatttgaggtaccctctcatatatgcaaacaaagtgcagactaggcctcaggcagagactaaaggacatcttttggggtgtcctgaagtgatttggacccctgagggcagacacctaagtaggaatcccagtgggaagcaaagccataaggaagcccaggattccttgtgatcaggaagtgggcaggaaggggtctgttccagctcacatctcatctgcatgcagcacggacccggatgcgccacctgggggtcttggcttccctcccatcttctcaagcagtgtcccttgttgggagccatttgcatccttggctccaggtggctcccctccagtctggactctaccactttgggtcttccagattttctgttacgtccttgtgggtcaggatatttctggaagtcactccgtgaggctggtaatcctcagacccagcttctggtcgactctggaatggactgaagctgggcaggatgatgagagccagggaaaaaagaagaatcaaaacacaagtgctggtctgggcagctttgttggaagtttgagcaattagcgtctgcagctggcggagctgagctaccaaggaggatgttgtgcctctacagctcctggactatttttcagtaattcttggttctgtgcagaacaggctgtcaccctgctctccagcccatcaatgtactccttcttccgccaccgactgtcctgagctgactgcttgttacggattttcctcctgaccttcttgaggaccctctcctctgccttggtgaggggcaggtgagagggcagggaaaccccttcctgccccagcagacgcttctcctcatcggtcaggaacagggtttgacagggcagcagggttgtacagggcactggggctacggtgcctgctctgggcaggatgtgggcatgagcatcaaagggcagctcactgaccatgcaggaatcaggcaccataaatgctgcgctccactgatctagctggatggagaaaaggcctacatttggcccagtttccccctgcat

SEQ ID NO: 152341 - DNA, 1349 bp, Homo sapiens
  misc_feature (1)...(1349): n = a,t,c or g
atggtgagcggcaggccacggcgcctgagggaggcggctgcgggtcggtcgcctgcgcgcgggaagcgactggggagcgacgtccgcaccccctcccccagcgccccgggcgggatgagggtctcgcacgaaggggcgggcggtgccggaatgcgcgtgcgcgcccgtgggcgccggggagggccggcctgccggtgtggctgtctctgatggtgtcatcaaggtgttcaacgacatgaaggtgcgtaagtcttcaacagccagaggaggtgaagaagcgcaagaaggcggtgctctttctgccttgagtgaggaccaagaacaacatcatcctgggaggagggcaaggagatcctggtgggccgatgtgggccagacctgtcgacgatccctacgccaccttttgtcaaagatgctgccagataaggactgccgctatagccctctatgagtgcaacctattgagaccaaggagaagcaagaaggaggatcttggtgtttatctttctggggcccccggagtctgcgccccctttagagcaaaatggatttatgcccagctcccaaggacgcccatccaagaaaggaagctggacaggggattcaagccatgaatttgccaagccaaactgcctaccgaaggaaggtcaagggaccgcttgcaccctggcaagagaagctggggggcaagtgccggtatattcccctgggagggcaaagccttttgtgagccccttctggcccccctgccttggagcatctggcagcccccaacaccttgccccttgggggtttgcaggctgcccccctttcctgcaaagacccggacgggcctgggggggatccccagcagggggaggggaaatccctttaaaccccagttgcccaaaacagaccccccccaacccccctgggaattttccttctccctccaatcccttggacgggttctggcctttccccaaactgctttttgaatcttttgattcctcttgggggtgaagcagaccaagttcccccccaggcaccccaagttgtgggggaagcctgtattttttttaacaaacatccccattccccacctgggtcctcccccttcccaatgctgccaactttttaaccgaaataagnggacttcntgtggcttgtcttgttttagttctgtgtataaaatgggaaatgtttgtgggagatgacccctcccctgtgccaggctggttcctctccgttttccccgcggtcacggctactcatggaagcaggaccagtaagggaccttcgattaaaaaaaaaaaaagacaataataaaaaggctcattaaaaaaaaaaaaaaaaaaactcgagactag

SEQ ID NO: 152342 - DNA, 2185 bp, Homo sapiens
  misc_feature (1)...(2185): n = a,t,c or g
gccgccgccgccgcccgccgcccctctgccagcagctccggcgccacctcgggccggcgtctccggcgggcgggagccaggcgctgacgggcgcggcgggggcggccgagcgctcctgcggctgcgactcaggctccggcgtctgcgcttccccatggggctggcctgcggcgcctgggcgctctgagattgtcactgctgttccaagggcacacgcagagggatttggaattcctggagagttgcctttgtgagaagctggaaatatttctttcaagttccatctcttaagttttccatgttgcatttcagaggaacatcaagaaatcatgaacaactttggtaatgaaanaagtttgactgccacttcctcgatggaaggttttactgccaagggacattctgggaccaagaaaaattaatgaagtttcttcttctgatgataaggatgcctttctatgtgagcagacctcgggagacattctaaagaaaacatctgaggtggttaaaagctctcccctcggtgtcacccccctttttatgcagtcaaatgtaattaatagcacagccatcgtgaagacccttgctgctaccgggacaggatttgactgtgctagcaagactgatatacagttgtgtgcagagtctcggggggtgcctccagagaggattatctatggcaaatcctttgtaaaacaagtatctcaaattaagtatgctgctaataatggagtccagatggatgactttttgatagtgaagttgagttgatgaaagtttgccagaggcacattcccaaaggcaaaagtttgggttttgcggattgcccactgatgattccaaagcagtctgtcgtctcagtgtgaaattcggtgccacgctcagaaccagcaggctccttttggaacgggcgaaagagctaaatatcgatgttgttggtgtcagcttccatgtaagaagcggctgtaccgatcctgagaccttcgtgcaggcaatctctgatgcccgctgtgtttttgacatgggggctgaggttggtttcagcatgtatctgcttgatattggcggtggctttcctggatctgaaggatgtgaaaccttaaatttgaagagatcacccggccgtaatcaacccaacctttggacaaatactttcccgtcaaactcttggaattgaaaatcataacttgaacccggcaagatactatgttgcatcaactttcaangctttgcagttaatatcatttgccaagaaaatttgtattaaaaggaaccagacgggctcctgatgaccgaagattgagtccgagttgagcagacctttaatgtattaatgtgaatgaatggcgtctatggatcatttaattgcatactctatgaccacgcacatgtaaagccccttctgcaaaaagagacctaaacccagatgaaggaggtattattcatccagcatatggggaccaacatgtgatggcctcgatcggattgttgagcgctgtgaccttgcctgaaaatgcatgtgggggattgggatgctctttgaaaacatgggcggcttacactgttggctgctgcctctaacgttccaatgcttccaagaggcccgacgatctactatgtgatgtcaggggcctgcgtggcaacctcattcagcaattccaaaacccccggctttccccccggaagtaggaggnaaccaggatgcccagcaccctgccctgtgttctgtgcctggggagagtgggatgaaacgcaccagagccagccctgtgccttccggctaagtattaaaggtggtagatagcactctggtagctggttaactgccaagtttaagctgaaattaagggatttgtggaggaccattgttacttaatttactgctagttttgaaatgtctttgtaagagtaggggtcgccatgatgcagccatatggaagaataggatatgggtccccacttatctgtgctctcctatggaaactaattgaaaaatttgttttatatgggatttttattcactcttcagacacgctactcaagagtgcccctcagctgctgaacaagcatttgtagcttgctacaatggcagaatgggccaaaagccttagtgttgtgacctgtttttaaaataaagtatcttgaaataaaaaaaaaaaaaaaaaaaaaaaaaagggcggccgct

SEQ ID NO: 152343 - DNA, 935 bp, Homo sapiens
catttaccatactttattgatattatctgcttttatttttctcataatcagattatatactcttcaaggactacactgtatcttcatcttttaccccacatcctatcaaaattgtcctttagaggagaaaaaaaacaaaatattaaaatgtgctgattgaaggctgggtgtcatggctcatgcctataattgcagcactttaggaggctgaatcaggaggagcacttgagcccaggagttccagcccaccctaggcaacatggtaaaaccctgtctctacaaaaaagtatatacaaaaattagctgggtgtggtgacacttgcctgtagtcccagctactcgggaggctgaggtgggagaattacttaaggattacttaagcctgggagatcaaggctgcagtgaaccatgattgcaccactgcactccagcctgagtgacagagcaagaccctgtctctaaaaatatatataaaaagtaaaactaaagaacttcttgcctaaacctgaattaccgcaatttgctgagtgactttgagaaaaatcagactgtttagttcagtcggggatgaaaagcttgcgattgctttcccaccaagaatgggcaatagtgacggctgcaaggtacttttatttgttcatgaaagaacgacaatttttcaaaatgtaattaaacataatagaatgttttaaactactgggcactgaaactggaagaaaaaggaggctttattgaacattcccctttttcagttggttcaaagttcagcactgtggttatcattcggtgatgccagaaaccattagtagacttagacaattgctatggcagtttctaaaccagagctttttctatacactattttgcaactggagtgcaatattgtatattctgtgttaaagaaataaagtatttttatcatttattaaaaaaaa

SEQ ID NO: 152344 - DNA, 889 bp, Homo sapiens
ttttcagattgtgactcaaagatgagatttttatttaaaaatcattcaaaggtgaaacacagcaacagcaatataatgaagtttaaagtccctgtcctcaatgaatgtacaatgcagttgggaacaaaaacaatgattattaaagtgctagttaagtcttatttttaaagagaccctatcttgtccaggatgcagtgctgtggctattcacagacgatcatatcacactccaccctcgaactcctgggctcaagctatcctaccacctcagcctcctgagtacgctgggactgtacataggcatgcaccactgcacctgggctcataagacttggataatttataaaataattctacagcctcttccttactcttcccctttatttattccaactggcatatgctcttttcctggtgagtgagtcgtctacagtgttttctggtggataatgcatcccgatcaaccagagaaaaaacagtgagaaaaatctgtgttctgttgcaatccctctgtgatttgtctaatacaatagatgtgggtggtacccctcgcagagaaaatagtattcgctttccttgtctccttgatacaggttacaaaatatccattgtcaagaatattcaaagaataaagtattagggagaaagtaaaatcccctgaactcccaacaaaaccacttttaacgttttggtgcccatactttcatgtatttcttgattcatggacaccccaaatatttatgtaaatcttaacatacatttttaaataaaattgtactacacaatcagtacaacatgctttggagaatagacacaagctaaaacaacaacaaaaaaagaaaacattgcatttaaaaaaaattttttttaataaaaaagttggcggccg

SEQ ID NO: 152345 - DNA, 1098 bp, Homo sapiens
aaatttatttcccagtttactcccctcgctcaaactccgcgcccctctcgctccgagagacataggtctcgcgagatctttggtaaacttacagaaccggaagcagcgtgtagttctcttcccttttgcggccatcaccgaagcgggagcgggtaaggattcggcgggcaagcgggtgtaatcagcagccatccgttcttgggcatgggggcttccgaccgcggggaccccgagagtctcttgtcggccgagtagcagccaggaaggagagactgggatggttttttatctgttgctttcttaaatcaagggccgccgggccggagatggatggagggaccggggatttgggaactcgaaaacgagctgagggaagggagcctgtggaaatagactggagtctgggtagtgtcgtttcctagagaatggtctcgaagtaacttctcggtaaagtcttcacggaatttccagaccacacttgcccactgggaggcttttaggacccgagacgtgtgcaggcttttccaggttcggccaaaatgaaagtttaaccccctttgtgacttccgaccgagagcaagaatcgcacaaaggcatttcaaagcacccttcccacatttcgaaggaaagattatgtcttcccctctttccaaagagcctgagacaggatgtacaactgtgcggatccgatgcccgatcctgaaaggatgagtgaagttcaggttgtaccgtggacacctttaagggtccgccaaattggccaaagtagtccagggtttacaggaagaaatatgttatctacattgaacgggctgcagcgggaaaaggcttaatggcacaactgttccacgtagggcatttcacccccagcaagcaggtggttatcacctagggctaaaactgggaccaaagacccgcaaaaagatccctccgaaccggaaagcccaaatctcgcccaagtagggaaagggaaaaggggcaaatacaaggagagaacccattgagaagatgcaggaataaagtaacctcttgtaacaagctttgattcgaaacttgaaacgtcgacggcggccgcgattttagttatagtagtcggcg

SEQ ID NO: 152346 - DNA, 532 bp, Homo sapiens; identical to SEQ ID NO: 114249

SEQ ID NO: 152347 - DNA, 249 bp, Homo sapiens; identical to SEQ ID NO: 114250

SEQ ID NO: 152348 - DNA, 560 bp, Homo sapiens
tcccctataactgggtaagttacacttcacttcctctcctaaacttgctttttataaattacattatagttcacagacatatgtttgtgtactgagtacaatacaagataaacagtcaagaatccaaatcattctatttgaagctgctggtggccttttaaaatgtactgtctatccactaattgtccaataatggcatcctttcacaaaacacagtaacattacgatctttaaaaaccacacagtgaaagtaaatatttcatactacatattaacgtgaaataaaaatggtgaaataactctataatgccatgtcaagaagttattctttactcactagctcagctcaacatggattcaccttccttttaatcccaattaaagaatgcaaaattcaatctttctcgtcctcttcctccaaatgtttactgagataagggacaatatgtcacctcccaattataccaaaatgcagcacagccaatcttcaaacaagcatttgcagagacgtgtgcacatcatacaaacactatccaggatcaagctcctagaagaatcaa

SEQ ID NO: 152349 - DNA, 2015 bp, Homo sapiens
  misc_feature (1)...(2015): n = a,t,c or g
cgcctcctcgctcccgccaccgccggacttcaatgcccagtccccagctcgccagcnagcttgatcctggatagtgtttgtatgatgtgcacacgtctctgcaaatgcttgtttgaagattggctgtgctgcattttggtataattgggaggtgacatattgtcccttatctcagtaaacatttggaggaagaggacgagaaagattgaattttgcattctttaattgggaagaaaaggaaggtgaatccatgttgagctgagctagtttttcgttggaatatacgttgcacatttatggcgattctgagtgtgagggcagacttctgccaggctcagcacatcattttcgctgacaagtgaagtttggaggttctatgtgccataattaacattgccttgaagactcctggacaccgagactggcctcagaaataagttggcttttttttttttttaattgcaagcatatttctttttaatgactcccagtaaaaattaagcatcaaggtaaaacaagtggaaaagtgacctacaatttttaaacttgtctcactagtgcctaaaatgtagtaaaaggctgctttaagttttgtattgtaagttggatttttttggagtccgaaggtattccatctgcaggaaattgagggcccaaattggaatttgggatttcaagtgggattcctaaatactttggcttatccttgaaggagaggaagcttcataaggaataaacaaagttgaatagagaaaacactggattgataataaggcaattttaagtggtccttttaatggttttcctgctgtgaaacaattttccagatttattgaatttttttttttcacctttccccatcacactcacacgcacgctcacactttttatttgccataatgaaccgtccagcccctgtggagatctcctatgaagaacatgcgttttctgataactcacaaccctaccaatgctactctcaacaagttcacagagggaacttaaggaagtatgggagtgacggactttgggttcggagtttgtggatggctacatatggataaaggctccagtttggaaaaaggagggattccacgttctaggattgggccatttggatgatgggagctccacccccttaattcagatagtaggatggattgggtttaaacctgtttaaaaaaccaaattttcgtgtaagagccacggttgctgtgttggcagtgcattgtgttggcagggttggggaaggggcaccggtgctgggttggcacttgctttggattggaatgtgggaatgaagtaacgaagatgcagttcagtttataagacaaaaaagaaggggagcgttcaattccaaacagctgctttatttggagaaataccgacctaagatgcgattacgcttcagagataccaatgggcattgctgtgttcagtagaaggaaatgtaaacgaaggctgacttgattgtgccatttagagggaactcttggtacctggaaatgtgaatctggaatattacctgtgtcatcaaagtagtgatggattcagtactcctcaaccactctcctaatgattggaacaaaagcaaacaaaaaagaaatccctctataaaatgaataaaatgtttaagaaaagagaaagagaaaaggaattaattcagtgaaggatgattttgctcctagttttggagtttgaatttctgccaggattgaattattttgaaatctcctgtctttttaaactttttcaaaataggtctctaaggaaaaccagcagaacattagcctgtgcaaaacctactgtttggggagcacactcttggcacatagatctccctgtggtgggatttttttccctttttttgtgggggagggttggtggtatatttttcccctcttttttccttcctctcctacatctcccttttcccccgatccaagttgtagatggaatagaagcccttgttgctgtagatgtgcgtgcagtctggcagccttaagcccactccg

SEQ ID NO: 152350 - DNA, 1749 bp, Homo sapiens
  misc_feature (1)...(1749): n = a,t,c or g
cggacgcgtgggtttttttttcgccggaaatcccggaagtgacagctttgggggtttgctgctgggtctgactcccgtcctgcgatgggttgctgacgggggaacaatccccaagaggcatgaacctggtgaaggggccgaagaaggttgagaaggtcgacaaagatgactgaattagtggcccaatggaactattgtactctaagttcaggaaatattaagacgaccaatagttgcctgtgaacttggcagactttataacaaagatgcccgtcattgaatttctcttggacaaatctgcagaaaaggctcttgggaagggcagcatctcacattaaaacgcattaacgaattgttgacagagctgaaagctttctgataatccctgccctgggaaggggataaagggaaacactaaaggtgacaaagcacgatgacctccaagcgggcgcgtntttcatcttcccccgttggtgggcctgggagatggaacggccgacacaggttcttgcttccttcgggtggttgcggcttgtgttgtttttcttgagcggagccttggaaagagataaaagcggaattttgccacacgtgtggggctggcctttccaggaggatgatgataatcgtgctcaatggcaccaaggaggatgtggacgtgctgaagacaaggatggaggagagaaggctgtagagcgaagttttaaaagaatatcaaagaaacccaaggcagcagagtctgtttccaaaacccagatgtcagtggaaggaagccccagggcccatcaaaagttaagaccagggaagccctgaagaagcccagcccttgattctagagagaagaaaaccaacttggctcccaaaagcacagcaatgaatgagagctcttctggaaaagctgggaaagcctccgtgtggagccacaaagaggtccatcgctgaccagtgaaaaatcggaagcctaacaaatccctctttaccactcacagcttccgccaaagcgctcccaaggagggagtctgccccactggggttcaccccacacgtcctacttgcttctgaagccccgcactgccaccggctcctgccccagaaggttgtttaagtttccacgtagggcaggttcgtttgtgcctctgagttgcgctgcttgtgtgttcttttctattagtttttgttgttcataaaaggtgttcctgggccagccttcaagctgggtgtggcccactctttgatgtgagggcgtgttcggttcccaggggggggacatggggaggggcttgcacagtggccccgaaggtccatgccttgccttcccaccctgccaggtgccatttggtccctttccccatggccccagggaaccgctgtggggctgcacctttttatgccttgccagtaacaagagactcccagagtccctcaccggtgcaagagttggcacatattaattaactaaaattcctaatgatccttgctaccagcaataaaatcaagtaggcccaagtgaaactgggctttaaaaaggatggattttaaaaacccctgtgcccactagaagcttcggaagggcctcgtccctctgctacagccctgggaggagccaggatccttgttggtctagctaaatactgttaggggagtgtgccccatctcatcattctcgaagatagcagagtcatagttgggcacccggtgattgggttcaaaaataaagactggtctgcctcttctcaaaaaaaaaaaaaa

SEQ ID NO: 152351 - DNA, 467 bp, Homo sapiens
  misc_feature (1)...(467): n = a,t,c or g
tggtttannaaactgagacatttgaaagcgctgtggaattcctgccacccaggtaagaagaggccgctcttcctggggttgtttctccgtgtgacgtgtggcctttgagatcaactctcctgtaccagcgtaggccgcatgagtggggggcgggctcccgcggtcctgctcggcggagtggggcattcttcgggggtgcatcagagggagggcagagcctgaggatctaagcgaaggcttccccgggtgtaatttcctgggctgtttgtgaggagagatcgaattcgcctcctgctctcaggcctctctgctcctgtcttttgtttggatgccggcgctgctgcctgtggcctcccgccttttgttgctaccccgagtcttgctgaccatggcctctggaagccctccgacccagccctcgccggcctcggattccggctctggctacgttccgggctcggtctctg

SEQ ID NO: 152352 - DNA, 361 bp, Homo sapiens; identical to SEQ ID NO: 134720
  misc_feature (1)...(361): n = a,t,c or g

SEQ ID NO: 152353 - DNA, 455 bp, Homo sapiens; identical to SEQ ID NO: 134721

SEQ ID NO: 152354 - DNA, 432 bp, Homo sapiens; identical to SEQ ID NO: 134722

SEQ ID NO: 152355 - DNA, 885 bp, Homo sapiens; identical to SEQ ID NO: 134723
  misc_feature (1)...(885): n = a,t,c or g

SEQ ID NO: 152356 - DNA, 935 bp, Homo sapiens
  misc_feature (1)...(935): n = a,t,c or g
acatggtgcgcgctgttttctaatcacgtggctgccacccaggtaagaagaggccgctcttcctggggttgtttctccgtgtgacgtgtggcctttgagatcaactctcctgtaccagcgtaggccgcatgagtggggggcgggctcccgcggtcctgctcggcggagtggtgagtgaccggccccgccccgccccttccggtcctcgaagcctcgaccgctacccgcaccctaaatcccagaggttgggccccctgaggtgcctctctgctcctgtcttttgtttggatgccggcgctgctgcctgtggggcttcccgcctttttgtttgctaaccccgagtctttgttgaccatgggcctctgggaagccctccngacccaagccctcgcccggcctcggattccggctctggctaacgttccgggctcggtctctgcaagcctttgttactttgccccaacgagaaaggttcgccaagggagatcgccaggggccgtgggtgggagaaggcgcttagcaagcctgcgttcaaccttcatcccctcagattaccatcccatctatgaagtggaaaagggaaagattcgagggaagacagttgaggttgctggatggatggatttaaaacccaaaagtttccttgggttcccagcttttggacagattttgtttcgttctgtggcaccttacgaagtgggccgaggtaattggcattgcctgtggaacagggggaactttccgtacctgcagtgggtgcgccaggtcacagagtcagtttctgactctatcacaattcttgccatgatgagccctgttcctgctcatcatgaagatccccgcgatacttcaaaggctttcttgactttccaggtgatgacttgggcccccaataaatcccgtctttgggtcaaaaaaaaaaaaaaaagtcgacg

SEQ ID NO: 152357 - DNA, 625 bp, Homo sapiens
cccacgcgtccgcagaaaaggagcactgtgcatacttaccttggaacaacatgtgcaactgggaaagccaggacacatggtcttactagttggtgtaaaatttgccaaagtccacaaaattagcaagtgacacagcagagctttaaattataatattttagaacacacactcttaatagttataatgatactctcttggtagtgggttatgagtttggttaatgactagacctctctgagtggtatgttcctcgtggatacaaatggtgttgctgagaaattgattactaaagcacttaattaataatatgatggttagtaaaacaacatggctgggggtgttggctcacacctgtaatccaagcagaattttttgggaggcagaggtgggaggatctcttgaggccaggagtttgaagccagtttgggcaacatgggaagaccctgtctctacaaaaatagacaaaaaaccaattagctgggcatggtgatgtgtgcctgtagtcccggctaactacaaggctgaggtgagatgatctcctgagctagggaggttgaggctgcagtgagcccatgattatgccactgcactccagcctctgggtgacagagcaagacctattaa

SEQ ID NO: 152358 - DNA, 1401 bp, Homo sapiens
cctagaatacatgatgttttatgcagctgaacaggacaaccctgaaaagacaagaattatggtaataccaaagtgactaaggttgtcttgattccccgcccccaccacaattatgaatcaaaagatggagtctttttttttttttttttaaggtaaataccctctttagctgagtccaagactttggatattagattactgtacctaaaaagagtaaaatggtggccaggcggtggctcacgcctgcaatcccagcactttgggaggccaatggagggtggatcatctgaggtcaggagttcgagaccagcctggccaacgtggtgaaaccccatctctactaaaaatacaaaaattagccgggcgtggtggtgcacgcttgtggtcccagctactcaggaggctgaggcaggagaatcgcttgaacctaggaggtggaggttgcagtgagccaagatggcacccactgcattcctgcctggggcaacaagaaagagtaaaatggtaactatgcacaaaggatgggggaaaggtggctcacagggcttaaacatcagaggaatggagaggacaggacagtgagggaattatctggaaggtaggtaactggattgagaaccacaaaaagcatgtagatttaagcagattacgagtcattttaaacagctgtttcaaagtgagagtaaaaacaggctggagaaaatcttgggtaatattagagtaacatagtctaggataggaatccatcagttatggagatcagaggtaagatatagtcagggaaattaggattcatgcttgaagagtaatagaaaaacctaagtgaaacaggttattggaattttctttatgaagaataaaagtggaagaactgatagtctggaaaggtgaagtaatctggagtaggcagctacaaaaggtataaaatttgtggagaaggcaaaaattggggcagaaaatattaaataacaagggagtactgcagtcctctggtgggaggtagatcataaagaatctgtagaaccatttacttttcctcacagtcaactgctcttacacccagagcagtagctgtcaagtcaattttattgaaaatacgctggacttggacatcctgagtcaagctgccatcacctaaagggcctggatttaaaaggaattttcaagattattgttaacttctgggttaagtgtttagggaaaaaaatgttaaatctacttttcttatacatgattggtgtgcttagttttttatcaatttgacactacagtccaaatttgcttctgatcacactagaatagttttaccaatgttcattatttttcaacttcctttattaagaattaaggctggttgggcgcagtggcgaatgccaccgaactggactagtggtctacaat

SEQ ID NO: 152359 - DNA, 792 bp, Homo sapiens; identical to SEQ ID NO: 111107
  misc_feature (1)...(792): n = a,t,c or g

SEQ ID NO: 152360 - DNA, 510 bp, Homo sapiens
accttcctgctcatggccgcctccatctatctccacgacaagaacccggatgccgccctgcgtgcgctgcaccagggggacagcctggagtgcacagccggaaggagctgaagagaatgcaggacctggacgaggatgccaccctcacccagctcgccactgcctgggtcagcctggccacggatagtggctacccagagacgctggtcaacctcatcgtcctgtcccagcacctgggcaagccccctgaggtgacaaaccgatacctgtcccagctgaaggatgcccacaggtcccatcccttcatcaaggagtaccaggccaaggctggtgctacagtacgctcccagcgcctgaggctggcccagagctgtcaggaccatgaagccaggacagaggccaggagccagccctgcagccctccccacccggcatccacctgcatcccctctgggggcaggagcccacccccagcacccccatctgttaataaatatctcaactccaaaa

SEQ ID NO: 152361 - DNA, 1232 bp, Homo sapiens
  misc_feature (1)...(1232): n = a,t,c or g
ggcacgaggcaggaagaggagctggtgagaagacagcgaaatggcgcctccggcccccggcccggccgtccggcggctccggggaggtagcacgagctgttcgacgtaaagaacgnccttctacatcggcagctaccagcagtgcataaacgaggcgcagcgggctgaagctatcaagcccagagagagacgtggtagagggacgtcttcctgtatagagctgtacctggcgcagaggaaagttcgggtgtggccctggatgaagatcaaagccctccttggacccttgacttccaaggccgtgcgcaattgtttgctgactaccctcgcccacgagaattcggagggacaagcatcgttggccgagcttggaccgagagattgagcaggagcgttggacgttgaccaaaaccaactttcctggttaatggcgcccttcatttaatttcaagaaccagaaccccggattggccccctgcgtgggctgcaccaggggaacaggcctggagttcacaccaatgacagttgaagttcttgctgaaagcggaaccgccttgaacttcgccggaaaggagctgaagagaatgcaggacctggacgagggatgccaccctcacccagcctcgccactgcctgggtcagcctggccaccgggtggtgagaagctgcagggatgccttactacatcttccagggagatggctgcacaagtgcttcgccccaacccttgctgcttgctcaattgggcaaggcggccttgccacaatggccccagggcccgctggggagcccgctgagggcctgctgcagggaggcgcttagacaaggatagtggcttacccagagacgcttggtcaacctcattcgtcctgtcccaagcaaccttggcaagccccctgaaggtgacaaacgcgatacctgtcccaagctgaaggatgcccacaaggtcccatcccttcatcaaggaagtaccaaggccaaaggagaacgacttttgacaggctggtgctacagtacgcttcccaagcgcctgaggctggcccagagctgtcaggaccatgaagccaggacagaggccaggagccaggccctgcagccctccccacccggcatccaacctgcattcccttctgggggcaggagcccacccccagcacccccatctgttaataaatatctcaactccgagggtgttccacctgaaaaaaaagcaaagcatataattttacaac

SEQ ID NO: 152362 - DNA, 359 bp, Homo sapiens
cacatccatgctgggatgcacagttcttttcctaaggattgtgtttactcctgactgcaacgtcttggccactgtttggagcagtttggtctgaaggtcattaaggatctgcttgcatcttgtatcatgtccttcgttacagactgtaaagcatgttataatacaggtatgcttttttactctgattattgataatttgtatattatttctaatattattgcttctttttatgttctctctttttttctatctgtttattaatgtattttaatatttttttctttttaattttatgtttgattgttatatattattactatcattttattttattattttatatcattacttttgattt

SEQ ID NO: 152363 - DNA, 12517 bp, Homo sapiens
ctaccgggcggaggtgagcgcggcgccggctcctcctgcggcggactttgggtgcgacttgacgagcggtggttcgacaagtggccttgcgggccggatcgtcccagtggaagagttgtaaatttgcttctggccttcccctacggattatacctggccttcccctacggattatactcaacttactgtttagaaaatgtggcccacgagacgcctggttactatcaaaaggagcggggtcgacggtccccactttcccctgagcctcagcacctgcttgtttggaaggggtattgaatgtgacatccgtatccagcttcctgttgtgtcaaaacaacattgcaaaattgaaatccatgagcaggaggcaatattacataatttcagttccacaaatccaacacaagtaaatgggtctgttattgatgagcctgtacggctaaaacatggagatgtaataactattattgatcgttccttcaggtatgaaaatgaaagttcttcagaatggaaggaagtcaactgaatttccaagaaaaatacgttgaccggcgcccagcacgtcgtgtctcaagatctagcttctcttctgaccctgatgagaaagctcaagattccaaggcctattcaaaaatcactgaaggaaaagtttcaggaaatcctcaggtacatatcaagaatgtcaaagaagacagtaccgcagatgactcaaaagacagtgttgctcagggaacaactaatgttcattcctcagaacatgctggacgtaatggcagaaatgcagctgatcccatttctggggattttaaagaaatttccagcgttaaattagtgagccgttatggagaattgaagtctgttcccactacacaatgtcttgacaatagcaaaaaaaatgaatctcccttttggaagctttatgagtcagtgaagaaagagttggatgtaaaatcacaaaaagaaaatgtcctacagtattgtagaaaatctggattacaaactgattacgcaacagagaaagaaagtgctgatggtttacagggggagacccaactgttggtctcgcgtaagtcaagaccaaaatctggtgggagcggccacgctgtggcagagcctgcttcacctgaacaagagcttgaccagaacaaggggaagggaagagacgtggagtctgttcagactcccagcaaggctgtgggcgccagctttcctctctatgagccggctaaaatgaagacccctgtacaatattcacagcaacaaaattctccacaaaaacataagaacaaagacctgtatactactggtagaagagaatctgtgaatctgggtaaaagtgaaggcttcaaggctggtgataaaactcttactcccaggaagctttcaactagaaatcgaacaccagctaaagttgaagatgcagctgactctgccactaagccagaaaatctctcttccaaaaccagaggaagtattcctacagatgtggaagttctgcctacggaaactgaaattcacaatgagccatttttaactctgtggctcactcaagttgagaggaagatccaaaaggattccctcagcaagcctgagaaattgggcactacagctggacagatgtgctctgggttacctggtcttagttcagttgatatcaacaactttggtgattccattaatgagagtgagggaatacctttgaaaagaaggcgtgtgtcctttggtgggcacctaagacctgaactatttgatgaaaacttgcctcctaatacgcctctcaaaaggggagaagccccaaccaaaagaaagtctctggtaatgcacactccacctgtcctgaagaaaatcatcaaggaacagcctcaaccatcaggaaaacaagagtcaggttcagaaatccatgtggaagtgaaggcacaaagcttggttataagccctccagctcctagtcctaggaaaactccagttgccagtgatcaacgccgtaggtcctgcaaaacagcccctgcttccagcagcaaatctcagacagaggttcctaagagaggaggagaaagagtggcaacctgccttcaaaagagagtgtctatcagccgaagtcaacatgatattttacagatgatatgttccaaaagaagaagtggtgcttcggaagcaaatctgattgttgcaaaatcatgggcagatgtagtaaaacttggtgcaaaacaaacacaaactaaagtcataaaacatggtcctcaaaggtcaatgaacaaaaggcaaagaagacctgctactccaaagaagcctgtgggcgaagttcacagtcaatttagtacaggccacgcaaactctccttgtaccataataatagggaaagctcatactgaaaaagtacatgtgcctgctcgaccctacagagtgctcaacaacttcatttccaaccaaaaaatggactttaaggaagatctttcaggaatagctgaaatgttcaagaccccagtgaaggagcaaccgcagttgacaagcacatgtcacatcgctatttcaaattcagagaatttgcttggaaaacagtttcaaggaactgattcaggagaagaacctctgctccccacctcagagagttttggaggaaatgtgttcttcagtgcacagaatgcagcaaaacagccatctgataaatgctctgcaagccctcccttaagacggcagtgtattagagaaaatggaaacgtagcaaaaacgcccaggaacacctacaaaatgacttctctggagacaaaaacttcagatactgagacagagccttcaaaaacagtatccactgtaaacaggtcaggaaggtctacagagttcaggaatatacagaagctacctgtggaaagtaagagtgaagaaacaaatacagaaattgttgagtgcatcctaaaaagaggtcagaaggcaacactactacaacaaaggagagaaggagagatgaaggaaatagaaagaccttttgagacatataaggaaaatattgaattaaaagaaaacgatgaaaagatgaaagcaatgaagagatcaagaacttgggggcagaaatgtgcaccaatgtctgacctgacagacctcaagagcttgcctgatacagaactcatgaaagacacggcacgtggccagaatctcctccaaacccaagatcatgccaaggcaccaaagagtgagaaaggcaaaatcactaaaatgccctgccagtcattacaaccagaaccaataaacaccccaacacacacaaaacaacagttgaaggcatccctggggaaagtaggtgtgaaagaagagctcctagcagtcggcaagttcacacggacgtcaggggagaccacgcacacgcacagagagccagcaggagatggcaagagcatcagaacgtttaaggagtctccaaagcagatcctggacccagcagcccgtgtaactggaatgaagaagtggccaagaacgcctaaggaagaggcccagtcactagaagacctggctggcttcaaagagctcttccagacaccaggtccctctgaggaatcaatgactgatgagaaaactaccaaaatagcctgcaaatctccaccaccagaatcagtggacactccaacaagcacaaagcaatggcctaagagaagtctcaggaaagcagatgtagaggaagaattcttagcactcaggaaactaacaccatcagcagggaaagccatgcttacgcccaaaccagcaggaggtgatgagaaagacattaaagcatttatgggaactccagtgcagaaactggacctggcaggaactttacctggcagcaaaagacagctacagactcctaaggaaaaggcccaggctctagaagacctggctggctttaaagagctcttccagactcctggtcacaccgaggaattagtggctgctggtaaaaccactaaaataccctgcgactctccacagtcagacccagtggacaccccaacaagcacaaagcaacgacccaagagaagtatcaggaaagcagatgtagagggagaactcttagcgtgcaggaatctaatgccatcagcaggcaaagccatgcacacgcctaaaccatcagtaggtgaagagaaagacatcatcatatttgtgggaactccagtgcagaaactggacctgacagagaacttaaccggcagcaagagacggccacaaactcctaaggaagaggcccaggctctggaagacctgactggctttaaagagctcttccagacccctggtcatactgaagaagcagtggctgctggcaaaactactaaaatgccctgcgaatcttctccaccagaatcagcagacaccccaacaagcacaagaaggcagcccaagacacctttggagaaaagggacgtacagaaggagctctcagccctgaagaagctcacacagacatcaggggaaaccacacacacagataaagtaccaggaggtgaggataaaagcatcaacgcgtttagggaaactgcaaaacagaaactggacccagcagcaagtgtaactggtagcaagaggcacccaaaaactaaggaaaaggcccaacccctagaagacctggctggctggaaagagctcttccagacaccagtatgcactgacaagcccacgactcacgagaaaactaccaaaatagcctgcagatcacaaccagacccagtggacacaccaacaagctccaagccacagtccaagagaagtctcaggaaagtggacgtagaagaagaattcttcgcactcaggaaacgaacaccatcagcaggcaaagccatgcacacacccaaaccagcagtaagtggtgagaaaaacatctacgcatttatgggaactccagtgcagaaactggacctgacagagaacttaactggcagcaagagacggctacaaactcctaaggaaaaggcccaggctctagaagacctggctggctttaaagagctcttccagacacgaggtcacactgaggaatcaatgactaacgataaaactgccaaagtagcctgcaaatcttcacaaccagacctagacaaaaacccagcaagctccaagcgacggctcaagacatccctggggaaagtgggcgtgaaagaagagctcctagcagttggcaagctcacacagacatcaggagagactacacacacacacacagagccaacaggagatggtaagagcatgaaagcatttatggagtctccaaagcagatcttagactcagcagcaagtctaactggcagcaagaggcagctgagaactcctaagggaaagtctgaagtccctgaagacctggccggcttcatcgagctcttccagacaccaagtcacactaaggaatcaatgactaatgaaaaaactaccaaagtatcctacagagcttcacagccagacctagtggacaccccaacaagctccaagccacagcccaagagaagtctcaggaaagcagacactgaagaagaatttttagcatttaggaaacaaacgccatcagcaggcaaagccatgcacacacccaaaccagcagtaggtgaagagaaagacatcaacacgtttttgggaactccagtgcagaaactggaccagccaggaaatttacctggcagcaatagacggctacaaactcgtaaggaaaaggcccaggctctagaagaactgactggcttcagagagcttttccagacaccatgcactgataaccccacagctgatgagaaaactaccaaaaaaatactctgcaaatctccgcaatcagacccagcggacaccccaacaaacacaaagcaacggcccaagagaagcctcaagaaagcagacgtagaggaagaatttttagcattcaggaaactaacaccatcagcaggcaaagccatgcacacgcctaaagcagcagtaggtgaagagaaagacatcaacacatttgtggggactccagtggagaaactggacctgctaggaaatttacctggcagcaagagacggccacaaactcctaaagaaaaggccaaggctctagaagatctggctggcttcaaagagctcttccagacaccaggtcacactgaggaatcaatgaccgatgacaaaatcacagaagtatcctgcaaatctccacaaccagacccagtcaaaaccccaacaagctccaagcaacgactcaagatatccttggggaaagtaggtgtgaaagaagaggtcctaccagtcggcaagctcacacagacgtcagggaagaccacacagacacacagagagacagcaggagatggaaagagcatcaaagcgtttaaggaatctgcaaagcagatgctggacccagcaaactatggaactgggatggagaggtggccaagaacacctaaggaagaggcccaatcactagaagacctggccggcttcaaagagctcttccagacaccagaccacactgaggaatcaacaactgatgacaaaactaccaaaatagcctgcaaatctccaccaccagaatcaatggacactccaacaagcacaaggaggcggcccaaaacacctttggggaaaagggatatagtggaagagctctcagccctgaagcagctcacacagaccacacacacagacaaagtaccaggagatgaggataaaggcatcaacgtgttcagggaaactgcaaaacagaaactggacccagcagcaagtgtaactggtagcaagaggcagccaagaactcctaagggaaaagcccaacccctagaagacttggctggcttgaaagagctcttccagacaccagtatgcactgacaagcccacgactcacgagaaaactaccaaaatagcctgcagatctccacaaccagacccagtgggtaccccaacaatcttcaagccacagtccaagagaagtctcaggaaagcagacgtagaggaagaatccttagcactcaggaaacgaacaccatcagtagggaaagctatggacacacccaaaccagcaggaggtgatgagaaagacatgaaagcatttatgggaactccagtgcagaaattggacctgccaggaaatttacctggcagcaaaagatggccacaaactcctaaggaaaaggcccaggctctagaagacctggctggcttcaaagagctcttccagacaccaggcactgacaagcccacgactgatgagaaaactaccaaaatagcctgcaaatctccacaaccagacccagtggacaccccagcaagcacaaagcaacggcccaagagaaacctcaggaaagcagacgtagaggaagaatttttagcactcaggaaacgaacaccatcagcaggcaaagccatggacaccccaaaaccagcagtaagtgatgagaaaaatatcaacacatttgtggaaactccagtgcagaaactggacctgctaggaaatttacctggcagcaagagacagccacagactcctaaggaaaaggctgaggctctagaggacctggttggcttcaaagaactcttccagacaccaggtcacactgaggaatcaatgactgatgacaaaatcacagaagtatcctgtaaatctccacagccagagtcattcaaaacctcaagaagctccaagcaaaggctcaagatacccctggtgaaagtggacatgaaagaagagcccctagcagtcagcaagctcacacggacatcaggggagactacgcaaacacacacagagccaacaggagatagtaagagcatcaaagcgtttaaggagtctccaaagcagatcctggacccagcagcaagtgtaactggtagcaggaggcagctgagaactcgtaaggaaaaggcccgtgctctagaagacctggttgacttcaaagagctcttctcagcaccaggtcacactgaagagtcaatgactattgacaaaaacacaaaaattccctgcaaatctcccccaccagaactaacagacactgccacgagcacaaagagatgccccaagacacgtcccaggaaagaagtaaaagaggagctctcagcagttgagaggctcacgcaaacatcagggcaaagcacacacacacacaaagaaccagcaagcggtgatgagggcatcaaagtattgaagcaacgtgcaaagaagaaaccaaacccagtagaagaggaacccagcaggagaaggccaagagcacctaaggaaaaggcccaacccctggaagacctggccggcttcacagagctctctgaaacatcaggtcacactcaggaatcactgactgctggcaaagccactaaaataccctgcgaatctcccccactagaagtggtagacaccacagcaagcacaaagaggcatctcaggacacgtgtgcagaaggtacaagtaaaagaagagccttcagcagtcaagttcacacaaacatcaggggaaaccacggatgcagacaaagaaccagcaggtgaagataaaggcatcaaagcattgaaggaatctgcaaaacagacaccggctccagcagcaagtgtaactggcagcaggagacggccaagagcacccagggaaagtgcccaagccatagaagacctagctggcttcaaagacccagcagcaggtcacactgaagaatcaatgactgatgacaaaaccactaaaataccctgcaaatcatcaccagaactagaagacaccgcaacaagctcaaagagacggcccaggacacgtgcccagaaagtagaagtgaaggaggagctgttagcagttggcaagctcacacaaacctcaggggagaccacgcacaccgacaaagagccggtaggtgagggcaaaggcacgaaagcatttaagcaacctgcaaagcggaacgtggacgcagaagatgtaattggcagcaggagacagccaagagcacctaaggaaaaggcccaacccctggaagacctggccagcttccaagagctctctcaaacaccaggccacactgaggaactggcaaatggtgctgctgatagctttacaagcgctccaaagcaaacacctgacagtggaaaacctctaaaaatatccagaagagttcttcgggcccctaaagtagaacccgtgggagacgtggtaagcaccagagaccctgtaaaatcacaaagcaaaagcaacacttccctgcccccactgcccttcaagaggggaggtggcaaagatggaagcgtcacgggaaccaagaggctgcgctgcatgccagcaccagaggaaattgtggaggagctgccagccagcaagaagcagagggttgctcccagggcaagaggcaaatcatccgaacccgtggtcatcatgaagagaagtttgaggacttctgcaaaaagaattgaacctgcggaagagctgaacagcaacgacatgaaaaccaacaaagaggaacacaaattacaagactcggtccctgaaaataagggaatatccctgcgctccagacgccaagataagactgaggcagaacagcaaataactgaggtctttgtattagcagaaagaatagaaataaacagaaatgaaaagaagcccatgaagacctccccagagatggacattcagaatccagatgatggagcccggaaacccatacctagagacaaagtcactgagaacaaaaggtgcttgaggtctgctagacagaatgagagctcccagcctaaggtggcagaggagagcggagggcagaagagtgcgaaggttctcatgcagaatcagaaagggaaaggagaagcaggaaattcagactccatgtgcctgagatcaagaaagacaaaaagccagcctgcagcaagcactttggagagcaaatctgtgcagagagtaacgcggagtgtcaagaggtgtgcagaaaatccaaagaaggctgaggacaatgtgtgtgtcaagaaaataacaaccagaagtcatagggacagtgaagatatttgacagaaaaatcgaactgggaaaaatataataaagttagttttgtgataagttctagtgcagtttttgtcataaattacaagtgaattctgtaagtaaggctgtcagtctgcttaagggaagaaaactttggatttgctgggtctgaatcggcttcataaactccactgggagcactgctgggctcctggactgagaatagttgaacaccgggggctttgtgaaggagtctgggccaaggtttgccctcagctttgcagaatgaagccttgaggtctgtcaccacccacagccaccctacagcagccttaactgtgacacttgccacactgtgtcgtcgtttgtttgcctatgttctccagggcacggtggcaggaacaactatcctcgtctgtcccaacactgagcaggcactcggtaaacacgaatgaatggataagcgcacggatgaatggagcttacaagatctgtctttccaatggccgggggcatttggtccccaaattaaggctattggacatctgcacaggacagtcctatttttgatgtcctttcctttctgaaaataaagttttgtgctttggagaatgactcgtgagcacatctttagggaccaagagtgactttctgtaaggagtgactcgtggcttgccttggtctcttgggaatacttttctaactagggttgctctcacctgagacattctccacccgcggaatctcagggtcccaggctgtgggccatcacgacctcaaactggctcctaatctccagctttcctgtcattgaaagcttcggaagtttactggctctgctcccgcctgttttctttctgactctatctggcagcccgatgccacccagtacaggaagtgacaccagtactctgtaaagcatcatcatccttggagagactgagcactcagcaccttcagccacgatttcaggatcgcttccttgtgagccgctgcctccgaaatctcctttgaagcccagacatctttctccagcttcagacttgtagatataactcgttcatcttcatttactttccactttgccccctgtcctctctgtgttccccaaatcagagaatagcccgccatcccccagatcacctgtctggattcctccccattcacccaccttgccaggtgcaggtgaggatggtgcaccagacagggtagctgtcccccaaaatgtgccctgtgcgggcagtgccctgtctccacgtttgtttccccagtgtctggcggggagccaggtgacatcataaatacttgctgaatgaatgcagaaatcagcggtactgacttgtactatattggctgccatgatagggttctcacagcgtcatccatgatcgtaagggagaatgacattctgcttgagggagggaatagaaaggggcagggaggggacatctgagggcttcacagggctgcaaagggtacagggattgcaccagggcagaacaggggagggtgttcaaggaagagtggctcttagcagaggcactttggaaggtgtgaggcataaatgcttccttctacgtaggccaacctcaaaactttcagtaggaatgttgctatgatcaagttgttctaacactttagacttagtagtaattatgaacctcacatagaaaaatttcatccagccatatgcctgtggagtggaatattctgtttagtagaaaaatcctttagagttcagctctaaccagaaatcttgctgaagtatgtcagcaccttttctcaccctggtaagtacagtatttcaagagcacgctaagggtggttttcattttacagggctgttgatgatgggttaaaaatgttcatttaagggctacccccgtgtttaatagatgaacaccacttctacacaaccctccttggtactgggggagggagagatctgacaaatactgcccattcccctaggctgactggatttgagaacaaatacccacccatttccaccatggtatggtaacttctctgagcttcagtttccaagtgaatttccatgtaataggacattcccattaaatacaagctgtttttactttttcgcctcccagggcctgtgcgatctggtcccccagcctctcttgggctttcttacactaactctgtacctaccatctcctgcctcccttaggcaggcacctccaaccaccacacactccctgctgttttccctgcctggaactttcccaccagccccaccaagatcatttcatccagtcctgagctcagcttaagggaggcttcttgcctgtgggttccctcacccccatgcctgtcctccaggctggggcaggttcttagtttgcctggaattgttctgtacctctttgtagcacgtagtgttgtgaaactaagccactaattgagtttctggctcccctcctggggttgtaagttttgttcattcatgagggccgactgtatttcctggttactgtatcccagtgaccagccacaggagatgtccaataaagtatgtgatgaaatggtcttaaaaaaaaaaaaaaaaaaaaaa

SEQ ID NO: 152364 - DNA, 11552 bp, Homo sapiens
  misc_feature (1)...(11552): n = a,t,c or g
ctaccgggcggaggtgagcgcggcgccggctcctcctgcggcggactttgggtgcgacttgacgagcggtggttcgacaagtggccttgcgggccggatcgtcccagtggaagagttgtaaatttgcttctggccttcccctacggattatacctggccttcccctacggattatactcaacttactgtttagaaaatgtggcccacgagacgcctggttactatcaaaaggagcggggtcgacggtccccactttcccctgagcctcagcacctgcttgtttggaaggggtattgaatgtgacatccgtatccagcttcctgttgtgtcaaaacaacattgcaaaattgaaatccatgagcaggaggcaatattacataatttcagttccacaaatccaacacaagtaaatgggtctgttattgatgagcctgtacggctaaaacatggagatgtaataactattattgatcgttccttcaggtatgaaaatgaaagtcttcagaatggaaggaagtcaactgaatttccaagaaaaatacgtgaacaggagccagcacgtcgtgtctcaagatctagcttctcttctgaccctgatgagagtgagggaatacctttgaaaagaaggcgtgtgtcctttggtgggcacctaagacctgaactatttgatgaaaacttgcctcctaatacgcctctcaaaaggggagaagccccaaccaaaagaaagtctctggtaatgcacactccacctgtcctgaagaaaatcatcaaggaacagcctcaaccatcaggaaaacaagagtcaggttcagaaatccatgtggaagtgaaggcacaaagcttggttataagccctccagctcctagtcctaggaaaactccagttgccagtgatcaacgccgtaggtcctgcaaaacagcccctgcttccagcagcaaatctcagacaaaggttcttaagagaggaggagaaaagagtggcaacctgccttcaaaagagagtgtctatcagccgaagtcaacatgatattttacagatgatatgttccaaaagaagaagtggtgcttcggaagcaaatctgattgttgcaaaatcatgggcagatgtagtaaaacttggtgcaaaacaaacacaaactaaagtcataaaacatggtcctcaaaggtcaatgaacaaaaggcaaagaagacctgctactccaaagaagcctgtgggcgaagttcacagtcaatttagtacaggccacgcaaactctccttgtaccataataatagggaaagctcatactgaaaaaggtacatgtgcctgctcgaccctacagagtgctcaacaacttcatttccaaccaaaaaatggactttaaggaagatctttcaggaatagctgaaatgttcaagaccccagtgaaggagcaaccgcagttgacaagcacatgtcacatcgctatttcaaattcagagaatttgcttggaaaacagtttcaaggaactgattcaggagaagaacctctgctccccacctcagagagttttggaggaaatgtgttcttcagtgcacagaatgcagcaaaacagccatctgataaatgctctgcaagccctcccttaagacggcagtgtattagagaaaatggaaacgtagcaaaaacgcccaggaacacctacaaaatgacttctctggagacaaaaacttcagatactgagacagagccttcaaaaacagtatccactgtaaacaggtcaggaaggtctacagagttcaggaatatacagaagctacctgtggaaagtaagagtgaagaaacaaatacagaaattgttgagtgcatcctaaaaagaggtcagaaggcaacactactacaacaaaggagagaaggagagatgaaggaaatagaaagaccttttgagacatataaggaaaatattgaattaaaagaaaacgatgaaaagatgaaagcaatgaagagatcaagaacttgggggcagaaatgtgcaccaatgtctgacctgacagacctcaagagcttgcctgatacagaactcatgaaagacacggcacgtggccagaatctcctccaaacccaagatcatgccaaggcaccaaagagtgagaaaggcaaaatcactaaaatgccctgccagtcattacaaccagaaccaataaacaccccaacacacacaaaacaacagttgaaggcatccctggggaaagtaggtgtgaaagaagagctcctagcagtcggcaagttcacacggacgtcaggggagaccacgcacacgcacagagagccagcaggagatggcaagagcatcagaacgtttaaggagtctccaaagcagatcctggacccagcagcccgtgtaactggaatgaagaagtggccaagaacgcctaaggaagaggcccagtcactagaagacctggctggcttcaaagagctcttccagacaccaggtccctctgaggaatcaatgactgatgagaaaactaccaaaatagcctgcaaatctccaccaccagaatcagtggacactccaacaagcacaaagcaatggcctaagagaagtctcaggaaagcagatgtagaggaagaattcttagcactcaggaaactaacaccatcagcagggaaagccatgcttacgcccaaaccagcaggaggtgatgagaaagacattaaagcatttatgggaactccagtgcagaaactggacctggcaggaactttacctggcagcaaaagacagctacagactcctaaggaaaaggcccaggctctagaagacctggctggctttaaagagctcttccagactcctggtcacaccgaggaattagtggctgctggtaaaaccactaaaataccctgcgactctccacagtcagacccagtggacaccccaacaagcacaaagcaacgacccaagagaagtatcaggaaagcagatgtagagggagaactcttagcgtgcaggaatctaatgccatcagcaggcaaagccatgcacacgcctaaaccatcagtaggtgaagagaaagacatcatcatatttgtgggaactccagtgcagaaactggacctgacagagaacttaacctggcagcaagagacggccacaaactcctaaggaagaggcccaggctctggaagacctgactggctttaaagagctcttccagacccctggtcatactgaagaagcagtggctgctggcaaaactactaaaatgccctgcgaatcttctccaccagaatcagcagacaccccaacaagcacaagaaggcagcccaagacacctttggagaaaagggacgtacagaaggagctctcagccctgaagaagctcacacagacatcaggggaaaccacacacacagataaagtaccaggaggtgaggataaaagcatcaacgcgtttagggaaacttgcaaaacagaaactgggacccagcagcaagtgtaactgggtagcaagaggcacccaaaaactaaggaaaaggcccaacccctagaagacctggctggctggaaagagctcttccagacaccagtatgcactgacaagcccacgactcacgagaaaactaccaaaatagcctgcagatcacaaccagacccagtggacacaccaacaagctccaagccacagtccaagagaagtctcaggaaagtggacgtagaagaagaattcttcgcactcaggaaacgaacaccatcagcaggcaaagccatgcacacacccaaaccagcagtaagtggtgagaaaaacatctacgcatttatgggaactccagtgcagaaactggacctgacagagaacttaactggcagcaagagacggctacaaactcctaaggaaaaggcccaggctctagaagacctggctggctttaaagagctcttccagacacgaggtcacactgaggaatcaatgactaacgataaaactgccaaagtagcctgcaaatcttcacaaccagacctagacaaaaacccagcaagctccaagcgacggctcaagacatccctggggaaagtgggcgtgaaagaagagctcctagcagttggcaagctcacacagacatcaggagagactacacacacacacacagagccaacaggagatggtaagagcatgaaagcatttatggagtctccaaagcagatcttagactcagcagcaagtctaactggcagcaagaggcagctgagaactcctaagggaaagtctgaagtccctgaagacctggccggcttcatcgagctcttccagacaccaagtcacactaaggaatcaatgactaatgaaaaaactaccaaagtatcctacagagcttcacagccagacctagtggacaccccaacaagctccaagccacagcccaagagaagtctcaggaaagcagacactgaagaagaatttttagcatttaggaaacaaacgccatcagcaggcaaagccatgcacacacccaaaccagcagtaggtgaagagaaagacatcaacacgtttttgggaactccagtgcagaaactggaccagccaggaaatttacctggcagcaatagacggctacaaactcgtaaggaaaaggcccaggctctagaagaactgactggcttcagagagcttttccagacaccatgcactgataaccccacagctgatgagaaaactaccaaaaaaatactctgcaaatctccgcaatcagacccagcggacaccccaacaaacacaaagcaacggcccaagagaagcctcaagaaagcagacgtagaggaagaatttttagcattcaggaaactaacaccatcagcaggcaaagccatgcacacgcctaaagcagcagtaggtgaagagaaagacatcaacacatttgtggggactccagtggagaaactggacctgctaggaaatttacctggcagcaagagacggccacaaactcctaaagaaaaggccaaggctctagaagatctggctggcttcaaagagctcttccagacaccaggtcacactgaggaatcaatgaccgatgacaaaatcacagaagtatcctgcaaatctccacaaccagacccagtcaaaaccccaacaagctccaagcaacgactcaagatatccttggggaaagtaggtgtgaaagaagaggtcctaccagtcggcaagctcacacagacgtcagggaagaccacacagacacacagagagacagcaggagatggaaagagcatcaaagcgtttaaggaatctgcaaagcagatgctggacccagcaaactatggaactgggatggagaggtggccaagaacacctaaggaagaggcccaatcactagaagacctggccggcttcaaagagctcttccagacaccagaccacactgaggaatcaacaactgatgacaaaactaccaaaatagcctgcaaatctccaccaccagaatcaatggacactccaacaagcacaaggaggcggcccaaaacacctttggggaaaagggatatagtggaagagctctcagccctgaagcagctcacacagaccacacacacagacaaagtaccaggagatgaggataaaggcatcaacgtgttcagggaaactgcaaaacagaaactggacccagcagcaagtgtaactggtagcaagaggcagccaagaactcctaagggaaaagcccaacccctagaagacttggctggcttgaaagagctcttccagacaccagtatgcactgacaagcccacgactcacgagaaaactaccaaaatagcctgcagatctccacaaccagacccagtgggtaccccaacaatcttcaagccacagtccaagagaagtctcaggaaagcagacgtagaggaagaatccttagcactcaggaaacgaacaccatcagtagggaaagctatggacacacccaaaccagcaggaggtgatgagaaagacatgaaagcatttatgggaactccagtgcagaaattggacctgccaggaaatttacctggcagcaaaagatggccacaaactcctaaggaaaaggcccaggctctagaagacctggctggcttcaaagagctcttccagacaccaggcactgacaagcccacgactgatgagaaaactaccaaaatagcctgcaaatctccacaaccagacccagtggacaccccagcaagcacaaagcaacggcccaagagaaacctcaggaaagcagacgtagaggaagaatttttagcactcaggaaacgaacaccatcagcaggcaaagccatggacaccccaaaaccagcagtaagtgatgagaaaaatatcaacacatttgtggaaactccagtgcagaaactggacctgctaggaaatttacctggcagcaagagacagccacagactcctaaggaaaaggctgaggctctagaggacctggttggcttcaaagaactcttccagacaccaggtcacactgaggaatcaatgactgatgacaaaatcacagaagtatcctgtaaatctccacagccagagtcattcaaaacctcaagaagctccaagcaaaggctcaagatacccctggtgaaagtggacatgaaagaagaagccctaacaagtcagcaagctcacacggacatcaggggagactacgcaaacacacacagagccaacaggagatagtaagagcatcaaagcgtttaaggagtctccaaagcagatcctggacccagcagcaagtgtaactggtagcaggaggcagctgagaactcgtaaggaaaaggcccgtgctctagaagacctggttgacttcaaagagctcttctcagcaccaggtcacactgaagagtcaatgactattgacaaaaacacaaaaattccctgcaaatctcccccaccagaactaacagacactgccacgagcacaaagagatgccccaagacacgtcccaggaaagaagtaaaagaggagctctcagcagttgagaggctcacgcaaacatcagggcaaagcacacacacacacaaagaaccagctaagcggtgatgagggcatcaaagtatcccagcaacgtgcaaagaagaaaccaaacccagtagaaaaggaacccagcaggagaaggccaagagcacctaaggaaaaggcccaacccctggaagacctggccggcttcacagagctctctgaaacatcaggtcacactcaggaatcactgactgctggcaaagccactaaaataccctgcgaatctcccccacctagaagtggtagacaccacagcaagcccaaagaggcatctcaggacacgtgtgcagaaggtacaagtaaaagaagagccttcagcagtcaagttcacacaaacatcaggggaaaccacggatgcagacaaagaaccagcaggtgaagattaaagggcatcaaagcattgagggaatctgcaaaacagacaccgggttccagcagccaagtgtaactggcagcaggaagacggccaagagcaccccagggaaagtgcccaagccatagaagacctagctggcttcaaagacccagcagcaggtcacactgaagaatcaatgactgatgacaaaaccacttaaaataccctgcaaatcatcaccagaacttagaagacaccgcaacaagctcaaagagacggcccaggacacgtgcccagaaagtagaagtgaaggaggagctgttagcagttggcaagctcacacaaacctcaggggagaccacgcacaccgacaaagagccggtaggtgagggcaaaaggcacgaaagcatttaagcaacctgcaaagcggaagctggacgcagaagatgtaattggcagcaggagacagccaagagcacctaaggaaaaggcccaacccctggaagatctggccagcttccaagagctctctcaaacaccaggccacactgaggaactggcaaatggtgctgctgatagctttacaagcgctccaaagcaaacacctgacagtggaaaacctctaaaaatatccagaagagttcttcgggcccctaaagtagaacccgtgggagacgtggtaagcaccagagaccctgtaaaatcacaaagcaaaagcaacacttccctgcccccactgcccttcaagaggggaggtggcaaagatggaagcgtcacgggaacctaagcaggctgcgctgcatgccagcaccagaggaaattgtggaggagctgccaacccagcaagaagcaagagggttgctcccagggcaagaggcaaatcatccgaacccgtggtcatcatgaagagaagtttgaggacttctgcaaaaagaattgaacctgcggaagagctgaacagcaacgacatgaaaaccaacaaagaggaacacaaattacaagactcagtccctgaaaataagggaatatccctgcgctccagaccgccaaaataagactgaggcagaacagcaaataacttgaggtctttgtattagcagaaagaatagaaataaacagaaatgaaaagaagccccatgaaggacctccccccagagatggaccattccagaattcccagatgatgggagccccggaaacccccatcccctagagaccaaagtccactgagaaccaaaaggtgcttgaggtcctgcctagacagaatgagagctccccagccctaaggtggcagaggagagcggagggcagaagagtgcgaaggttctcatgcagaatcagaaagggaaaggagaagcaggaaattcagactccatgtgcctgagatcaagaaagacaaaaagccagcctgcagcaagcactttggagagcaaatctgtgcagagagtaacgcggagtgtcaagaggtgtgcagaaaatccaaagaaggctgaggacaatgtgtgtgtcaagaaaataagaaccagaagtcatagggacagtgaagatatttgacagaaaaatcgaactgggaaaaatataataaagttagttttgtgataagttctagtgcagtttttgtcataaattacaagtgaattctgtaagtaaggctgtcagtctgcttaagggaagaaaactttggatttgctgggtctgaatcaggcttcataaactccactgggagcactgctgggctcctgggactgagaatagttgaacaccgggggctttgtgaaggagtctgggcccaaggtttgccctcaagctttgcaggaatgaagccttttaggtctgttcaccaccccacagccaccctacagcagccttaactgtggacacttgccacactgtgtcgtccgtttgtttgcctatgtcctccagggcacggtggcaggaacaactatcctcgtctgtcccaacactgagcaggcactcggtaaacacgaatgaatggatgagcgcacggatgaatggagcttacaagatctgtctttccaatggccgggggcatttggtccccaaattaaggctattggacatctgcacaggacagtcctatttttgatgtcctttcctttctgaaaataaagttttgtgctttggagaatgactcgtgagcacatctttagggaccaagagtgactttctgtaaggagtgactcgtggcttgccttggtctcttgggaatacttttctaactagggttgctctcacctgagacattcttcacccgcggaatctcagggtcccaggctgtgggccattcacgacctcaaactgggcttcctaaatctgccagcttttcctgttcattgaaagcttcggaagtttactggctctgctcccgcctgttttctttctgactctatctggcagcccgatgccacccagtacaggaagtgacaccagtactctgtaaagcatcatcatccttggaagagactgaagcactcagcaccttcaagcccacgatttcaggatcgcttccttgtgaagccgctgcctccgaaatctcctttgaagcccagacatctttctccagcttcagacttgtagatataactcgttcatcttcatttactttccactttgccccctgtcctctctgtgttccccaaatcagagaatagcccgccatcccccaggtcacctgtctggattcctccccattcacacaccttgccaggtgcaggtgaggatggtgcaccagacagggtagctgtcccccaaaatgtcgcctgtgcgggcagtgccctgtctccacgtttgtttccccagtgtctggcggggagccaggtgacatcataaatacttgctgaatgaatgcagaaatcagcggtactgacttgtactatattggctgccatgatagggttctcacagcgtcatccatgatcgtaagggagaatgacattctgcttgagggagggaatagaaaggggcagggaggggacatctgagggcttcacagggctgcaaagggtacagggattgcaccagggcagaacaggggagggtgttcaaggaagagtggctcttagcagaggcactttggaaggtgtgaggcataaatgcttccttctacgtaggccaacctcaaaactttcagtaggaatgttgctatgatcaagttgttctaacactttagacttagtagtaattatgaacctcacatagaaaaatttcatccagccatatgcctgtggagtggaatattctgtttagtagaaaaatcctttagagttcagctctaaccagaaatcttgctgaagtatgtcagcaccttttctcaccctggtaagtacagtatttcaagagcacgctaagggtggttttcattttacagggctgttgatgatgggttaaaaatgttcatttaagggctaccccccgggtttataaattgaacaccacttctacacaaccctccttggtactgggggagggaganatatntctgacaaatactgcccattcccctaggctggactgggatttgaggaacaaatacccaccctttccaccatgggtatggtaacttctctgagcttcagtttccaagtgaatttccatgtaaatagggacattccccattaaataccaagctggttttaacttttttcgcctcccagggcctgtggggatttgggtcccccagcctctcttgggctttcttacaattaactctgtacctaccatctcctgcctcccttaggcaggcacctcgcgaccaccacacactccctgctgttttccctgcctggaactttccctcctgccccaccaagatcatttcatccagtcctgagctcagccttaaggaaggcttcttgcctgtgggttccctcaccccccatgcctgtcctccaggctggggcaggttcttagtttgcctggaattgttctgtacctctttgtagcacgtagtgttgtggaaactaagccactaattgagtttctggctcaccccctggggttgtaagttttgttcattcatgagggccgactgcatttcctggttactctatcccagtgaccagccacaggagatgtccaataaagtatgtgatgaaatggtcttaaaaaaaaaaaaaaaaaaaaaaaaaaaaaaaaaaaaaaaaaaaaaaaaaaaa

SEQ ID NO: 152365 - DNA, 782 bp, Homo sapiens
tttttttttttttttttgacctgagatgaattctttttattacgagtgaacagatggaactaaggtaagcgggtctcagccttccgctggtgcagcatctccacgcagggcctcagcacacgtcctggccttgcctgaggactgcaccatgggtgttccttgggcatggaggaggcagcaggaaggggtgacaggagcaggagcaggtgcagggcacctcagcaccacaggcctcccccacctttgagctgccaacagccaagactcctgggcgaggccgggagaggaggggtgagagggaagcacgggtctctgtgaaagcaagccccaccgcccagaggcagagcagagaccccaggtcttgcaaatcacaccctccccccacgagttcctcctttgaaggccagcagcacccgagggaggggcaggggctgcacggaggaccaggagaaaagggaaaaccccacagaagaaaactcaaagcatcagtcccatgcgtgtctgctgaacgagtgaatgggcccaaaggctcttctctacaaacggcacgcatccatccgacagggggccacaggaaaccgaccggggccgtctgcgtctgtgcctgtgcagcccacaccagtgcagcccggggccctctcagacctcaccacactgcgtgcccagcacatgtgtgcacacgcagatgcaggagagaacacacacccccgtctctttgcacacgtgtgcccctgtccggcccggggggctcatctctccttcacgtggttctgtctcgtgcc

SEQ ID NO: 152366 - DNA, 1881 bp, Homo sapiens
atggtgtctcaagcgcactgcgctacactgcacgcgcctacccccgcggcggccacgttaactggcggtcgccgcagcctcgggacagccggccgcgcgccgccaggcctcgggacgcgggaccacgcgcctgctcccggaagacgcgttagtgggggggaaggttctagaaaagcggcggcagcggctctagcggcagtagcagcagcgccgggtcccgtgcggaggtgctcctcgcagagttgtttctcgagcagcggcagttctcactacagcgccaggacgagtccggttcgtgttcgtccgcggagatctctctcatctcgctcggctgcgggaaatcgggctgaagcgactgagtccgcgatggagaaaactttagaaactgttcctttggagaggaaaaagagagaaaaggaacagttccgtaagctctttattggtggcttaagctttgaaaccacagaagaaagtttgaggaactactacgaacaatggggaaagcttacagactgtgtggtaatgagggatcctgcaagcaaaagatcaagaggatttggttttgtaactttttcatccatggctgaggttgatgctgccatggctgcaagacctcattcaattgatgggagagtagttgagccaaaacgtgctgtagcaagagaggaatctggaaaaccaggggctcatgtaactgtgaagaagctgtttgttggcggaattaaagaagatactgaggaacatcaccttagagattactttgaggaatatggaaaaattgataccattgagataattactgataggcagtctggaaagaaaagaggctttggctttgttacttttgatgaccatgatcctgtggataaaatcgtattgcagaaataccataccatcaatggtcataatgcagaagtaagaaaggctttgtctagacaagaaatgcaggaagttcagagttctaggagtggaagaggagatggatatggcagtggacgtggatttggggatggctataatgggtatggaggaggacctggaggtggcaattttggaggtagccccggttatggaggaggaagaggaggatatggtggtggaggacctggatatggcaaccagggtgggggctacggaggtggttatgacaactatggaggaggaaattatggaagtggaaattacaatgattttggaaattataaccagcaaccttctaactacggtccaatgaagagtggaaactttggtggtagcaggaacatggggggaccatatggtggagctgaggcaagccaagtgatcattaataaagcttttcttggttccttcagtggtgttggtagtaaaatgcaaaaaatgggaaaaaaacagaatggaaagagtaaaaaagttgaagaggcagagcctgaagaatttgtcgtggaaaaagtactagatcgacgtgtagtgaatgggaaagtggaatatttcctgaagtggaagggatttacagatgctgacaatacttgggaacctgaagaaaatttagattgtccagaattgattgaagcgtttcttaactctcagaaagctggcaaagaaaaagatggtacaaaaagaaaatctttatctgacagtgaatctgatgacagcaaatcaaagaagaaaagagatgctgctgacaaaccaagaggatttgccagaggtcttgatcctgaaagaataattggtgccacagacagcagtggagaattgatgtttctcatgaaatggaaagattcagatgaggcagacttggtgctggcgaaagaggcaaatatgaagtgtcctcaaattgtaattgctttttatgaagagagactaacttggcattcttgtccagaagatgaagctcaataa

SEQ ID NO: 152367 - DNA, 557 bp, Homo sapiens
cccctccccctccatgtgaagatttgggtgcttaacatatcatttttttccctgccggaattttagcattgatatgaaccatggacaagtatattctgctgccacaaagactgtaaagtgcttcatttcaacagctgaggcaagccaagtgatcattaataaagcttttcttggttccttcagtggtgttggtagtaaaatggtaggtaaaagttaggctgcaagttcaataaatcatgagatttcccatcgttacacccttgtgtattcacatttcttggatcaaacattttgagtgaactaggggtttttattaaagacatttgttgtatttatggttgtaactgtacatgcttatcaggatgagactgaaagaaggtagggcaaaaatggttgaatctattttcagatagtagttcatacttgagtgaagtgtcttgtctgcattatgaagcctggtatgtatccagtactaaataggtgggttaaatgtggtaattctagttcagtgtcttaccctgaagagaaagttgtaggttggctgttgaaattcattc

SEQ ID NO: 152368 - DNA, 602 bp, Homo sapiens
  misc_feature (1)...(602): n = a,t,c or g
atggaagtggaaattacaatgattttggaaattataaccagcaaccttctaactacggtccaatgaagagtggaaactttggtggtagcaggaacatggggggaccatatggtggaggaaactatggtccaggaggcagtggaggaagtgggggttatggtgggaggagccgatactgagcttcttcctatttgccatggcttcactgtataaataggagaggatgagagcccagaggtaacagaacagcttcaggttatcgaaataacaatgttaaggaaactcttatctcagtcatgcataaatatgcagtgatatggcagaccgacaccagacgcacgantgcacgagacgccacttttgtgaatggattggattatttaataacattaccttactgtggatggaaggattgtaaaaaaaaatgccctttgagacagtttccttagccttttaattgttgtttctttctagtggtctttgtaagagtgtagaagcattccctcccttgataatgttaaatttgtaagtttcaggtgacatgtgaacctttttaagattttctcaagttttgatagctattagcaggatctggtgtaata

SEQ ID NO: 152369 - DNA, 2662 bp, Homo sapiens
atgactatgaactttgtcgcagacagtcatactggccggaatcctctagcctcagcggctggcgccaaaaccggactccgcccacttcctcgcccctgcggtgcgagggtgtggaatcctccagacgctgggggagggggagttgggagcttaaaaactagtacccctttgggaccactttcagcagcgaactctcctgtacaccaggggtcagttccacagacgcgggccagggggggcgggaccctattccaagaggtagtaactagcaggactctagccttccgcaattcattgagcgcatttacggaagtaacgtcgggtactgtctctggccgcaagggtgggaggagtacgcatttggccggaagacgcgttagtgggggggaaggttctagaaaagcggcggcagcggctctagcggcagtagcagcagcgccgggtcccgtgcggaggtgctcctcgcagagttgtttctcgagcagcggcagttctcactacagcgccaggacgagtccggttcgtgttcgtccgcggagatctctctcatctcgctcggctgcgggaaatcgggctgaagcgactgagtccgcgatggagaaaactttagaaactgttcctttggagaggaaaaagagagaaaaggaacagttccgtaagctctttattggtggcttaagctttgaaaccacagaagaaagtttgaggaactactacgaacaatggggaaagcttacagactgtgttggtaatgagggatcttgcaagccaaaagatcaagaggattttgttttgtaactttttccatccatgggcttgaggttgatgctgccattgcttccaagacctcatttcaattaatggggaagtagttgagcaaaaacgtgctgtagcaagagaggaatctggaaaaccaggggctcatgtaactgtgaagaaactgtttgttggcggaattaaaaaaaatactgaggaacatcaccttacagattactttgaggaatatggaaaaattgataccattgagataattactgataggcagtctggaaagaaaagaggctttggctttgttacttttgatgaccatgatcctgtggataaaatcgtattgcagaaataccataccatcaatggtcataatgcagaagtaagaaaggctttgtctagacaagaaatgcaggaagttcagagttctaggagtggaagaggagatggatatggcagtggacgtggatttggggatggctataatgggtatggaggaggacctggaggtggcaattttggaggtagccccggttatggaggaggaagaggaggatatggtggtggaggacctggatatggcaaccagggtgggggctacggaggtggttatgacaactatggaggaggaaattatggaagtggaaattacaatgattttggaaattataaccagcaaccttctaactacggtccaatgaagagtggaaactttggtggtagcaggaacatggggggaccatatggtggaggaatatggaaaaacacaagcataactgagagaaaaaaatccagaaagctggatttaatacaaagtaaaaaaggcagccggacaaaggaagctcctcagcctccagtcgcctctctgtgcatgcacctcggtcactggtctcgactaatggtttctccgggagcccagttaacagggaaaaattcgcatggcctctcggtttcttcggtccgaaaatccaacgttggtccaagaaggctctgtgcggcaatgaaggccactggtccagacaatgcccaaagccaggtaagcccaccaggccatgccccctctgcggaggaccccactggaagtcggactgtgagcagcccctgcacggaccgcccccatcccttcctgagctggcctacttggatctcattggccttgctgctgaagactgacggtgccctggaacggatgccccagcaactaccatcgcttcatccaagccaaggtacccaatccatccacccagacccctccagtacttctagctttcttctaccctttcaacctcccaccctaaaacgtgcagcctttccttgtcctccatccatagttaaccctgctgtttgggatacttccacaccctcagtcgcagaacaccatacccccatccgcattacccttaaagagcccacccagttcctatcacagaagcagtatcccatcccccaagcagctctcgtaggcctacagcctatcatttctcacctcctcgccagtcacctactccgcccaacagactctccttttaacacaccaattctacctgttaaaaagccaaatggaacttatcgtttagtccaggacctcaggctcattaaccaagctgtactcccacgccacgcggggctgggtcgagacttgggctcccggagggcggcgcgtggtcccgcgtccgcgagcgtggcggcgcgcggccggctgtcccgaggctgcggcgaccgcccagttaacgtggccgccgcggggcaaaaaatgggaaaaaaacagaatggaaagagtaaaaaagttgaagaggcagagcctgaagaatttgtcgtggaaaaagtactagatcgacgtgtagtgaatgggaaagtggaatatttcctgaagtggaagggatttacagagtaa

SEQ ID NO: 152370 - DNA, 1489 bp, Homo sapiens
ggatacaaaaagtatttattttataaactttatatttaaaatagaattgtaatctgtctactcacaaaacctaatttaaaacatgatacatttatctctctagccaatttgatgttaactgttttaacaaacaacactcattttgtaaattgttttaatatcaagaacctcaactaaatgtttgttttatcagaaaacatttccccttttattttaaagagtgctttttaaatgaaggcaccaacaagaactactttcagatggtacagaatttcttatttcttgaagactctgtggttgaccacttcttcattagttacctgcagcaagacaccttccattttactaccaacaccacttgaaggaaccaagaaaagctttattgaatgatcacttggcttgcctcagctgttgaaattgaagcacttttacaggtctttggtggcagcaggactatacttgtccatgggttcataatcaatgccatggcaaataggaagaagctcagtatcggctcctcccaccataacccccacttcctccactgcctcctggaccatagtttcctccaccatatggtccccccatgttcctgctaccaccaaagtttccactcttcattggaccgtagttagaaggttgctggttataatttccaaaatcattgtaatttccacttccataatttcctcctccatagttgtcataaccacctccgtagcccccaccctggttgccatatccaggtcctccaccaccatatcctcctcttcctcctccataaccggggctacctccaaaattgccacctccaggagtagcagcagcgccgggtcccgtgcggaggtgctcctcgcagagttgtttctcgagcagcggcagttctcactacagcgccaggacgagtccggttcgtgttcgtccgcggagatctctctcatctcgctcggctgcgggaaatcgggctgaagcgactgagtccgcgatggagagagaaaaagaaacagttccgtaagctctttattggtggcttaagctttgaaaccacagaagaaagtttgaggaactactacgaacaatggggaaagcttacagactgtgtggtaatgagggatcctgcaagcaaaagatcaagaggatttggttttgtaactttttcatccatggctgaggttgatgctgccatggctgcaagacctcattcaattgatgggagagtagttgagccaaaacgtgctgtagcaagagaggaatctggaaaaccaggggctcatgtaactgtgaagaagctgtttgttggcggaattaaagaagatactgaggaacatcaccttagagattactttgaggaatatggaaaaattgataccattgggataaatactggatgggcagctggaaagaaaaaagctttggctttgttacttttgatgaccatgatcccgtggattaaattggatttgaggaaataccataccattaatgggcg

SEQ ID NO: 152371 - DNA, 1943 bp, Homo sapiens
gcggccccgcgcgcagctcccggctccctcccccttcggatgtggcttgagctgtaggcgcggagggccggagacgctgcagacccgcgacccggagcagctcggaggcggttgaataatagctcttcaagtctgcaataaaaaatggcctccaacatgaactacattgcagaaaatgggaaaaaaaacagaatgggatagagtaaaaaagttcaagcaggcagagacctgtagaatctggcgtggaaaaagtactagatcgacgtgtaagtgaatgggaaagtggaaatatttcctgaagtggaagggatttacagatgctgacaatacttgggaacctgaaggaaaatttaggattgtccagaattggattgaagccgtttcttaaacttctccaggaaagctgggcaaagaaaaagatgggtaccaaaaagaaaatctttatctgaccagtgaatctgatgacagccaaattcatagaagaaaaagagatgctgctgaccaacccaaagaggattttgccagaggttcttgatccttaaaagaaataattgggtgcccacagaccagccagtggagaatttgatgtttcttcatgaaatggaaagattccagatgaggcagacttggtgctgggcgaaagaggcaaatatgaagtgtcctccaaattgtaattgctttttatgaagagaagcctacctgggcattcttgtccgagaagatgaagctcaataattgttcacattgttcttttatatatatttatatatatatatatataaaaattgggtcttagattttgatttactagtgtgacaaaataactacatcctaatgaaaatcaagtttgatatgtttgttttgaaagtagcgttggaagagttgttggtgggttttttgcatccatagcactggttactttgaacaaataaataaaagctttctgtagttgcttcctttatcagaaaagaacatttgatacccatggtatatcatttcctcttcattaaagaacagcttttctaaatgttgggggaaatgtccatagtcattactcagtcaaaacttgtgttctcatgagcctaaggaccattctagatttattacgtgttttttgtgtgtgtgtgtgtgtgtgtgtgtgtgtgtgtatccataaaatgcatatgtaaatttttttttgtttttaagcattcacccaaacaaaaaattcactggtaaacccatgtttctgagatgccattattccaagcaaaataagagataatcccttcaagttaaattgaaaattttcctgaaaccatacatttcaagtgaaataagtaattctagataggacaatttaaattggataattttaaagtgtctataattgccagtggtttatttgcaaaattccctaaaaggggaaaatttttatccactgcccatcaacagcaggtttcctcatcccagatggaggaaacctggacaaatgcctagtgtgtttttaactagctaaaccaaaactaaagttaaaatgaaccatttaaaagttttccctagcggggcccattcccttaagcaaaaatgttgggaatcccctgttgctacgattgacttaaaaggtcatgatgaatggaatatgtaagaccttggctcatagaaaccataatcagatggttagaggtgttggcagtttaggacctgctggtcataaatgtgtgaacaaccttttggtaaccttaacctattggacctggcatgtttttttctttacccccaattcattacgatggaggctcaaatcttgagtttgctttactggttcagcaaaagcccaggaagaacaactttgtagtaatcaaaatgttatccaactggtatattgtttactttattgtaaatactggtgaacagtggttaataaatagttttatattcctttatgcaaaaaaaaaaaaaaa

SEQ ID NO: 152372 - DNA, 1285 bp, Homo sapiens
tttttttttttttttcccattcaactccagaaggcttatttattgaaagaatacaatgatgtttacaaggatgcatttcacgtagccttaaaaggcttgggtatccataaagtgcatggttcatggctgttgggacttaagaaagccttctggtcaatgagccaccacatatgtcctcgggctccctccctgtcaatggaagatgtgatgagtttcagagtggtggctggatctaggcccaagcaccaaacacaaaccagtactctcctttgggtcttctgggaactaaggttttataaacttccgtaacagtggggggcagcactcagttgggttacaattcatgcccattccctgaaagtaagtccactatggggggatcccccaaaccaacccaggtaggccattaattgaggttccctgacagggcatccctaggcccaatcagtagggggaggggtctgagtagaattaccccattggtcaaactatggtatcagataataggaagcacagcccttggcattgtgtgtgagctaatcatgggtgcaccataaacaaggtgttttggatggtcagcatctcaggaagggcagatctgccattgaatattccattttgcatcacagaggagagactaattgagctacacatactacatttcagcccccatgcacaattttttcccctgcaaagaatgaagaatacttggggtgcttcttcattccatcccatgatgagagaaaggcaattgaatcctgctaatgtggcatgcaaaggaatcccagtaggaaaggttcaccatcaattccgacccaatatcttgccccatgattcatatttagggctgggaaaaatttatctacctttgggaggcagcccttgtgtaaaaaggaaaccaatgtcccagttgtggcccccaaaattggtcctgccatggtccaatgtccaaacaacacccaacaaaaggttcctggaaagttcccttttaggaataagccccatgggaagtccatttaggggatggaagcaggcccactgaagcttagctgatgctttactaatagaaaagcattatacaactaaaataaattgatgtgtgtgtgtgtcttgctctgttgctcaggctggaatgcagtagtgtgatctcagctcactgcagtctctgctcccgggttccagtgatcctcccacctcagcctcctgagtagctgggactaccactgcatgccaccatgcccagctaatttttggattttttttttttttaaagagatggggtttc

SEQ ID NO: 152373 - DNA, 532 bp, Homo sapiens
gtccccgggcgtctccattttggtctcaggtgtggactcggcaagaaccagcgcaagagggaagcggagttatagctaccccggccgcggagccggctcactgcactacccccgcccccttctttcctccagacgccgaagtcgcgggcgctcatggcgggcctggaggtactgttcgcatcggcagcgccggccatcacctgcaggcaggacgcgctcgtctgcttcttgcattgggaagtggtgacacacggttactgcggcttgggtgtcggtgaccagccgggtcccaatgataagaagtcagaactgctgccagctgggtggaacaacaataaagacctgtatgtcctccggtatgagtataaggatgggtccagaaagctccttgtgaaagccatcaccgtggagagcagcatgatcctcaatgtgctggacctacaagaacagtgaggagcttcggtctcgtattgtgtctggaatcatcacacctatccatgagcagtgggaaaaggctaatgtaagcagtccc

SEQ ID NO: 152374 - DNA, 3365 bp, Homo sapiens
  misc_feature (1)...(3365): n = a,t,c or g
ttcgtgtccccgggcgtctccattttggtctcaggtgtggactcggcaagaaccagggcaagagggtagcaaaggtatagctaccccggccgcggagccgctacanctgcactacccccgcccccttctttcctccatacgccgaagtcgcgggcgctcatggcgggcctggaggtactgttcgcatcggcagcgccggccatcacctgcaggcaggacgcgctcgtctgcttcttggcattgggaagtggtgacacacggttacttcggcttgggtgtcggtgaccagccgggttcccaatgataagaagtcagaactgctgccagctgggtgggaacaacaataaagacctgtatgtcctccggtatgagtattaaggatggggtccagaaagcttccttgttgaaagccattcaccgtgggagagcagcattgattcctcaatgttgctgggaattatgggttcacagcaaagttggcagatttgacccttgaacttgggatgattattttcgatggcagaacacctgggtgacttccacaggacctacaagaacagtgaggagcttcggtctcgtattggggcttggaattctcaacacctatccatgagcagtgggaaaaggctaatgtaagcagtccccaccgggagttcccccctgctaccgccagagaggtggacccactccggattcctccacaccacccacacaccagtcggcagcctccgctggtgtgatcccctgggcccgtttgttgtcgggggagaagacttagacccttttgggcctcggagagttgggcatgaatgtgggatcccctgagatctggtctcccaaagagcatttaatgaccccttcctcaggcctcccgaaccgactttcctccagggcgctgtgccccagggagctggctttgacccctttggacccattgggaaccagcccacccggaacctaacccagaaccatctccccccgccggggctatgatgacatgtacctgtgaaaggcccttcaaagaatgttaacatcccccaggcttccctccattctccctggagctggccaccgctgtccccccatcaagcaacccatgttcttgcaggctgggggcaagggattctgcctcatgtgtttgcagaaccggctgggatagcctccccaccccttatcagagccaagacaccgtgttgaggctctccacctaggctgcagatagctcccaaagagaaaacaggtgggtttctttcaccatcagctcctcccctttcaccaccagctcctctccactttcccaagggagactccggcaaccttcagcaacatatatcctcgaccagatggcagtgctataagaacagaacgcattttggatgttattattaagaaccaaatgtcaatacagaattcatgttgccggtttcccacttttttttttacattaatgcatagctgcttccatttatgagactttagagtttgagtttctgtagggctgaatgactctttttcctgcccagggcccattcttgcttctcaggcaccttccgtttattaattgccattgctcctgacatcactaagatgggtccccttctggctgcatgaatggaaatgagtgactggaaatcccataggccacaaggaatgactttcacaaggggcagggaacattgtgggaaagactgcatcattctggatgaggcaaaatcctcccgctattcctgtctggggccagtttttgtagggtccatcttgtggcatggggcagcagtagtcaaaaagccaaggaaaaaacagagcagacctgaaggctaatcttatttttgccactaacttagtgaatgaccctaagcaagttccttctcctcttagggccttgtgcaaagccctatgaaattggaggtggctttcctgctctaaagcattttgaatgtctcattctgtgtttggtaacccctataaactggggggcagaggaaaagaatgatgggttcaagggccatactttcccttgaacccttgtgtgggttcttgccctaaccgctgtggttttttgggaccccatggggccccagacagagcacaggagcatgggctgcctctgagtgtggtgttgaacttcgggaggagcagggagccctgcaccttgtgtcctggcccacctgacctttggtgttctccggatccttttcagcccgaggcctgacagacgcgggcagtgatgagccctgttctggagtggaaagagcacgatagagcaccaggctaagaggcacgagatcaaggcggtagtcacttccgctctgcagctagcatttcaaccatatgtggatcctttcatttctcagctccctggattccttcccctaaattaggacctattatttacctgtaggtaagcaagctactgtagctcttctgaggtatctgccaggctgttttctgtagcctcagattgcctatctgcttagcctgagaacaggtagattaaaactaaactgatgcctaggcccagggtcagtctcagatgggaagctggggcctggggtnggggaggctagcatgcgtgggctccctgggggtattttcttgttcagttccccatgggcaagcagttgattttagttaaaacacccccagagttcagggggaaggcccaacccacctttttaaacctttaggaacattttctgctttggagaaagacccagagtagatggcggaggtgcagattcgatcattactcataacctttggagagctggcaaatgggaggagtgttagtcttttgttttggaattggaccattcttgcaaccaaaaggacttagagcagtttgctcataaagacagtcctttattataaaaggaagtatttaaaggatgatagagacccatccagatagaagccagggaaggtagaataacttttaggccccttgatgtggaggaaaagataaaatttaaaccaataaatttgcccacttagattttctagcaagcaaaagtccggaaaagatagttatatacaaaattcctgttttcctgaaaacaaaattgtgattcacccttcagaattggcccatttttttttgtgagtttccttgcatcaaggacactggagaaacacagtccattgtcttaggtgttctatgggaggaagtgaatagagccttttaggaacttcctggtcaagcttatggtgcttattttgatctgggccactttccctccttccagtcctggagtaatcctcaaggagcaagttggagtgtttccaggtggtatattttgtagaacccaaaagattggagccttaacaataaacatcagcactaagtgaaaaaaaaaaaaaaaaaa

SEQ ID NO: 152375 - DNA, 1310 bp, Homo sapiens
  misc_feature (1)...(1310): n = a,t,c or g
tggtaatgcagtagttttgtaattctatttctcatagcatgctcaaattaaggattcattttagagcgtttcttgctatcacactgccgtggcgccatcttactcggttgcgggaggggtcacaggtcagtgccggagcctccgcgagtgaaggaagacgaagtgcgtgacccgaccggctgtggtgttccagtccccactgaccagtaggagcagcagggcgtcggcttgtgaggtggcttttcctcgggggcaacccaggaagggccccaagagggacaattggattcttggaactcggcccagttgggtagctgtctgtagcagcccccgtctggggctctcacggggagtacaaactagtgatgctgggtgctggtggtgtagggaagagtgccatgaccatgcagttcatcagccaccgattcccagaagatcatgatcccaccattgaagatgcttataagatcaggatccgtattgatgatgagcctgccaatctgggacattttggatacagctggacaggcagagtttacagccatgcggggaccagtatatgagggcaggagaagggtttatcatctgttaactcctatcacggattcgtcgaagtttcccatgaagttncggagagtttaaaccagcttatttattcgagtccgacgtacttgacgatacacctgtggttctttgtggggaaacaagtcagaccttcaaacagcttaagacaggttcaccaagggaaggaagggtttggccttggccccggagaattccagctgtccccttttttggagaacatctggctgccatacccggctactatattgatggatgtttcccccatgccccctgtacgggagataccgtaggaaagaaaaggaggcagtacctggcccatggagaaaaaatcctaagccccaaaaaccagtgtatggaaggaggctaaaaatcacccattccggaagaagaaagattcagtaacttgaagagaagatgtgaagtgtttatctgtgaactgcagtgctgtattcaaagcagtccagttaacctggcagtacttgagtatggtgcttgctcttttcactttaacttgattaggagggacatgcctactaggggtttttaatgatgttggtattttaaagtattgtctcttagtttaagtatggtttattaacccagtggagcactgtctgcttttaaattgtcacattagaatttgttctaccaatgttttgggttctgttgcgctattaattaatgtaaatttgtttatacccaggagaaaaaaaaaaaaaaaaaaa

SEQ ID NO: 152376 - DNA, 579 bp, Homo sapiens
  misc_feature (1)...(579): n = a,t,c or g
cggcggagagcggaagaaaaacagggttcatttagagcggcgccctctannnnnnnnnngttaaatgaagtcattatttagaataatcaacagtacgcaggtcccggttctaaacggaatgaaaactaccagctctcatgaaactacctgtaccctcgttaagtctcttagtgtgtggaactgtttcttcatctgaaaattgaaaacaacaagacatgcaaggtacagcatgaggtaatgtgctcagggtgctttcaacagctagacttgtatactagttccagctgcgcagctctctagctaggtgactttgaacaagcagtccaaccttctgagctcccattttctttcctgtaatagttggataaaatcacctcgtagtggcaagaatcaagagacttctcnnnnnnnnnnnnnnnnnnnnnnnnnnnnnnnnnnnnnnnnnnnnnnnnnnnnnnnnnnnnnnnnnnnnnnnnnnnnnnnnnnnnnnnnnnnnnnnnnnnnnnnnnnnnnnnnnnnnnnnnnnnnnnnnnnnnnnnnnntccgnacgcgtgggtcgagcnggatnctatgctctcg

SEQ ID NO: 152377 - DNA, 510 bp, Homo sapiens
aaaggcaccacgataaatgaagggcatttgttaggataatcaacagttaccaggtccagttctaaacggaatgaaaactaccagctctcctgaaactaactgtaccctcgttaagtctcttagtgtgtggaactgtttcttcatctgaaaattggaaacaacaagacatgcaaggtacagcatgaggtaacgtgctcagggtgctttcaacagctagacttgtatactagttccagctgcgcagctctctagctaggtgactttgaacaagcagtccaaccttctgagctcccattttctttcctgtaatagttggataaaatcacctcgtagtggcaagaatcaagagacttctcaaaagttaaacatagaggccaggcgcagtggctcacagctgtaattctaagcactttgggaggccgaggcaggtggatcacttgaggtctggagtttgaaacctgcctggccaacatggtgaaactctgtctcttccatctctactaaaaatac

SEQ ID NO: 152378 - DNA, 812 bp, Homo sapiens
ttttttttttttttagagagaaaatattatgcaaatcatatatttgataatggacatgtatccagaaaatatggagaattcttaaaactcaacattgagaaaaccaacaacccagtaaaaagatgagcaaaagatcttaatcaaagatatatacatcggcaaataatcacttgaaaagatgctcaacatcattagtcacttgagaaatgtaaattaaaaccacaatgagtgggggaagggaaggagagggagagatttgttaaaggatacaaaaatacaactagataagaggaataagttctagtgttcaataccactgtagggatgactatagttaacaataatatatagtttcaaatagctagaaggagaatattgtacgttcccaatacaaagaaatgatgttcgagatgatgatatgctaattaccctgaatctgaatcactacacatttatacatatcaaagccattactatgtactcccatgaaaacgtataattattatttgtcaattgcaaaaataaaattttaatttagtttgttgaggcagggtcttgctctttcacccaggctggagtgtactagcaccatcacagcacactgcagcctcaacctcccaggcttcaaacaatcctcccattctcagccttctgagtagctggggaccacagacacacaccaccacatccagctagtttttttaattttggagagacagagttttgccatgttgcccagggtggtctcaaatttcctgagtgcaattgatccacctgcctcagacttctaaagtgctgggattacagatgtg

SEQ ID NO: 152379 - DNA, 423 bp, Homo sapiens
ccgggtcgcccacgcgtccggagcgagccagttgccggattattctatttcccctccctctctcccgccccgtatctcttttcacccttctcccaccctcgctcgcgtagccatggcggagccgtcggcggccactcagtcccattccatctcctcgtcgtccttcggagccgagccgtccgcgcccggcggcggcgggagcccaggagcctgccccgccctggggacgaagagctgcagctcctcctgtgcgggtactgacttgggcaacagcagtgactacaagtgccatactgaccaattggaagagtctttgcttatcggagctgttctaaaaggcttattagtttttggtcttcattctatttaatgttttcatgcctttataaactttttacttccagcccaatttttcccattggg

SEQ ID NO: 152380 - DNA, 727 bp, Homo sapiens
  misc_feature (1)...(727): n = a,t,c or g
catggcggagcgtncggcggccactcagtcccattccatctcctcgtcgtccttcggagccgagccgtccgcgcccggcggcggcgggagcccaggagcctgccccgccctggggacgaagagctgcagctcctcctgtgcggtgcacgatctgattttmtggagagatgtgaagaagactgggtttgtctttggcaccacgctgatcatgctgctttccctggcagctttcagtgtcatcagtgtggtttcttacctcatcctggctcttctctctgtcaccatcagcttcaggatctacaagtccgtcatccaagctgtacagaagtcagaagaaggccatccattcaaagcctacctggacgtagacattactctgtcctcagaagctttccataattacatgaatgctgccatggtgcacatcaacagggccctgaaactcattattcgtctctttctggtagaagatctggttgactccttgaagctggctgtcttcatgtggctgatgacctatgttggtgctgtttttaacggaatcacccttctaattcttgctgaactgctcattttnagtgtcccgattgtntatnagaagtacaaggttccaagcaaaactccctggaatcgccaaaaaaaaggcagaataagtacatggaaaccagaaatgcaacagttactaaaacaccatttaatagttataacgtcgttacttgtactatga

SEQ ID NO: 152381 - DNA, 463 bp, Homo sapiens
ccggccggattccctgtcgacgatttcgcctcggagcaggcggagtgaagggacttgagcgagccagttgccggattattctatttcccctccctctctcccgccccgtatctctttttacccttctcccacccttcgctcgcgtagccatggcggagccgtcggaggccactcagtcccattccatctcctcgtcgtccttcggagccgagccgtccgcgcccggcggcggcgggagcccaggagcctgccccgccctggggacgaagagctgcagctcctcctgtgcggattcctttgtttcttcctcttcctctcagcctgtatctctattttcgacctcacaagtgcacgatctgattttctggagagatgtgaagaagactgggtttgtctttggcaccacgctgatcatgctgctttccctggcagctttcagagtcatcagtgtgggttcttacct

SEQ ID NO: 152382 - DNA, 2660 bp, Homo sapiens
  misc_feature (1)...(2660): n = a,t,c or g
aaattcccgggtcgacgatttcgtctgtcctcggagcaggcggagtaaagggacttgatcgagttcagttgccggattattctatttcccctcccatctctcccgccccgtatctcttttcacccttctcccaccctcgctcgcgtagccatggcggagccatcggcggccactcagtcccattccatctcctcgtcgtccttcggagccgagccgtccgcgcccggcggcggcggggagcccagggagcctgccccgcccctggggaccgaagagctgcagctcctccctgtgcggtgcacgatctgattttctggagagatgtgaagaagactgggtttgtctttggcaccacgctgatcatgctgctttccctggcaagctttcagtgtcatcagtgtggatttcttacctcatcctggctctttctctctgtcaccatcagcttcaggaatctacaagttcgtcatccaagctgtacagaagtcagaagaaaggccatccatttcaaaagcctaactggaacgtagacattactctgtcctcaaaaagcttttccataaataacatgaatgctgccattttgcacatcaacatgttcctgaaactcattattcgcctctttctggtagaagatctggttgactccttgaagctggctgtcttcatgtggctgatgacctatgttggggctgtttttaacggaatcacccttctaattcttgctgaactgttcattttcagtgtcccgattgttctatgaaggaagtacaagacccagattgattcactatgttggcatcgcccgagatcagaccaagtcaattgttgaaaagatcccaagcaaaactcccctgggaatcgccaaaaaaaagggcaggattaagtacatggaaaccaggaatgcaaccagttacttaaaacaccatttaattagttataacgtcgttacttgtactatgaaggaaaatactcagtgtcagcttgagcctgcattccaagctttttttttaatttggtgttttctcccatcctttccctttaaccctcagtcatcaagcacaaaaattgatggactgataaaagacctattcttagacctcagaagaagaaagaatcaaatttcataggataagtcaatacctttaatggtggtagtagcctttacctggtagcttgaaagggggaaagattggaggttaagagagaaaatgaaaggaacacctctgggtccttctgtccagttttcaggcactagtcttactcaggctatccatttatagtttgccccttaagaagtcatgattaacttatggaaaaaattatttgggggacagggagtgtggataccttcccttgggtttttttttgcagccctccaaatccctatcttccctgcccccacaatgtgaggcagctaccccctgaaaactcccttttcctttaaatgatttaacctatcaacttgaataaataacttaataggtgaataagtgataattccctgattcccaagaatgcccatcctgataaaaaagaataggaaatgggaaagtggggacttgaggagggagttcagccaggcatgctgcggttgggcggtcactccctctgccactatccccagggaaggaaaggctccgcagtttgggaaagtggtttctacgtcactggacaccggttctgagcattagtttgagaactcgttcccgaatgtgctttcctccctctcccctgcccacctcaagtttaataaataaggttgtacgttttcttactatgaaataaatgtctgtaactgctgtgcactgctgtaaacttgttaggagaaaaaaataacctgcatgtggggctccctcaggttnattggaggtttttggtgatcctatcttcagtctgggggggggaacattcttcaagagggtgaaaatacaggaaagcctttttttcttgatctttttcccgaggtttcaaatctccgattcccatttgggggggcaagtttttttcttcaccttcaatatgagaattcagcgaacttgaaagaaaaatcatctgtgagttccttcaggttctcactcatagtcatgatccttcagagggaatatgcactggcgagtttaaagtaagggctatgatatttgatggtccccaaagtacggcagctgcaaaaagtagtggaagggaaatttgtctacgtgtccttggaaaaattagtttaggaatttggatgggtaaaaaggtaccccttgccttactccatcttattttcttagcccccctttgaagtgttttaactgggtttcaatgtccttagtaggaagtgccattctcccatcctcatcctctgccctccccaggaagtcagtgattgtcttttttgggcttccccctccaaaggacctttttgcagtggaagtgccacatcccagttctttttcttttgtggctgctgtgtttagataattgaagagatctttgtgccacacaggatttttttttttttttaagaaaaacctatagatgaaaaattactaatgaaactgtgtgtacgtgtctgtgcgtgcaacataaaaatacagtagcacctaaggagcttgaatcttggttcctgtaaaatttcaaattgatgtggtattaataaaaaaaaaaaaaaacac

SEQ ID NO: 152383 - DNA, 797 bp, Homo sapiens
  misc_feature (1)...(797): n = a,t,c or g
gacactcgctttttggaacgtctgaggttatcaataagctcctagtcccagacgcccatgggtcatttcacagaggaggaccaaggctactatcgacaagcctgtggggcaaaggtgaatgtggaaagatgctggaggagaaacccctgggaaggctccctggttgtctaccccatgggaccccagaggtttctttgaccagctttgggcaacctgtcctctgcctctgccatccatgggcaacccccaaagtcaagggcacatggccaagaagggtgctgacgatccttggggagatgccattaaagcacctgggattgatcttcaaagggcaccttttgcccaagcctgaagtgaacttgcacttgttgacaagcttgccatgtgggattccttgaggaatttcaaagcttcctgggggaaattttgcttggttgacccttttttggccattcctttttcggcaaaagaatttcaccccttgaggtgccaggtttttcttgggcagaaagatgggtgacttggagttggccagtgcccttgttccttccagattaccactgaagcctcttggcccatgaattcagaagctttcaaggataaggctttattcttgcaagcaattacaaataataaatctatttctgctaagagatcaccaaannnnnatnntnnnnnnncccccggattttttatttagcgggccgcacctttttccccttttagggggggtaaatttatattgggccttgggccggggttttcaaaagcggggggannnnnnnnnnaaagagccc

SEQ ID NO: 152384 - DNA, 747 bp, Homo sapiens
atgaattctttgcttgggctgattattagacgaacatttattgagcaccaaccatatacgacaaacgatgtactagaaaattcagccaatgagagtgcgagagtgcatcttgtgttggccaatgagaacagcgacccgtgcgcagggccgcccaatggggcgcaagcgacgcggtatttgaatcctggaacaaggctacagcgtcgaagatccccagcgctgcgggctcggagagcagtcctaacggcgcctcgtacgctagtgtcctcccttttcagtccgcgtccctccctgggccgggctggcactcttgccttccccgtccctcatggcgctgctccgacgcccgacggtgagtgtgcccggggaccgctctcagaggcgagtccgtcggccccacagctcccctgtcgcttctctcatctgctccgagcttctccgtcccaaccggggctgcttttctcttctccggagctcactgcttcgcccgcgtccctggccctgcggccggtcctctccggcccgcctttccccgtctggattccgccctcccctaacccctccctgccccggggtgggagaagtgtaggaaagcgcttccgagatggcgcctgtcaagtgtccagtgatttggagaatattgacacaggagttaattctaaagttaagagtcatgtgactattaggcgaactgttttagaagaaattggaaatagagttacaaccagagcagcacaagtagctaag

SEQ ID NO: 152385 - DNA, 816 bp, Homo sapiens
atgaaggaagagaatctctgccaagctttttctgatgccttgctctgcaaaatcgaggacattgataacgaagattgggagaaccctcagctctgcagtgactacgttaaggatatctatcagtatctcaggcagctggaggtaggttttgcagtccataaacccacatttcttagatggaagagatataaatggacgcatgctgccatcctagtggattggctggtacaagtccactccaagtttaggcttctgcaggagactctgtacatgtgcgttggcattatggatcgatttttacagctttcacttcctgctgaagatagggaagctttgggtacctcatctccacaacactctggggctctaggagacgtgggctataaaagtggattcattctgtctccacatccctgcatgtccaagatagaaccagaagatgagaaattgtcatttttattcattggtccatttctgaagaaccccagtcccagagcaaatggtgaccccatgtttctctgcttgaatgaggatgaggcacaacagcttgaagaaaccaaatggactggatgccaaaagcaactttgtgaccccctatcagaggaagtcaagactggtgagaaattggtgcagaccaaaggagagaggacatcgaggatcagagaggttcagtttcttgcccagaatcacactaccagaaggtggcagagctgggatttgggcactagcagtctgactccagagcctgtgttctcactggaaatcaatgttagagaacaacgagatgaggataacattcaagtcttgagaggttag

SEQ ID NO: 152386 - DNA, 1575 bp, Homo sapiens
  misc_feature (1)...(1575): n = a,t,c or g
gaggctacagcgtcgaagatccccagcgctgcgggctcggagagcagtcctaacggcgcctcgtacgctagtgttcctcccttttcagtccgcgtccctccctgggccgggctggcactcttgccttccccgtccctcatggcgctgctccgacgcccgacggtgtccagtgatttggagaatattgacacaggagttaattctaaagttaagagtcatgtgactattaggcgaactgttttagaagaaattgggaaatagagttacaaccagagcagcacaagtagctaaggaaagctcaggaacaccaaagttccaagttcaacccaccaaaacaacaaatgtcaacaaacaacttgaaacctactgcttcctgtcaaacccagtaccagatgggaaaagtttggctcccaaagggtccttctcccacacctggaggatgtctnccatgaagggaagagaatctctgcccaagcttttttctgatgccttgctcctgcaaaatcgaggacattgataacgaagattgggagaaccctcnggctctgcagtgactacgttaaggatatctatcagtatctcaggcagctggaggttttgcagtccataaacccacatttcttagatggaagagatataaatgggcgcatgcgttgccatcctagtgggattggctggtacaagtccactccaagtttaggcttctgcaggagactctgtaccatgtgcgtttggcattatgggatccgatttttaacaggttcagccagtttcccggaagaagcttcaattagttgggattactgctctgctcttggctccaaagtatgagaaaatgttttctccaaatattgaagacttttgtttacatcacagacaatgcttatcccagtttcccaaattcgagaaatggaaactctaattttgaaagaattgaaatttgagttgggtcgacccttgccactacacttcttaaggcgagcatcataagccggagaggttgatgttgaacagcacactttagccaagtattttgatggagctgactctcatcgactatgatatggtgcattatcatcctttctaaggttagccagcagctgcttccctgcttgtctcagaaggttctagacaaaggaaaaatggaactttaaagccagcagtattaccacaaggatacacaagagaatgaagtattggaagtccatgccagcaccatggcccaagaatgtggtgcaaagtaaatggaaaacttaaacctaaattccatcggccatcaaagaataaagtatgcaaagcagcaaactccctgaaagatcagcatgatccctcagctgaactcaaaagccgtcaaagaccttggcctccccaactgataggaaggtcctaggctgccgtgggccctggggatgtgtgcttcattgtgccctttttcttattggtttagaactcttgattttgtacatagtcctctggtctatctcatgaaacctcttctcagaccagttttctaaacatatattgaggaaaaataaagcgattggtttttcttaaggtaaaaaaaaaaaaaaaaaa

SEQ ID NO: 152387 - DNA, 372 bp, Homo sapiens
ttgtgggtggcgggacaggcttcattgggacagccctaacccagctgctgaatgccagaggccacgaagtgacgttggtctcccgaaagcccgggcccggccggatcacgtgggatgagctcgctgcatcggggctgccgagctgcgatgccgccgtcaacctggccggagagaacatcctcaaccctctccgaaggtcagcccgggccctaaagctgatacccactagagcacagggaggacagtgccccactgatgagaacctgtgagctatggcttactaccagcccagtctgactgcggagtatgatgaagacagcccaggaggggactttgactttttctccaacctcgtaaccaaatgggaagctg

SEQ ID NO: 152388 - DNA, 557 bp, Homo sapiens
gctgtagaacattagtacaccctcctcaggaagcgggagggagggcagagttgggcggcgcacggcggggcaggggcactgtgtgctttctccgacaggatgagctcgctgcatcggggctgccgagctgcgatgccgccgtcaacctggccggagagaacatcctcaaccctctccgaaggtcagcccgggccctaaagctgatacccactagagcacagggaggacagcgccccactgatgagaacctgtgagctatgggtaatggagctcccagattccgaactaaaccgatatcccagactactcattctgctccactcctccacccccacctgctcctccacccagtcagccaattggcttaagtcctcacgtataactcaggatgcccaggaaatgaatgccctttccctctacaggagacgttgactgtttctcttaagccaaaattcagggctttacaagaaattggtatgaaatagctcccaggaaaagacagagagagggatatgcgcacttatgtatctagcggctttttatttcccatgtttctc

SEQ ID NO: 152389 - DNA, 1253 bp, Homo sapiens
  misc_feature (1)...(1253): n = a,t,c or g
ggtgagggagggcaaaaagggagagtgctgtgcgggcttagtcggatgtttgaggactgggaatccgcttccgggagggcactgtctagtgcacaggcaacctggccttggcctcctagcccgagaagccgaatctccctaatccctgtgacctgtgtcacctctgcatcgcgaggagggggataagtggttatgaagtttggtgtcagatgggatggcgccggaagagggtgccacagcggggacggaaggcgcccccaccccaactccacgggaatataaacaattttccattttccgattcaggtggcggggacaggcttcattggggacagccctaacccagctgcttgaatgccagaggccacggaattacgtttggttttcccgaaagcccgggcccggccggattcacgtgggatgagctcgctgcatcggggctgccgagcttgcgatgccgccgtcaacctgggccggagagaacatcctcaaccctctccgaagatggaatgaaacctttccaaaaagaggttctcgggcagccgcctaggagaccacccaattgcttggctaaagccattcaccaaaggccccacaaccccccaaggcctggggtcttagtcacaggtgttagctttactaccagcccagtctgactgcggagtattgattgaagacagcccagggaggggactttgacttttttctccaacctcctaaccaaatggggaagcttgcagccaaggctttcctgggagattctacacgccaagttggttggtgccgctcaaggggtttgtgcttgggcccgttgggggntggttccatgggccacatgctgctgcccttttgccttgggcctggggggccccatcggctcaggccaccaattcttcccctggatacacatcggggacctggcaggaatcctgacccatgcccttgaagcaaaccacgtgcacggggtcctgaatggagtggctccatcctccgccactaatgctgagtttgcccagaccttgggtgctgccctgggccgccgagcctttcatccctctccccagcgctgtggtgcaagctgtctttgggcgacagcgtgccatcatgctgctggagggccagaaggtgatcccacggcgaacactggccactggctaccagtattccttcccagagctaggggctgccttaaaggaaattgtagcctaagtaggtcgtggcaaggcctgaggcctgttcctcactagttccag

SEQ ID NO: 152390 - DNA, 6254 bp, Homo sapiens
gttttatgcttattatcatttattccttacaacaaccctatgaggtaggtactattattcccattttaaagatgtgaaaattctatacagagaggttaagtaacttgcatcaagtcagagagttaataaatgagggagctgattaaaattcaggcgcctggtacccaagttcctgttcttaaccactacactctagcagcctctaagtttagccctgcaaccaaagagttcctccagggaaggaacgcttcaggtcatggagaagttcaaggggaaaatatccaaatggctctgtctccaaatggggagatcctaagggccagagaaggtgatgccaaggggagcctccactacagagagccaggcaggaccaaggacacccagggcaaatgattgtgttccaccggcagcttactaccagcccagtctgactgcggagtatgatgaagacagcccaggaggggactttgactttttctccaacctcgtaaccaaatgggaagctgcagccaggcttcctggagattctacacgccaggtggtggtgcgctcaggtgagaaacgggcctgggtatcagacagggttggaatgtcttctctgggctggggaagtgatgggattaggagagctgagattacaattacagagtgagaggatgccaccacttctagccaacctgcagatgagaaggtgtgaggtcttaaagacagccatactgctcacttctgttacagacccaaagtcagcatgggaagagtgaggaaggggaaacagaaaccaggaggagcagtgggctccttcaaggctgagaagacccctgtaccttccctctttcctgctctaggggttgtgctgggccgtgggggtggtgccatgggccacatgctgctgccctttcgcctgggcctggggggccccatcgggtcaggcccaccaattcttcccctggaaacacatcgtggccctggcaagaaatcttgacccaggcccttgaagcaaaccacgtgcacggggtcctgaatggagttggctccatcctccgccactaatgctgagtttgcccagaccttcggtgctgccctgggcccgccgagccttcatccctctccccagcgcttttggtgcaagctgtctttggggcgacagcgtgccatcatgcctgtctggagggccagaaaggtgatccccacgggccgaacacttggccacttggctacccagtattccttcccagagctaaggggctgccttaaaaggaaatttgtagcctaagtaggtcaatggcaaaggcctgaggcctgttcctcacaggcttcccaggttaggcacttgtgaataggctcagctcctctagagagctgaagccatctggttcttagaatcctcttcccagtcctctttcccattgttctgttgctccaccttattgtctcaaggccgtaatctcatcaggttgggacattaatcttttcaacttccttgtaagatttcccggtttggtttctctacactcgtcctgcagctgccccaattcttcctttaaggtgtgtagagaatgctctgcagtttaggcaataaaaataaattgtctcactaaccttggctcatctctttggcctagattctcctgggatttacttcaaggaatgtcaccctagatgattcttccccaaagacggggttttgaaagttataatgggcagtctctctcatcaccgtttcccttcttggtccttcagttgccaaaagaacttgtcacaagtttgggacatcaggttatgataaagatagacactagaagagagaatgatgatccatttccaatgggccctgtagtcaccctggatgctgtcagagtgccattaggatgccagtagaggaagaggtaaggcccaggtgtaggatagccttcagtctgtgtcaccaaatggcaagtgcattactaaccacacagtggtcccagtttatcaggctgcagcagaacaaagtcaacatccctgtctataagaagcttaggacttgcctctcatctgactggggccactcagtcaaccagggcccttagcacaaaagggcagaagacacttttggtctactgcacacccaccatcactgaaagtgaaaatggcaagaaaccaatcaagaagtataaacaaccctatcaggaaaaaaaaaaactccaaggttttcatctaggaccctttttacctacctaaagctgtgacatctgccataacttgaccagacacagttcccccagccaccagttcaggccatactaaccaatctcttctcagggaccactgggttatctcttaatcattgtcacctctttgaccagcctgtctccaacacacctgcccccagcctgggtcagtatggtacagtggtgtaaatcaccaaaaaggaaggggtgaggacacaaggaccctccccatcatcattacactcgccatgcagtattcaactccctgtgccactcagagggaggcagaagtcagggcctggaaaagatcttgtctagagactccccacaggcccacacagaacagaacccaggggcacctgtcctacttctttatctggtcttggattccaggaagttgactggctctgtattgttcctggaggtatgaccagcctcaaaggtggatgtaacagaaaagcatactttaggctgcactaaagtaaggagtactgattaataccgtctacacagggaatgtgctaccctggagatagtaaattccctggcacaggaggacttcaagcagatccagggcaatgacctctaggaatcagggtgaagaaagcatgtcagtaacagcagagttggtctggtggccagtcaagtgccttccaactctggttctttcattttccagataattggttcatctagaaccaactggttcaacttccgttaagtcctcccatccccatacacacacacataaagcagaagtgtgccttgctttatgcaacatacgtcttccatagagaaaatgttagggtcggatcacattaatattgtcattgcagagcatggcttcatcgattggtgaaaaatcgacgtgttcatctcaacaccaggaagtgcatctaaccagggatttgccaacacatttgttagtctgtaaacaacacctgaatacaacaggagagctgccatttataggaaccctgagagtattttgataatgcagtcatccctaatttacctactgtgtaaatgtagattttggaggttgctcaaaagggatgcagccattatagggcatgttatagtgagaatgcagtgttaaaatctagggtgtggatcctggagacaaaggacccacatctctctgaaagtgaggtttcggttagagagcctgtgcagccacaggcagacacacctgagacttggtccaagcacctttcctccaagaggctttcctctatgttctcatttctcctcccaacaggtatttttacccctgatttgtaggcagaagtaaagcccaagcaactcaatcaaggtcacaaaacaggcatagctgagaccagaagccaagtctccctctgccttcttcactagctcactccaccctatcgtggcccagtccacataacactgtgccagggcctagcatctccttccacgctcccaggagctcagcaagggagcatcttgttctctggccatccagagcagcagccagggagaggaacagcttaacttcctgtcacttcctgcccaccctgccctccaccctagctcagcttggaggtggagccaacagtctcagtctccggaactaatcccctctagcagcccccactccctacagaaaccctgtgctaaggcaaagttgagaagttaaggctgagcagaacctcttgagagctggctgaggtcctgactcggtaagatcagttcactttatggacctgtcccaaagtggcttccctgatccaaagcaccaactcagggtgcctctggatcagagtgagcagcagagggactctcacagaaagggctgagctggaggcggctggagctgacagggcggcagccactcaagcaggtgaggctcaaaagttaagactgagcagggcctcagacagttggttgatgtcccggcagtatggctcccgctgcaggatgaagtccactttgtgatcctgaccccaaaacacctccagcagctgccgccggagccgctctgtttcccgggtcttccgaatgccaccactacctttttcctcttctctcccctgctgctgtttaccatgttctgcaaagcccctggaaggatgctgagccttagaagacccctgtgtcctggctggcttcttcagaaattcatccagggtggggccgtttcgccccagtgggtcatcaggtaccatgaagaggtttcccacaaaggtaaagggcagcaggcgttctctgatgattgccatccacttctcagactcctccgccaggtcccggaactggtcattggagacaattatcccatctgtctcttcagccagcttcaccatgaacctgtcatcataggaggagatcctcttgccatccatgactcgtgagggtgtgagggagagcaggctgagggaatacagcttttgcaggaagtgactctctctgactttggcatccttactgaagcgccactgaggcacaaagacagttatgtcacggtgaccacggtcccagaagtactgcacagcaatggcaatgccccggctggagaagtagtgctggaggccatgcaccatggccacgttgctgccgtcaatgacaatatggcggaggtctggctggccaggcacattggcaaggcacagggtgaaaggatcctgcagggcctccttgaaacgctgtgtgccagtcaccaagttgccccctcgggcgcctcgtttccattgaggcccccgaccccgtgccatgccctgctgcttgtctcccctgtcccccacgtctccccggtctccgcagtcaccccggtctccacagtgccatgggggttccggtgcaggtggagggctgggcaccctcggaggagaggcattcccattgtggagccgctggaggagggaggctcctcgggactgagctgccctgtgacaggagccatgggcaccgggaggctcacggtggacacagaaccctcctcctcccagagctatctcctccttccccagggccttccctttcaggggtgctgactcccttgcccctccacccactgactgtggcctgagggccacttctctctcccacgcctcttccccaggcaactccttccaccccaaatccatctccctgggaccaccctgtgtccctccctccttctccacagcgtaagtgtctccccttgctcccctgcaatctccgggtcccatagatccagtgtccagggactccctgccgtcactagggggagctctcactccttggcactgagcacccagcaaggctgagctccgcccctcccaagaagccagtgctcctggcccctgcccactagacgcctcctgcaccagactcagcagctcctcctggacagccaggggcaactgcaacagagcctctctatgggcatcccccggggactgcagcagggcagagaagtctctcagcactccagtacactgagaggctccggaagatggtcctggcgtgaagtcccagctcagccgctctgccagctcttctacccggctctgagccatgacaaaggcttcagtcaggccactgatcatcagtgagcctggcgccctgggcaccagatgggctgacgtgctccaggccaggcagtcaaggaagaagccctgggctcccagaaagatgcagtgcagtttgggcgggtagtggatttcatcctgcagttctgggctgcagaggcccttcaggtactccttggctctgctggcgttttccttggggccctccagctgcagccagatgtgggggttgtccggacagtccttcggaaggacgctcacccccacgctgaagatgcgctccacatggggctgctgttcccgaaccttgttctcagcctccgcagacaccgcaaagcgatctggggacgcggggcgggccccccaggtaggcatggctgctgcccccagcccatgttctccatccccccaggtccagccctcagtgctgtcccatccagcagggctaccctgaagctctggctgcagccctcccgtccagtgggcaggcggcttcatccctcctttctctccc

SEQ ID NO: 152391 - DNA, 1112 bp, Homo sapiens
atcttgacgaggctgcggtgtctgctgctattctccgagcttcgcaatggtaagcttcaggggtgtgaagtcgccggcgttcttgggtttgaggactcagtggggagagccttcggcgggagcgctccttggcctgccggcctcggttgcagggcgggcgcggttattgcttggcccatgtgctctggtggtggagtttgcgggggctgggggcgcagtattaggggactttggcgctatttgaggacctggttgcattcccgctgccctcctacagccgcctaaggacgacaagaagaagaaggacgctggaaagtcggcccaaagaaagacaaagacccagtgaacaaatccggggcaaaggccaaaaagaaggtagaaataagacctctctgaaagagactaggggtaactctctcgtaaccctctagtaatagggaacttggataagtaagtggtttttcaggtgtagatttctagagtcaaaatgtgagagtttatcttcccgtcaccactcgttctttttcccattaggatcatgaaaatgggtctgttgtgcgaagtgtctgccgctgtgcctgctgtgttatttttaactgatctagtggggctcggcccctgtttgaaggccaaaaacgtgtcggtgttttttttttttgtttttgttttagtaatgtgtaatttatccttgataacggtggaacagatttctctgacgcagattactcgagagggaaagggtgcttctgccagaaatactaacttgtttctgttttgttttggtgagcagaagtggtccaaaggcaaagttcgggacaagctcaataacttagtcttgtttgacaaagctacctatgataaactctgtaaggaagttcccaactataaacttataaccccagctgtggtctctgagagactgaagattcgaggctccctggccagggcagcccttcaggagctccttagtaaaggacttatcaaactggtttcaaagcacagagctcaagtaatttacaccagaaataccaagggtggagatgctccagctgctggtgaagatgcatgaataggtccaaccagctgtacatttggaaaaataaaactttatt

SEQ ID NO: 152392 - DNA, 672 bp, Homo sapiens
aagtactcacagcggacggtggtttttgggcccgtttctgagcagcgcttcctttttgtcccgaccatcttgacgaggctgcggtgtctgctgcttattctcccggagcttcgcaatgccgccttaaggacggaccaggaaggaaggaaggacgctggaaaagtcggcccaaggaaaggccaaagaccccagtgaaccaaatccgggggccaaggccaaaaagaaggtagaaataagacctctctgaaagagactagggaagtggtccaaaaggcaaaagttcgggacaagctcaataactttagtcttgtttgacaaagcctacctatggataaactcttgttaagggaagttccccaacttattaaactttattaaccccagctgtgggtctcttgaggaggctttgaaggatttcggaggctccctggggccaggggccagccctttccagggagcttcctttagttaaaagggttttattccaaacttggttttttcaaaaggcacaggagctccaagttattttacaccagaaattaccaagggtggaagatgctcccagctgctgggtgaagatgcatgaataggtccaaccagctgtacattttggaaaaataaaaactttattaaatcaaaaaaaaaaaaaaaaagtctgactgcaacgaattt

SEQ ID NO: 152393 - DNA, 513 bp, Homo sapiens
gaggaagggggggttttgtttcgagaccctagtcagcgtggtggaattcctgggataagtcatccccagaggaggctctgaaaggtctggtggataagcttcaagcgttaaccggcaatgagggccgcgtgtctgtggaaaacatcaagcagctgttgcaatgtttagtcccaggaagcaccactctgcacagtgctgagattttggctgaaatcgcccggatccttcggcctggtggatgtctttttctgaaggagccagtagagacagctgtagataacaatagcaaagtgaagacagcatctaagctgtgttcagccctgactctttctggtcttgtggaagagaaagagctgcagcgggagcccctaacccctgaggaagtacagtctgttcgagaacaccttggtcatgaaagtgacaacctgctgtttgttcagatcacaggcaaaaaaccaaactttgaagtgggttcttctatgcagcttaagctttctatcaccaagaagtctt

SEQ ID NO: 152394 - DNA, 820 bp, Homo sapiens
ggtcatgaaagtgacaacctgctgtttgttcagatcacaggcaaaaaaccaaactttgaagtgggttcttctaggcagcttaagctttccatcaccaagaagtcttctccttcagtgaaacctgctgtggaccctgctgctgccaagctgtggaccctctcagccaacgatatggaggacgacagcatggatctcattgactcagatgagctgctggatccagaagatttgaagaagccagatccagcttcccctgcgggcttgcttcttgtggggaagggaaaaagaggaaggcctgtaagaactgcacctgtggccttgccgaagaacttggaaaaagagaagtcaagggaacagatgagctcccaacccaagtcagctttgtggaaactgctaccgtggagcgatgccttccggctgtgccagctgcccctaccttgggatgccagccttcaaacctggggaaaaggtgcttctgagtgatagcaatcttcatgatgcctaggaggttcctgacatgggacccatctgctcctccagccaactcctgtccctcacatcccaccatggtggctcctcccacctcctctggatttgttcactctgagatctgtttgcagagtgggtgcttagcagacagagtgaagctggctgggggggcacagtggtgtgttagtgctgctgtgttattcaaaagaccaaggtattatgggacctggtttcagaatgggatgggtttcttcacctcatgttaagagaagggagtgtgtcctgaagaagcccttcttctgatgttaaaatgctgaccagaacgctcttg

SEQ ID NO: 152395 - DNA, 1271 bp, Homo sapiens; identical to SEQ ID NO: 133734
  misc_feature (1)...(1271): n = a,t,c or g

SEQ ID NO: 152396 - DNA, 903 bp, Homo sapiens
ggctagcaaaccgagcgatcatgtcacacaaacaaatttactattcggacaaatacgacgacgaggagtttgagtatcggttagtgctggcgcgggagcaactagcgacgggtcgtgagctttggccgctgagggcacaaggaattagtaacaggaactgaggcgatagaattggcgcatgcgtacgagacatgtcatgctgtcccaaggacatagccaagctggtccctagaacccattctgatgtctgaatctgaatggaggaatcttggcgttcagcaagaagtcagggatgggtccatttatatgatccatgaacccagaacctcacatcttgctgttcccggcgcccactaccccaggaaacccaaggaaatgaagctgggcaagctaacttttcagccttcaagcttttacacagctggtccttacttgcctaacatctttcttgataacattatttatgttggccttcttgttttcttcacttttgatatttaaaaagatgttcaaatacactggtttgaatgtgctgggtaactgcctttgcttccttaagtaggagccaccaccgaccataggcccaggccagatggaggtgctctgtgggggcccacaggcctaagctgaggtgtgaccccagaagccacgatgtgcttctgtatccaggaacacacttgggcaggatgggagggaaggcatctggagtttggaggaccatgggctgtttacaggggttcatgttaaacttgctgtttttgttttttcctgccgggtgttgtatgtgtggtcacttgcggactcatgcctcagctgccccggatacttaccgttttgttcagcagctctgttcatgttaaaagccttgattaaagaggaagtttttataatctaaaaaaaaaa

SEQ ID NO: 152397 - DNA, 745 bp, Homo sapiens
agaagaaaagcctttcccaagcggctgccgaagatggcggaggtccaggtcctggtgctttgatggtcaaggcccatctcctgggcccgcctggcgggccatcgtggctaaaccaggtactgctgggccggaaaggtgggtgttcgtacgcttgtgaaggcatccacattttctggcaattttctacagaaccaagtctgcagtaccttggcttttcccctccaagcggaatgaacaccaaccctttcccaaggccccttaccacttcgggggcccccagccgcatcttcgtggcggacccgtgcgaggtatgcatgccccacaaaaccaaagcggaggccaggccgctcttggacccgtctcaaggtgtttgacggcatcccaccgccctacgacaacgaaaaagcgggatggtggttcctggctgccctcaaggctcgtgcgttttgaagcctacacagaaagttttgcctatttggggcgcctgggctcccgaggttggctggaacgctatccggccagtgacagccccccctggaggagaaagaggaaagagaaaagccaagatccacctaccggaagaagaaatagcttcatgaggctaccggaaacaggcccgagaagaaacgtggagaaagaaaattgacaaatacacagaggtcctcaagacccacggactcctggtctgagcccaataaagactgttaattcctcaaaaaaaaaaaaaaaaaaaagggcggccgct

SEQ ID NO: 152398 - DNA, 2679 bp, Homo sapiens
ttcgaatggcaatcttgctagttgcgctacctaacagtaccatcttggatccttcaaaaccaaagacttgccccagcactgctgtggaaccacctggcttatgacccctatggatgatctttaggaaaagcagccctttacttttaatacaggctttaatgaactatacctgttaagttccaaaggtcaaaatggaggcatttgctgtctaatattcaaacatagaaagggagctgcttttaaagaattccctgcaaatactgaaagcagtcatgcgaatggagggtgctcttgtgtagctggtcagggactttttttttcttttctcctgaactacatgattctaattggaatgttcatttgcctctttttactcttttaaatgcttgtaggtggcttggggtgtgctatcgtgctgttcctactcagtaaacaggtgtgatgagttaacaagaaataacactgtttgagaactagctttgaataataatttttccctttgtacatgacctgctgaatttcggtacagtgtttttgtagctaacttattttgtcatgcacataatgtatatttgttatgcactacttttgtatatctggtttttcccaacagttaacatttttagggcacacttttcactgacgggatatctctttatgccaatacctcaatttttccatattggcaaagagtagcctttttgtaccttttattacctgagagatccttcatataccttcattttttaatataaataattttaataaattttattttcttatattcctgctttttatacatttccagtgctctgcatacattttaaattatgaatgtcgtgcactggcaatgctattttagagtctgcagagaagagaaagcatgttgcttaaacatccttccccagcaccagctattggtgtacctataatttaagaaatagtctatgtaaagtcacaaattaatgaaaaaaattcgcatgaaaatgacagataacactgtagttcctaaaaaaaaaatttaaatgcattaaggcttaaggtaggaaatttaaaataaccaaaattgttctacagcttcttactaagtttttaaaattattcataaaatgcagacatttttggtgaatgtttagccatttttaatattaataaattgatgttaagtgtttgattcagagatgtctgctcttttaaattatatataaggaaaaaaaatagcctgccttgggacaggtgtgtaatgttagtgtgcatgactaatgtaagaaattgttattctactaatatttacttgtgattgtgtgacaagtgtgtttacagattattggttacacttcaatttacaggggcataaacaatgattatctattactctggaactttatggattacatgttcttcaggattacatgggattgtagttgggagttacccatgtaactcaaacataattaacatgtaattagtttacagattgtagggcatcacttcaattcaccaagcatgtagttctagcgcactagcatggcgccagccatgtacttacaatgtagttacagagtaattacatggtgatttttgcaatgtaaaataaagtgtttctgattattttctatgtaaaaggaaccctctcctttccccttctggtccctgcgctttggggattaatatatatacttctccatacacagacctctgcagaatgcaaaataaaaccttgcagtggaatgaatttagcattttatgagagtgctgttggaaagacttgataattcaccccttttgttcttgaagagttgaatcttctggtaaaaaggtgatttaaaacttgaatgtgatgaattgtggcaagttaacttcaagttatgtgcaatacttatttcaaacttttgaaagatctttgcagtgtaactctvtgrtrtttaattgcagacatttaaaaatgtcattttctactgttaagagtaatcctctttcttgctggtgtttctaaagaaaagaatcacgaaatcaatctttctactaatgtaaatttgagattatttttaaaaatggaataaaagaggttttggtcatttgctttattttattatcttattttaaagctactgtgattgatagcattgtaagaatcgggacaatattgtattcaactgttttattttttatatttttaaaatttaaagtataattagttcttataactttcatccaaatttttgctatattttttggaagtgaaactttttagcaagtgggtgtctagtttttactaatccctaattttttttccagggtattgctcatattatcagaaggaaaagttatttaagtatgtcagttaattgtactacttgggctgaatttccatatagtttttactgtgtatggggaggttgtaggtatttattatagcattttaaataaggggtaattcatttttttattaaagtcattttcacgttaagttcctatttttgtatgttctactcttaagttatataacacagttccttttttaaaagagttcatttgttgaagtgctagtgaaaaattaatgttattaaatagtttgcaaatgactatttataccagtatgcatataatttttaaatatttgtatggggagaggtgttgaatgaataaaacttttaactcagaaaaaaaaaaaaaaaa

SEQ ID NO: 152399 - DNA, 792 bp, Homo sapiens
atggcgccgcccacgtgtggtacggcccacgtggttccgacagtcaagatggcgggagcagctcccaggcttccctggagtcggccccacggatcatgcggctggtggccgatgcagccgctccagggcccgggcaggcgagctgtggctgccgcatgggaagtggccactcctgtgttcatgccagtgggcacgcaggccaccatgaaggcatcacgaccgaacagctggacgctctgggttgccgcatctgcctgggaatacctaccatctgggtctaaggccggtgggacagcggcgtttccagatggtgtcgctggtgtctctgtccgaggtgacggaggagggctccgcttccgctccccctacgacggcaatgagaccctgctgagcccggaaaatccgtgcagatccagaatgcgctgggcccctggggttgtgactggggccctgttgcaggtcaatccgctggctggaccggtgcatgcagcccatcagcggccggacaagcagaacctcttcgccattatccaggtgggctggacgcagatctccgggccacctgccttgaagcgctttggctctgcctggcacagccgcgccttcctcacgcactgctgcacagtgacaacacggccgcgctgcaccacctcacggccacaacatcgcctaccagctgagctcatgagcgccgtccgcaccagcatcgtggagaagcgcttcccggattcgtgcgggacttcatgggcgccatgtacggggatcccaccctctgtccacctgggccactga

SEQ ID NO: 152400 - DNA, 1611 bp, Homo sapiens
  misc_feature (1)...(1611): n = a,t,c or g
cgacagtcaagatggcgggagcagctacccaggctttcctggagacttgtcccacggatcatgcggctggtggccgaatgcggccgctccagggcccgggcaggtgagctgtggctgccgcatgggacagtggccactcctgtgttcatgccagtgggcacgcaggccaccatgaagggcatcacgtttcgaatttttggacgctctgggttgccgcatctgcctggggcaatacctaccatctgggtctaaggccgggacccgagcttgatccagaaagccaacggtctcccacggctttcatgaatttggccttcattaatcttgcttaacgggacagcggcggttttccagatggtgtcgctggtgtctctgtccgaggtgacggaggagggcgtccgcttccgctccccctacgacggcaatgagaccctgctgagcccggagaaatccgtgcagatccagaatgcgctgggctcggacaatcatcatgcagctggacgacgtggttagcagtactgtgactgggccacgtgtggaggaggccatgtacaggtcaatccgctggctggaccggtgcattgcagcccatcagcggccggacaagcagaacctcttcgccattatccagggtgggctggacgcagatctccgggccacctgccttgaagagatgaccaagcgagacgtgcctggcttcgccatcgggggcctgagcgggggtgagagcaagtcgcagttctggcggatggtggcgctgagcacctctcggctgccgaaggacaagccccgatatctgatgggggttgggtatgttgtggatagggaagccagagccctacctgtgggaagtggattcctggggaccccctaccctgcttggggagggggcatttgggggaaacggacacaggtctgatctgaggagactaggaagacatggctgtcccttgggggccattctgagggaatatggcccagtctggggcagtgtgagggttgggaggggccctgggaagcccctgaggttctctgccccctcccgtcatggctgcaaccccagctatgccactgatctggtagtctgcgtggctcttggatgtgacatgttcgactgcgtcttccccacacggacagcgcgctttggctctgccctggtgcccactggggnacctgcagttgaggaagaaggtgtttgagaaggacttcggccccataagacccggagtgcaccttcccccacgtcccaaaagcaccagccgcgccttcctgcacgcaactgctgcacagtgacaacacgggccgcgctgcaccaccctcacggtccacaaccatcgcctaccagctgcagctcatgagcgccgtccgcaccagcatcgtggagaagcgcttcccggacttcgtgcgggacttcatgggcgccatgtacggggatcccaccctctgtcccacctgggccactgacgctctggcctctgtgggaatcacactgggctgacctggcatttgggagagggagggaggaaggaagggagggaggggctggaagatactgaaggattcctttttgaaaggtttttttttattgtaacttaaaaaaaaaaaaaaaaa

SEQ ID NO: 152401 - DNA, 1532 bp, Homo sapiens
ggttttgttccagttgacaattatattacacattgtaagttaataaattggcattctcctttaaaaaataacaaaaaaaatttaatagtcttatacagttactttcccatgaagggttagcttgaaaagtaaaaagcaacgaataaaaatatcatcacctattgtctcttttgtggtcgaaccttttcttgctgcctgctttgagcgaaccgtggatgtggtcactgagtctggggaggagccctttatcttctttgtggatgcccccagcacagcccaagtgcttcctttgtttcccactgagcctttagcaaatcccacctttcctcctgcacgacagaagaggattgttcttgggaatgcaccttgttctactgccgcagcaagtaggcagctggagactgttactaggggtctccttcacctccccagcgtaaagtacatcccatgctaggagcaggccgttccctgagaacctcattaaacccggcgttcttgtcacgcgctccgctcagggccaccaggccaccagcccgaccagacctgcaccgaggcccagccccagaacaggctgcagagacccccgcccccaaggcgggctccctccaaacgggactccatactccttgctggctcaagttttgtttcgctctttttccctgtaattcctttattgggcaaaactgggacaaacgcaggtggacattttaaagtgaaagcttcatgaaacagcccattccacgccgtcaagagatctgcttaagcacattcaagggaacgaatagcccccacccaccaaaaaagaaatgttcgttccatattctcctgaacagaggattgaaacatcgattcccccccccttcaaaggaacaggaaggccacggggcaaggacggacttgggagcggcctcctttctctctggagggaaaggctggagcgctgcctccacttttaagtccacgaaccacgaagggtgaggatccctcagaaactttagcgcaggggagcgggcaggagggcgattgtttaaatcgatggcagcaccttcattaatctgctttccggccatcttcagcagagccattcaccaggaaacgactagaaggtgggcctgcgcccctcagatatcccggggccggcaacgagccgggcagggacgccgaaggaaggccgtgaggagccctcgctggccggccaagatggccaccttcacatggccgaccgccaccggctccctgccacccggcatctagaggcgggacggccagaaagaccccagccgcagcacaaaacctccgcgattcccgccgcctccgctgggggacgcgacctccgggaaggctatcccggccaacggtcggaagggaggtgccatgtcaccgcacaggggagcgggtccagcaagccccagtcgctttttctcccacatcaaacaaggaagagcaatcccccacgtctcctcgcgtctgcatttttctcctagctctagcggctcaagatagctgaacggtctctggagggccggattgcc

SEQ ID NO: 152402 - DNA, 810 bp, Homo sapiens
  misc_feature (1)...(810): n = a,t,c or g
ccactgaagcgctcagatggctgtaacgacggccgacccacgcgtccgcccacgcgtccggacacaactgtgttcactagcatcgctcatacagacactattggtgcacctgactcactgaggagaagtctgccgttactgccctgtggggcaaggtgaacgtggatgaaagttggtggtaaggccctgggcaggctgctggtggtcctaccctgggaccccaaaaggtcctttnaaagccctttgggggaatctgtcccaactccctgaatgctgttaatggggcaaacccctaaaggtgaaaggctcaatggcaaaagaaaaagtgctcgggtgccctttaagtgatggccctggcttcacctgggacaaccttcaagggtcacctttgcccacactggagtgagcttgcactgttgacaagcttgcacgttggattcctgaagaactttcaggcttcctgggggcaacgtggcttggtcttgtgttgcttgggcccattcacttttgggaaaagaatttcaaccccaccagttgcaggcttgcctaatcaagaaaattggttggcttggtgttggctaaatgcccttgggccacaagtaatcacttaagcctcgctttccttgctggtccaatttccaattaaaaggttcctttggttccctaagtccaaatacttaaactggggggatattattgaaagggccttgagcattttggattttgcctaataaaaaaaatttatttttcatcgcatacaagaataaaacaagcgcggccgattaagaggatacttcaggggcgcaagat

SEQ ID NO: 152403 - DNA, 411 bp, Homo sapiens
aacctctacatttctaatttgccactctccatggatgagcaagaactagaaaatatgctcaaaccatttggacaagttatttctacaagggatactacgtgattccagtggtacaagtcgtggtgttggctttgctaggatggaatcaacagaaaaatgtgaaggctgaacaatcatggatttttctgatcaattgtgctttaggaaattattgacagttttgcacaggttcttgaaaacgttatttataatgaaatcaactaaaactatttttgctataagttctataaggtgcataaaacccttaaattcatctagtagctgttcccccgaacaggtttattttagtaaaaaaaaaaaacaaaaaacaaaaacaaaagatttttatcaaatgttatgatgcaaaaaaag

SEQ ID NO: 152404 - DNA, 503 bp, Homo sapiens
aattcggcacaaggaggagagcccgagacttggaaaccccaaagtgtccgcgaccctgcacggcatgctcccttccagcttcatgggcaaagtgtggaaacagcagatgtaccctcagtacgccacctactattacccccagtatctgcaagccaagcagtctctggtcccagcccaccccatggcccctcccagtcccaggcacaaactccagttttaagtccttcccttcctgatatgtctctatccacacattcgtctgttcaggctggtggatggcgaaaactcccacctaatctcagtcccactatagagtataatgatggaagaccagcaaagcgccatgatattgcacggtctcattctgaaagtccttctagacttccaatcaataggtcaggaacctggaaacgtgagcacagcaaacattcatcatcccttctgcgagtaagcacttggagaagaactggaagttcatcttcaattctttctgcttcatcaga

SEQ ID NO: 152405 - DNA, 795 bp, Homo sapiens
atggtttggtacatgacattcaacagcaaaactctactaacactcaacttttgccaaaaggagccacaggaatccacaacatccttacgtggccttaaatatcaaagtcactcaccagcagtattacacagtagcaccagcagcaactcaggatgggatcagctcagcaaaacgaacctctatatccgaggactgcctccccacaccaccgaccaggacctggtgaagctctgtcaaccatatgggaaaatagtctccacaaacgcaattttgcataagacaacgaacaaatgcaaaggttatggttttgtcgactttgacagccctgttgcagctcaaaaagctgtgtctgccctgaaggccagtggggttcaagctcaaatggcaaagcaacaggaacaagatcctaccaacctctacatttctaatttgccactctccatggataagcaagaactagaaaatatgctcaaaccatttggacaagttatttctacaaggatactacgtgatgccagtggtacaagtcgtggtgttggctttgctaggacggaatcaacagaaaaatgtgaagctgttactggtgcaaagtccttcttggacgcaacctcaaccatatattctacagcaccccggtgccgtgttaactccctcaatggagcacaccatgtcactacagcccgcatcaatgatcagccctctggcccagcagatgagtcatctgtcactaggcagcaccggaacatacatgcctgcaacgtcagctatgcaaggagcctacttgccacagtatga

SEQ ID NO: 152406 - DNA, 1671 bp, Homo sapiens
tttgccttcgccggctgcatgaattcggcacgaggccgccgccgacgccgccgctgccgtcgtcgccggaaagggagaggcaggagagcccgagacttggaaaccccaaagtgtccgcgaccctgcacggcaggctcccttccagcttcatgggcaaagtgtggaaacagcagatgtaccctcagtacgccacctactattacccccagtatctgcaagccaagcagactctggtcccagcccaccccatggcccctcccagtcccagcaccaccagcaatgataaccaccggtgccattagtagcaactcaagatgggatcagctcagcagaacgaacctctatatccgaggacttgcctccccacaccaccgaccaggacctggttgaagctctgtcaaccatatggggaaaatagtcttccacaaagggcaattttgggataaggacaacgaacaattgcaaaggttatgggtttttgttcgatttttgacagcccatgcagcagctcaaaaaagctgtgtctggccctgaaggccagtgggggttcaagctcaaaatgggcaaagcaacagggacaagattcctaccaacctctacattttctaatttggcactctccatggatgtagcaagaactagaaaatatgctcaaaccattttggacaagttatttctacaagggatactacgtggattccagtggtacaagtcgtggtgtttggctttgctaggatggaatcaacagaaaaatgtgaagctgttattggtcattttaatgggaaaatttattaaggacaccaccaggggtttcttgcccccacaggaaccttttattgtgttaagttttgctggatgggagggacaggaaaaaggggacagaaccccaaacaaatacatccctaatgggaagaccatgggcataggaggaagggagaggtgagactttgctgggattgacacttactttacggacccaactacagctgctatacagaacggattttatccttcaccatacagtattgctacaaaccgaatgatcactcaaacttctattacaccctatattgcatcaacgggttcatgccttccaggtgcaaagtccttcgtgggatgcaaccttcaaccatatattctacacgaccctggtgccgtgttaactccctcaatggagcacaccatgtcactacagcccgcatcaatgatcatcccctctggcccagcagatgagtcatctgtcactatgcagcaccggaacatacatgcctgcaacgtcagctatgcaaggagcctacttgccacagtatgcacatatgcagacgacagcggttcctgttgaggaggcaagtggtcaacagcaggtggctgtcgagacgtttaatgaccattctccatatacctttcaacctaataagtaactgtgagatgtacagaaaggtgttcttacatgaagaagggtgtgaaggctgaacaatcatggatttttctgatcaattgtgctttaggaaattattgacagttttgcacaggttcttgaaaacgttatttataatgaaatcaactaaaactatttttgctataagttctataaggggcataaaacccttaaattcatttagaagctgttcccccgaacaggtttattttagtaaaaaaaaaaaaaaaaaa

SEQ ID NO: 152407 - DNA, 2243 bp, Homo sapiens
gaattcgggcccttccagcttcatgggcaaagtgtggaaacagcagatgtaccctcagtacgccacctactattacccccagtatctgcaagccaagtttggaaggcattcgggaataccaagtgaaaaggaagagtgaagaacagaaaaatgttagtgggatggcaaacactgtgaacattgctgtttctagtgggccagaaaaatcagtctctggtcccagcccaccccatggcccctcccagtcccagcaccaccagcagtaataacaacagtagcagcagtagcaactcaggatgggatcagctcagcaaaacgaacctctatatccgaggactgcctccccacaccaccgaccaggacctggtgaagctctgtcaaccatatgggaaaatagtctccacaaaggcaattttggataagacaacgaacaaatgcaaaggttatggttttgtcgactttgacagccctgcagcagctcaaaaagctgtgtctgccctgaaggccagtggggttcaagctcaaatggcaaagcaacaggaacaagatcctaccaacctctacatttctaatttgccactctccatggatgagcaagaactagaaaatatgctcaaaccatttggacaagttatttctacaaggatactacgtgattccagtggtacaagtcgtggtgttggctttgctaggatggaatcaacagaaaaatgtgaagctgttattggtcattttaatggaaaatttattaagacaccaccaggagtttctgcccccacagaacctttattgtgtaagtttgctgatggaggacagaaaaagaggcagaacccaaacaaatacatccctaatggaagaccatggcatagagaaggagaggtgagacttgctggaatgacacttacttacgacccaactacagctgctatacagaacggattttatccttcaccatacagtattgctacaaaccgaatgatcactcaaacttctattacaccctatattgcatctcctgtatctgcctaccaggtggcaaaggaaaccagagaaaacaagtatcggggctctgctatcaaggtgcaaaagtccttcgtggatgcaaccttcaacccatatatttctaccagcaccctggtgccgtgttaactcccttcaatgaagcacacaatgtcactaccagcccgcatcaatgattcagcccttctggccccagcagatgagtccatctgtccactagggccagcacccggaaccataccatgccctgcaaccgtccagcctatgcaagggagccctacttggcccacagtattgcacatattgcagactgacagcggttccctgttgagggaggcaaagtggtcaaacaggcaggttggctgttcgaggacgtcttaatgacccattctccatataccgtttcaaccctaataagtaacctgtgagaaaggcacaaaagggtgttcttacatgaagaagggtgtgaaggctgaacaatcatggatttttctgatcaaattgtgctttaggaaattttattgacagttttgcacagggtttcttgaaaacggttatttataatgaaatcaactaaaactatttttggctataagttctataaggtgcataaaacccttaaattcatctagtagctgttccccgcgaatcaggtttattttagtaaaaaaaaaaaaaacaaaaaacaaaaatcaaaagatttttatacaaatgttatgatgcaaaaaaagaaaaagaaaaaaaaaaagaaaagaaaacttcaattttctgggtatgcacaaagaccatgaagacttatccaagtgcatgaccggatttttgtggttttgttcattttgtgtttaatttgtgtttttttttttccagctgtatgaaatgggctttctgaagtttaaatagtccgacttcacccatggtgttctgtgcttgcagtgcgagtgttgctgtaattcagtgttgccgtcagtgtctcttttcttagctttctgtctttctttcaacgtagtgtgaagtgtcttatccttttctatgaattccaatttgccttaactcttttgatgctgtagctgtttcagtaaaagttagttcaaactaatgatgtagaatgctttgaccaaatgagctggtctattatgccttgtaaaacagcagcatagggcttttaaaaggtagtcaataaaagttgctgaaattttggcttttttaaaaaaaaaaaaaaaaaa

SEQ ID NO: 152408 - DNA, 1288 bp, Homo sapiens
acttaaatatagttatattttcataacatggcttaataatttattgggccatcccagctgggatgtataaatcaaaaccacagcaagtgattttaacgtttaaacaggacagtcctacaaaaaaagaaaattcaaatggctcaaacaaataaacagatacctaacttcattcttgtttgttttaaagagataaggtctcactctgttgcctagactctggagcatagtggtgcaatcatggctcactgcagcctcaaatttctgggcttaagcaatcctcctgcctcagcctcccaagtagctgggacttcgggtgtgcagtaccacacttcactaatttaaaaaaaaaaaaattgtagtgatgaggtcttaccatgttgccaacctcatcttgaacttcgtggcctcaagcgatcttccttcctgtgtagcgcctcaaagggctgagattataggtgtgaaccaccacgcccagtccccaaccttattcttaagtgaatatacaaaattctactgagattaaaacgccatttttaaagtaagagattaggaaagatcaaaacatttgataacacttacaaagatttaataggcactctcatgcattgtgggtgggactgtaaactggcacaatccttatagatggcaacttgccaatatctatcaaaagtaaaaatgcacatatcttaacctagttaattctaactttagatttccagcttacagtaaactcactcatgtgcaatgtgacctatataaaaggttataaaatgaatcattatttataatagcaaaaggttaggaaaaaaaatgtcagcagggactgctcaaatatattatggtacattcatacaataacatctgcaatttatagacccaagaatcaagaaactcttcatggtaacgacatggggacaatctccaaaaatatgtttacacagagaagacaagctggaagaacaggtatacaccggtaccattacccccttagggaaaaatacctctagagggatatttaaggaaaagataacactttttgggaagagaaaatgagttctaaaggagggaaggagacttcactgtttatcgttctgtgtcttttgaattttgaacaattttgaaatgaaaacatcccaatggaaatacaagtcttttaggtaagttcaaatgagcatgtattatatttctttcatctgactgataaacttttccacaatttcattgagtctttcaggctccattagtttatttaccaactcctgctcaacagccattagggctgggccag

SEQ ID NO: 152409 - DNA, 528 bp, Homo sapiens
acaaaagaaaagctaagtgaatttttgcacattctacacacagtgcctgtaaatctcatttgtactttcagtttgcccttaattttttttgttagtgtttagaaaacaatgttttaaacattcttcagtgttctgatttcttattaccccctttcctcttgggcttttgaactgtatttgatgttgctttgggataatgtttataagtcttccagtatgaatcccacagaaaccaaggctgtaaaaacagaacctgagaagaagtcacagtcaaccaagctgtctgtggttcatgagaaaaaatcccaagaaggaaagccaaaagaacacacagagccaaaaagcctacccaagcaggcatcagatacaggaagtaacgatgctcacaataaaaaagcagtttccagatcagctgaacagcagccatcagagaaatcaacagaaccaaagactaaaccacaagacatgatttctgctggtggagagagtgttgctggtatcactgcaatatctggcaagccgggtgac

SEQ ID NO: 152410 - DNA, 864 bp, Homo sapiens
atgttcccggggaaggacaagcgggccagcaggcgggccgcggccaatagtccccaaggcgcacggggacaaggagaggcacacaggccaggccgcgtccacgcacaggcagggccacgcgcagtggcggaaggccaggcacgggcacagggcgcacaggcgcggccaaagcggcccaagttggaaggtggtggaaggatgggcggcgtcacatggtcaggcagtcagcaggggcttgggcggaatgggggtaagccaggggtgcacacggggaggccgtggttggccacaggcacacatgccacatggggcagttgcacaagggcatggcaggtcatgcaggtcacccaggcagcaccaccagcaggggcagagggttctgcccacctggcaccgccttgggatgtgcggagctcagtgccagcccggtcccggccaagcgagtgtgagcccggcgcctccaacgcaacaccccgcgccctcgccggctccccgccgtgcggatcggagccagccggttgttgccatggcattcgccagtggtggtacaagacggtaaataggagcggttgtgcctgggcaggacccgaagggagtgtgttggaagggagtgtgtttgctttgcccttctgggcgtgggatgaagcgttgtccggggtttggcggggaaggggtgcggaccgggtggacctcctcgcagaccttcagagggcgattgttggacgtacttcgccgacgcaaaggagaggcagctgcaatgtgaggcaaggagaaaatccaaacatcaaggggcagaagcaactgagatctgagaccaagacccttgagagagcggtggaggggtggaggaaagaaagcgagaaa

SEQ ID NO: 152411 - DNA, 4259 bp, Homo sapiens
caagtgataagaccagcagatcagaggcacaagcccttgttcataccttctttgttgtggagtggtcagatgccttatttgtgggaattgatgaaaatattttggcagttcaaagaattgtcaggaaggctgtagaaacagacttacaaacttctagggagagcattggtgttgccgcgggcgcaagccccaagctccaccagcagagagagaagaagaggagaagaggagaagcagtgggatgtcagagactacagttggacattggagataagcagccgtccactgacagcaaagctaaaagagcactgactggaacattcctttctggggcttcaggaattgcaggtacctccctagacgctgccatggcacctacagagtttgcttcctggtggcgcccaaaggcactcgcctcggctcctgcaccacccacctgcgctccccgtcccacgagggatcttgctgctattcccgactttcagtctggtgctatggaaaactggggactgacaacatatagagaatctgctctgttgtttgatgcagaaaagtcttctgcatcaagtaagcttgacatcacaatgactgtggcccatgaactggcccaccagtggtttgggaacctggtcactatggaatggtggaatgatctttggctaaatgaaggatttgccaaatttatggagtttgtgtctgtcagtgtgacccatcctgaactgaaagttggagattatttctttggcaaatgttttgacgcaatggaggtagatgctttaaattcctcacaccctgtgtctacacctgtggaaaatcctgctcagatccgggagatgtttgatgatgtttcttatgataagggagcttgtattctgaatatgctaagggagtatcttagtgctgacgcatttaaaagtggtattgtacagtatctccagaagcatagctataaaaatacaaaaaacgaggacctgtgggatagtatggcaagtatttgccctacagatggtgtaaaagggatggatggcttttgctctagaagtcaacattcatcttcatcctcacattggcatcaggaaggggtggatgtgaaaaccatgatgaacacttggacactgcagaagggttttcccctaataaccatcacagtgagggggaggaatgtacacatgaagcaagagcactacatgaagggctctgacggcgccccggacactgggtacctgtggcatgttccattgacattcatcaccagcaaatccgacatggtccatcgatttttgctaaaaacaaaaacagatgtgctcatcctcccagaagaggtggaatggatcaaatttaatgtgggcatgaatggctattacattgtgcattacgaggatgatggatgggactctttgactggccttttaaaaggaacacacacagcagtcagcagtaatgatcgggcgagtctcattaacaatgcatttcagctcgtcagcattgggaagctgtccattgaaaaggccttggatttatccctgtacttgaaacatgaaactgaaattatgcccgtgtttcaaggtttgaatgagctgattcctatgtataagttaatggagaaaagagatatgaatgaagtggaaactcaattcaaggccttcctcatcaggctgctaagggacctcattgataagcagacatggacagacgagggctcagtctcagagcgaatgctgcggagtcaactactactcctcgcctgtgtgcacaactatcagccgtgcgtacagagggcagaaggctatttcagaaagtggaaggaatccaatggaaacttgagcctgcctgtcgacgtgaccttggcagtgtttgctgtgggggcccagagcacagaaggctgggattttctttatagtaaatatcagttttctttgtccagtactgagaaaagccaaattgaatttgccctctgcagaacccaaaataaggaaaagcttcaatggctactagatgaaagctttaagggagataaaataaaaactcaggagtttccacaaattcttacactcattggcaggaacccagtaggatacccactggcctggcaatttctgaggaaaaactggaacaaacttgtacaaaagtttgaacttggctcatcttccatagcccacatggtaatgggtacaacaaatcaattctccacaagaacacggcttgaagaggaaataaagatgaaattaaatatcaaaattctaatcgatgatatcagtggggtccgcagaccgtgggggtgcaaacgggccccgcttgagagctatcgcatagcggctgtaaaaacagaacctgagaagaagtcacagtcaaccaagccaaaaagcctacccaagcaggcatcagatacaggaagtaacgatgctcacaataaaaaagcagtttccagatcagctgaacagcagccatcagagaaatcaacagaaccaaagactaaaccacaagacatgatttctgctggtggagagagtgttgctggtatcactgcaatatctggcaagccgggtgacaagaaaaaagaaaagaaatcattaaccccagctgtgccagttgaatctaaaccggataaaccatcgggaaagtcaggcatggatgctgctttggatgacttaatagatactttaggaggacctgaagaaactgaagaagaaaatacaacgtatactggaccagaagtttcagatccaatgagttccacctacatagaggaattgggtaaaagagaagtcacaattcctccaaaatatagggaactattggctaaacccatagggccagatgatgctatagacgccttgtcatctgacttcacctgtgggtcgcctacagctgctggaaagaaaactgaaaaagaggaatctacagaagttttaaaagctcagtcagcagggacagtcagaagtgctgctccaccccaagagaagaaaagaaaggtggagaaggatacaatgagtgatcaagcactcgaggctctgtcggcttcactgggcacccggcaagcagaacctgagctcgacctccgctcaattaaggaagtcgatgaggcaaaagctaaagaagaaaaactagagaagtgtggtgaggatgatgaaacaatcccatctgagtacagattaaaaccagccacggataaagatggaaaaccactattgccagagcctgaagaaaaacccaagcctcggagtgaatcagaactcattgatgaactttcagaagattttgaccggtctgaatgtaaagagaaaccatctaagccaactgaaaagacagaagaatctaaggctgctgctccagctcctgtgtcggaggctgtgtctcggacctccatgtgtagtatacagtcagcaccccctgagccggctaccttgaagggcacagtgccagatgatgctgtagaagccttggctgatagcctggggaaaaaggaagcagatccagaagatggaaaacctgtgatggataaagtcaaggagaaggccaaagaagaagacctggaaaagcttggtgaaaaagaagaaacaattcctcctgattatagattagaagagggcaaggagaaagatggaaagccactcctgccaaaagagtctaaggaacagcttccacccatgagtgaagacttccttctggatgctttgtctgaggacttctctggtccacaaaatgcttcatctcttaaatttgaagatgctaaacttgctgctgccatctctgaagtgctttcccaaaccccagcttcaacgacccaagctggagccccaccccgtgatacctcgcagagtgacaaagacctcgatgatgccttggataaactctctgacagtctaggacaaaggcagcctgacccagatgagaacaaaccaatggaagataaagtaaaggaaaaagctaaagctgaacatcgagacaagcttggagaaagagatgacactatcccacctgaatacagacatctcctggatgataatggacaggacaaaccagtgaagccacctacaaagaaatcagaggattcaaagaaacctgcagatgaccaagaccccattgatgctctctcaggagatctggacagctgtccctccactacagaaacctcacagaacacagcaaaggataagtgcaagaaggctgcttccagctccaaagcacctaagaatggaggtaaagcgaaggattcagcaaagacaacagaggaaacttccaagccaaaagatgactaa

SEQ ID NO: 152412 - DNA, 1777 bp, Homo sapiens
gaattcggggggagtctccctgacttccagcaacaatccttgagtctgggactgccctggcctaagatgggccagtttctatcttcgactttcttggagggctcaccggccacagtgtggcacgataagctttgtgacggtgaacgcagaggagcaagagaagcagttcgtatcttccaggaccaagcaaaaagctaaagaagaaaaactagagaagtgtggtgaggatgatgaaacaatcccatctgagtacagattaaaaccagccacggataaagatggaaaaccactattgccagagcctgaagaaaaacccaagcctcggagtgaatcagaactcattgatgaactttcagaagatttcgacctgtctgaatgtaaagagaaaccatctaagccaactgaaaagacagaagaatctaaggccgctgctccagctcctgtgtcggaggctgtgtctcggacctccatgtgtagtatacagtcagcaccccctgagccggctacctttgaagggcacagtgcccagatgatgctgtagaagccttggctgatagcctggggaaaaaggaagcagatccagaagatggaaaacctgtgatggataaagtcaaggagaaggccaaagaagaagaccgtgaaaagcttggtgaaaaagaagaaacaattcctcctgattatagattagaagaggtcaaggataaagatggaaagccactcctgccaaaagagtctaaggaacagcttccacccatgagtgaagacttccttctggatgctttgtctgaggacttctctggtccacaaaatgcttcatctcttaaatttgaagatgctaaacttgctgctgccatctctgaagtggtttcccaaaccccagcttcaacgacccaagctggagccccaccccgtgatacctcgagtgacaaagacctcgatgatgccttggataaactctctgacagtctagaacaaaggcagcctgacccagatgagaacaaaccaatggaagataaagtaaaggaaaaagctaaagctgaacatagagacaagcttggagagagagatgacactatcccacctgaatacagacatctcctggatgataatggacaggacaaaccagtgaagccacctacaaagaaatcagaggattcaaagaaacctgcagatgaccaagaccccattgatgctctctcaggagatctggacagctgtccctccactacagaaacctcacagaacacagcaaaggataagtgcaagaaggctgcttccagctccaaagcacctaagaatggaggtaaagcgaaggattcagcaaagacaacagaggaaacttccaagccaaaagatgactaaagaaatacaagttaaggtatctggtatctgcatgtaaaatcttcagctggtggatggtgacttttgaagaacaaaaggctttggcaacagaaaacaattgttctgggtgatttctagaatggtttttgttgagtctctgaacatcctaaatattggtttgttattcttttccagaaagaaaatgaatttgactggttcacctgtgtactgagtattgataaactttgaatttttttaattgccttcaattgggagagaaagctttatatttgtgtgaggacttctgcatcttacagtcagcacagaacacactgagacttgaatcaagtcagcaacagagcaaaataaaggttagataagtccttgtgtagcaaatttcgagcataagaaataaaatctaattaattcttagggt

SEQ ID NO: 152413 - DNA, 4588 bp, Homo sapiens
agtgtgagcccggcgcctacaacgcaacaccccgcgctcctctccggctcccccgccgtgcggatcggagccagccggttgttgccatggcattcgccagctggtggtacaagacgcatgtcagtgaaaaaaccagtgaatcgccttccaaaccatgagaaaagaaaggatcatatgagaaaaaagcagcaagcctcggcagcagtcaatcctccagaacctatgctggtggaacagcctctgtcaccaaggtgtcagctttctctggtgcaaccagcaagtcttacagtatgaatcccacagaaaccaaggccattccagtcagccaacagatggaaggaccacatcttcctaacaagaaaaaacacaaaaaacaggctgtaaaaacagaacctgagaagaagtcacagtcaaccaagctgtctgtgggttcatgagaaaaaatcccaagaaggaaagccaaaagaacacacagagccaaaaagcctacccaagcaggcatcagatacagggaagtaacgatgctcacaataaaaaagcagtttccagatcagctggaacagcagcccatcagagaaatcaacagaaccaaagactaaaccacaagacatgatttctgctggtggagagagtgttgctggtatcactgcaatatctggcaagccgggtgacaagaaaaaagaaaagaaatcattaaccccagctgtgccagttgaatctaaaccggataaaccatcggggaaagtcaggcatggatgctggtttgggattgacttaatagatactttaggaggacctgaagaaactgaagaagaaaatacaacgtatactggaccagaagtttcagatccaatgagttccacctacatagaggaattgggtaaaagagaagtcacaattcctccaaaatatagggaactattggctaaaaaggaagggatcacagggcctcctgcagactcttcaaaacccatagggccagatgatgctatagacgccttgtcatctgacttcacctgtgggtcgcctacagctgctggaaagaaaactgaaaaagaggaatctacagaagttttaaaagctcagtccagcagggacagtcagaagtgctgctccaccccaagagaagaaaagaaaggtggagaaggatacaatgagtgatcaagcactcgaggctctgtcggcttcactgggcacccggcaagcagaacctgagctcgacctccgctcaattaaggaagtcgatgaggcaaaagctaaagaagaaaaactagagaagtgtggtgaggatgatgaaacaatcccatctgaagtacagattaaaaccagccacggataaagatggaaaacccctattgcccagagcctgaagaaaaacccaagcctcggagtgaatcagaactcattgatgaactttcagaagattttgaccggtctgaatgtaaagagaaaccatctaagccaactgaaaagacagaagaatctaaggccgctgctccaggctcctgtgtcggaggctgtgtctcggacctccatgtgtagtatacagtcagcaccccctgaggcgggtaccttgaagggcacagtgcaagatgatgctgtagaagccttggctgatagcctggggaaaaaggaagcagatccagaagatggaaaacctgtgatggataaagtcaaggagaaggccaaagaagaagaccgtgaaaagctttggtgaaaaagaagaaacaattcctcctgattatagattagaagaggtcaaggattaaagatgggaaagccactccttgcccaaagagtcttaaggaacagcttccacccatgagtgaagactttccttctggatgctttgtctgaggacttctctggtccacaaaatgcttcatctccttaattttgaagatgctaaacttgctggtggccatctctgaaagtggtttcccaaaacccccggttttccacgacccccaggctggagccccatccccgtgatacctcgcagagtgaccaaggccctcggtgattgcattggataaactctctgacagtctagggacaaagggcagcctgacccaggatgaggaacaaaccaatgggaaggttaaagttaaagggaaaaagctaaagctgaacatagagacaagcttgggagaaagagatggacattattcccacctgaatacagacatctcctgggatgataatgggacaggacaaaccagtggaaggccaccttacaaagaaatcagagaatcaaaggaaccctggcgaatgaccaaggaccccattgatgctctctcagaagatcttggacagcttgtccctccactacagaaacctcacagaacacagccaaaggataagtgcaagaaggctgcttccagtctccaaagcaccctaagaatggaggtaaagcgaaggattcagcaaaggcaacagaaggaacttccaaagccaaaagatgactaaagaaatacaagttaaggtatctggtatctgcatgtaaaaatcttccagctggtgggatggtgacttttgaagaaccaaaaggcttttggcaaccagaaaacaattgttctggggtgatttctagaatggtttttgttgagtctctgaacaatcctaaatattggtttgttattcttttccaggaaggaaaatgaaatttgactggttcacctgtgtactgagtattggataaactttgaatttttttaattgccttccaattgggagagaaagctttatatttgtaagaaatatatttggataaagtttccttaaagccaacaccaaaaaaacaaaaggaaaagcctaagtgaattttttgccacattcctacacacagtgcctgtaaatctcatttgtattttcagtttgcccttaaattttttttgttagtgtttagaaaacattgttttaaacattcttcagtgttctgatttcttattaccccctttccctcttgggcttttgaactgtatttgatgttgctttggggataatgtttataaggtcaaacataggatatggtaccattgggcacatatctcctcttggggctgctaataataaattaataaccaggtaacctggacaaaccaggaagcaccaaaccccttttccagtttgaactcttctttgccaggtgtgaggacttctgcatcttacagtcagcacagaacacactgagacttgaatcaagtcagcaacagagcaaaataaaggttagataagtccttgtgtagcaaatttcgagcataagaaataaaatcttaattaattcttagggtactcatctgacttgaactctgttgggtttactgtggtagtaaaactgtgctttctattatctatacataaaacctgagcagcaactgtgtctttagagctattgccacattagcctttgcactgtatagcgtctggctttatggaacttaagtttaccaaatataaaaagaaacttctgcttttaaaaaaattatatatatatattaaatttgaaacctgcatttctcccacagcaatgtaagaagtaggctctgatgtcctaccactttgaatggttttctaatatcttaatgaatagttcctgaacattgcactgatatcatcgattagaattttgatatttaatttcatctttatttcctgggtagagaatgcagggaaaagatgtcaggtacataacataaaacaggattggggaatttattgtttcccaaaggggcatgggctttccttaggcatcagtttggaggcttttgttatggacttaggctgacttgtgggcagcgggggcaaggcaaaaaccattaacactgcttataaatggcaccacatcttgttaacctcccccccaaatactctctgaaagtcatgcacatacctatgggattttacacaccaccagcttaaaatgctatgtctctatccatcagaaatacgtcattattctatttttaaggcagcaacaagaaaagaaaaaacacttttcctgagggatttctaaccatgtatctaatcctcccatttgggcagtataggtgtttgcttttttgttttctttttttaagaaaaaccttgaaacctttgacactggacagatgtggtttgcaaggatacggctggcagtattactaattttccatgtggtaacctggaaagtattttttaaatggcatacccaaaatccagaagtttaaagatgcctataaaagtaaacaacatttatttaaaaagaactctgaatatgccttcttttttaattagaaatatcttcgagacttgggtgtttgttaataactaataactggagtaagctacaggatctaaagcagccctttttacagtctagttaggagagagaaaataattgcaaatatccacttagaggcaaagaacaatttttttttatcaaaaaggtttctgcacattgttgtggcaatattgtatctgtttagaaaatgggcttttccaaaagcaaacaaagataggttcctcaggtgaccaaaactgaaaatcaatatttccatgtttcattaatcaaggcataaaatacaattaaagcaaaatattttacatt

SEQ ID NO: 152414 - DNA, 955 bp, Homo sapiens
ggaattctcagcaagcatagtgggaatctgcaccatgccctgggctctgctcctcctgaccctcctcactcactctgcagtgtcagtggtccaggcagggctgactcagccaccctcggtgtccaaggacttgagacatgaccgccacactcacctgcactggtaacagcgacaatgttggctatcaaggagcagcttggctgcagcaccaccagggccaccctcccaaactccttttctctaggaataacaaccggccctcagggatccataaacgattctatggctccaactctggaacaacagccactttgaccatcagcgggactccaggctatggatgagggatgactattactgtaactcccgggacagcagtggtaaccatctgagggtgttcggcgggagggacccaagttgacccgtccctaagggtacgccaagggatgcccccttgggttaattttgttcccggcccttcctctgaggaagcttcaagcccaaacaaggcccacactggtgtggtcttcataagtgactttcttaccccgggaaacccgtgacaagtggccctggaaggcagatagccagcccccgttcaaggcgggagtggagacccccccacaccctcccaaacaaagcaacaacaagtacacggacagtcagctatctgagcctgacgccttgaccaggtggaagtccccacagaagcttacagcttgccagggtcacgcattgaaggggagcaccgttggagaagacagtggcccctaccagaatgtttcattaggttctcaaaccctcacccccccaccacggggagactagagctgcaggaaccccaggggagggggtctctctctccccatcccaagtcatccagcccttctccctgcactcaataaaccctcaataaatattctcattgtcaatcagaaaaaaaaaaaaaaaaaaa

SEQ ID NO: 152415 - DNA, 401 bp, Homo sapiens; identical to SEQ ID NO: 145549

SEQ ID NO: 152416 - DNA, 447 bp, Homo sapiens; identical to SEQ ID NO: 145550
  misc_feature (1)...(447): n = a,t,c or g

SEQ ID NO: 152417 - DNA, 380 bp, Homo sapiens
gatgtactaatagtagcttcttgccaaagggcttcttattacttcatggtggaaaacaatgttttatttatgtagctatttaccatccaggcaggtaacttattgagtaccacgggtgactattatgcttcgaggggtacgaagctgtataagacagggttcctcagaggaccccagaggatggaaagggtagggggaagagggggacaggcagagatttgttaaaggatataaaattacagctagataggaggcacatgttctagtgttctatagcactgtaggatgactatagttaacaatgatacatagtttcatatatatatatatatatatatatatatatatatatatatatatatatatatatatatatatat

SEQ ID NO: 152418 - DNA, 417 bp, Homo sapiens; identical to SEQ ID NO: 147138

SEQ ID NO: 152419 - DNA, 655 bp, Homo sapiens
agaaagtggctgaatgagaaatgtagattgcagagggcaactggtgtgtttatatgcctgacattatttgggttttcccccctcaggcagaagctgaggaagattgtcattctgatactgtcagagcagatgatgatgaagaaaatgaaagtcctgctgaaacagatctgcaggcacaactccagatgttccgagctcagtggatgtttgaacttgctccaggtgtaagctctagcaatttagaaaatcgaccttgcagagcagcaagaggctctctcccagaaaacatcggcagatacccaaaggaaaacaagaacaggcaaaagaagaaaagttaagtattatagatattgtaacaaattacattttttttttttggcacatggaaattttcactgacacagtaagtaggcattataaccagactttcgggacataaacacatatcttgtaaaataaaaattttgactagtatactagtttatatatttctcacaatttcttctaggtactttggatggtaccactactcctgcatggcttttttctctgtgggtacactgtcttcattgagctgtcttttgttaatttatagacctctgggattcatgtggttcctaaaagattggtgtctctgaatttattaacagaacca

SEQ ID NO: 152420 - DNA, 2340 bp, Homo sapiens
gtcggcgcaggtttccgcagctgagggggcagctccgcggcggcgtccggggtctccagtagggctgacgctccggtgctcgcacaatcccccgcctcggctggcaacgggcgtccctccactccccgagtccccggcagccgccgccaccccagcgcgccccgatctggccccctgccccgcgaagatggctgccgtacgccgggcccgcagttattgccgctgcctggtgcggcttctccgaccgagaacttctgctaagctccgctgcagaagacaaggcaaggagtagacacccggacacccagcacccctcctccggggggcggtgcagagggggcacggagagcccctcgagcgcagcaggccgccccgccagcatggcagaagctgagtgaagattgtcattctgatactgtcagagcagatgatgatgaagaaaatgaaagtcctgctgaaacagacgtgcaggcgcttattcccattgatccaagctcaatggaagcttgaacctgctccacgtgtaacctctagcagactagaaaatcgaccttgcagagcagcaagaggctctctccagaaaacatcggcagataccaaaggaaaacaagaacaggcaaaagaagaaaaggctcgagaactcttcctaaaagcagtagaagaagaacaaaatggagctctctatgaagccatcaagttttatcgtagggctatgcaacttgtacctgatataggagttcaagattactttttacccggtctccagatggtgatggcgttggaaacagctacattgaagataatgatgatgacagcaaaatggcagatctcttgtcctacttccagcagcaactcacatttcaggagtctgtgcttaaactgtgtcaagcctgagcttgagagcagtcagattcacatatcagtgctgcaaatggaggtcctgatgtacatcttccgatgggtggtgtctagtgatcttgaccttacatctttgggagcagttgtcgctggtgtgccagaggattcctaacatcctgtgcccagagacccctgaaaatatgcccgtcctggccctgctttgaaagtttgggggcagaaagcttgtattaaacttgtttccgttacacgtcctgggagagaggatgttttttaggaacggcctcctgtttcggttttgatggcgtgtatatcagtaaaaccacatatattcgtcaaggggaacagtctcttgatggtttctatagagccctggcacccaagtggaatattacaggtacataagattctttcctgatggccatgtgatgatgttgacaacccctgaagagcctcagtccattgttccacgtttaaggaactagggaataccagggactggatgcaattcctactggggtcactatccgcttgtcaccaagacacaggacaatcaggacccaaagtatttggctgttaataactaaggaaaaaaggaaggaaaaaccactttgactattaaatacaggatatttttcgtcgtgttccctgttacaaggaggcagatccatagttttcctgtggggggctaccagctatgtttccagtggtcaccagaggttcaccaaaactcatctggaaccatcattcttgtcacattaccttacaagtagatcaactggtgagactgcagtcaagtgcttttgagattgacaagatgtacacccccttgtttcttcgccagagtaaggagctacacagctttctcagaaaggcctctgtagagcctcaagtccagtcctctatcacttttgcatgaattaaagtatataggcgcaaaagagcaccttaagttattaaatgtgtgtgtgtgtgtgtgtgtatatatatatatatatatatatatatatatatatatatatatatatatatatatatatatatggaattggaacttattttaaattgttggagttcttttaagaagaatataaattgattatttttttttatttaaagggatagttgattcctggggtgttttgaaattaagttggaattaagttgccttaagcatatttatgttggtaagaaacccttaatatgaggtttatcatgcccctttttcaagcagatttatgagcagatttctgtcacataagtcgtcttctgcttgagtatcctaatatttcaatgcatcaggggagcgctccactggataagcattttatttcccgcatggcatagtgtttttgcacctaaaaggctcaaagtgtgagaacctggttcctggatttgtttgaaattatttcaccaataaaagatcataaataaaatggtttctttcaagaaaaaaaaaaaaaa

SEQ ID NO: 152421 - DNA, 726 bp, Homo sapiens
gttttggccagaagttttaaaaatgacttacaccaattcagtgtgtcagggacagaggttttactgaagaccagttgtaggttaattgaagatgtatatgctccctagcaggttcttcagactcaagcaattttgtacgcatttatgtgttcagtggattggctgcttatgtttcgcaagtgttagtgcaaagataaccctcctaaaatgcaagaatgatggatttggatctgagttttagctccattttcattgtaatttgaatttcaggcgccaagcccatctttgtgtgcttgcatccaactgtgatgagcctatgtatgtcaagttggtggaggccctttgtgctgaacaccaaatcaacctaattaaggtaaggctgctaaggattgtgttgggactaatgttcagtgatgcttgtatatgggggtaaattctgtgaagtctcaagctgttcattttgtgcaggtgtaaacattacgtgcacctgatactgtcggccattttaaagatgattgtaggtagaagcattttatacctgcagaattgaatcctaattttgacgttggtatacaacaaagattagtagcaggcttgtaggtgatcttagtgctgtacatgatgacaactggctccctctactgaactgccatgaggaaactgccatgtcacccttctgattacagccaccttttggggttcatttaattttggtagtggtaatgg

SEQ ID NO: 152422 - DNA, 850 bp, Homo sapiens; identical to SEQ ID NO: 143668

SEQ ID NO: 152423 - DNA, 965 bp, Homo sapiens
cggacgcgtggggtcgcgcggaggcggaggccttgaggtgcgttcaagattcagcttcaccctgttatcccaccttctaggccaagcaaggcatttctccggaaggtgtaatggacgttaatactgctttacaagaaggttctgaagcttgcccctcatccacgtatggacctagacacgtgggaattcgcgaagctgaccaaagcccttagacaagcgccaagcccattctttgtgtgcttgcatccaacctgtgatgagccctatgtatgtcaagttggtggaggccctttgtgctgaacacccaaatcaacctaaattaagggttgattgacaacaatgaaactagggagaatggggttagggccttttgttaaaatttgacagaggaggggggaaaccccgtaaaagttggtttggtttgcagttgttgttagtagttaaggtaagtcaccgtttattctagggatgaaggttatgctgggtaatcatataaaaccttgtattgaaataagttgaggatcttataaaaggaaaaaactgattcaacaggtttaaagcattttctgcatttcaggaaaaaaataaaagctgtaatttacaagccagccaatgaatctgcttacctgattgtgtttgtgcagacatactttaaaaactggcaatagtaaagcccatgttacgagccttaagggacattgaagtcgttaaggtccctgagaatggctataacaaatcttagtgatgggaaacatttttataagacatagctaattgttgaagctcccctataattgatactaatagcttggtgaaattcctaaatattaacaagaaattgcatgcgtgttttgttttttttaaggactatggcaaggagtctcaggccaaggatgtcattgaagagtatttcaaatgcaagaaatgaagaaataaatctttggctcccaaaaaaaaaaaaaaaa

SEQ ID NO: 152424 - DNA, 654 bp, Homo sapiens; identical to SEQ ID NO: 144884
  misc_feature (1)...(654): n = a,t,c or g

SEQ ID NO: 152425 - DNA, 703 bp, Homo sapiens
  misc_feature (1)...(703): n = a,t,c or g
ccccgactcttctggtccccacagactcagagagaacccacccatggttgctgtctcctgccgacaagaccaccgtcaagggcccgcctggggtaaggtcggcgcgcacgctgtgcgcagtatgtgtgcggaggccctggagaggatgttcctgtccttccccaccaccaagacctacttcccgcacttcgaacctgagccacggtttctgcccaggtttaagggccacgggcaaggaaggtggccgacgcgcttgaccaacgccgtggcgcaacgtgggacggacattgcccaacgcgctgttccgcccttgagcgaccttgcacgcgcacaagctttcgggtgggacccggttcaactttcaagctcctaaaggccactggcctgcttggttgaccctggcccggcccaccttccccggccgagttcaacccctggcggttgcaacgtcttccctgggacaaagtttcctgggtttcttgttgaagcaccgttgcttgaaccttccaaattaccgttaaagcttggaagcctcgggtgggccatgctttctttgcccctttggggcttccccccagggcccttcttccctttctggaaccgtaacccccgtggtcttttgaataaaattttgaattgggggggcaaaaaaaaaaaaaaaaaaaagatctttnaatttaagggggcggaaagtttatttcaa

SEQ ID NO: 152426 - DNA, 1155 bp, Homo sapiens
ggatacagtgatgacttggtctgcctctaggtggcagggagccattttgggttttcgaacagaaaagtgacataatgaatgctgagttcttaggaagattaatccaggagtagtctccaggatgtactggaaggagagaagctgaaagcagggaggctgctgtgtttgcagttggctgcccagtgctacctctgcagagacaatcaatgtcctgaaggtagctggtatgtctgtgtgcactgacacgagccttcctaccaagccccaggggctccatgctggagaatgcacgtagggctagggtgagcactaacttcacttcaggagagcaaggaacagtgtggctcttccatttttcaagtctgtaagcacatcacccttttgttcttcccttgagctgtgttctctgacagctgttttgttggtaaagccagcagcccctaaagcacgtcccagccttgtttcctctgtgctttcccccaccactgctgctgcaacgcctcatttgctgggccactttagtggtgggaaccattaagaggctgagtgacttaaaggagattgagtctgtctcgaccccgagagagagtgggatggatggatgcatcgtctcatttagaaagtgtttgcctctgactctaacacactcttctctcttttctttacctccctccctgtcttcctcccttcccctcctttccctaaccccctttccctccccctttctccttctctctcacagtgtaggcaccacttctcctaacaatttaaggctttcctctctgccttgggctgaagtgaggaagaggagtgctgttcctgccttcctagcccagctgggtctgaccagaggctactgtgtacccatttaccatgcgtgattgttaactcagagtggggtgtagccaggtattgactgaatgtatgttcttgctgacctgtgtttttttctgtagggaccaaagcagtatccttacaataatctgtacctggaacgaggcggtgatccctccaaagaaccagagcgggtggttcactatgagatctgaggaggcttcgtgggcttttgggtcctctaactaggactccctcattcctagaaatttaaccttaatgaaatccctaataaaactcagtgctgtgttaaaaaaaaaa

SEQ ID NO: 152427 - DNA, 1716 bp, Homo sapiens
tggtggaattcgtacatcagagaattcatatttgatagagaaattgtggcatatacaggtagtaaagaaagcacattgtgtcaatggatttatcccactgaacaatttgaatgaagacaatgtggaatggctttgagatacagttcagtttttattaggcatcaatttgtattggtgtgaacttttcaaaatgtaaatcatatatgcagtttctttggtatgacctgtgttaactcagattcagagaatttataatgtatttttttaataacataagaaaacttttctgatattcctctagttttggattgccaaaatattcacagtagaggaaaactgagaaaacgtaggaaaccattctttatacttgcatgtaaacatcttccagcaacaatcatttattgttaaacctggaaaaagccattacacaggaaacctctgttgatataagcgatgatgggaaaggctatttagccactctgcatatttaatgctcatgatcaacatctgcttcctatagctgggatgatatgggggaagatatttatcccttctggggatcatatataaatgatgatagtagtacctacagtatagtgctgttagaattacgtgagttagatgtggaggtcagagtggaagcaggtgtgagagggtcccgcagaagaaaacatggctgccaaagtgtttgagtccatcggcaagtttggcctggccttatctgatgcaagatagcatggtgaactctgccttatgtaatgtgtatgctgggcacagagctgccatctttgaccaatttcgtggagtacagaacattgtggtatgggaagggactcactttctcatcccatgtgtacgaaaaccaattatgtttgactgctgttctcaaccacgtagtccgccagtcatcactggtagcaaagatttacagaatgtcaacatcacactgtgcatcctcttccggcccatcactagccagcttcctcgcatcttcaccagcattggagaggactacgatgagtgtgtgctgccgttcattaccacggagatcctcaagtcactggtggctcgctttgatgctggagaactaatcacccagagggagctggtctccagccaggtgagcaacaaccttatggagtgagcagccacctttgggctcattctggacgacgtgtctttgacacatctgaccttcttgaaggagttaacagacaggtggccccccaggaagcagagagcgccagatttgtggtggaaaaggcggccatcatctctgctgagggtgactccaaggcagctgaagctgatcgccaactcactggccactgcaggggacggccagagcgagctgtgcaagctggaagctgcagaagacattgcataccagctctcatgctctcggaacatcacctgcctgccggcagggcagtccgtgctcctccagctgccctagtgaggccccagcctacctgcacctccgtgaggcaactgggccccagccccgatgattcgtaacaccacctttcgccctcaccccagaaatcactgaaatttcatgattggcttaaagtgaaggaagtaaaggtaaaatcacttcagatctctaaaaaacaaagatttacatgagttagtacatccacagattatgggtatggacatggaatatactgttacgttcaattaccattagcttctgtatataataatatcaaa

SEQ ID NO: 152428 - DNA, 961 bp, Homo sapiens
ggagactaatcaccagaagagagctggtctccaggcaggtgagcgacgaccttacagagcgagccgcccaccttggggctcatcctgggatgacgtgtccttgacaccatctggacttcgggaaaggagtttcacagaaacgggtggaagccaaacaggtggctcagcaggaagcagagagggccagatttgtggtggaaaaggctgagcaacagaaaaaggcggccatcatctctgctgagggcgactccaaggcagctgagctgattgccaactcactggccactgcaggggatggcctgatcgagctgcgcaagctggaagctgcagaggacatcgcgtaccagctctcacgctctcggaacatcacctacctgccagcggggcagtccgtgctcctccagctgccccagtgagggcccaccctgcctgcacctccgcgggctgactgggccacagccccgatgattcttaacacagccttccttctgctcccaccccagaaatcactgtgaaatttcatgattggcttaaagtgaaggaaataaaggtaaaatcacttcagatctctaattagtctatcaaatgaaactctttcattcttctcacatccatctacttttttatccacctccctaccaaaaattgccaagtgcctatgcaaaccagctttaggtcccaattcggggcctgctggagttccggcctgggcaccatgcatttggcagcacgcaggcgggtgcagtatgtgatggactggggagcacaggtgtctgcctagatccacgtgtggcctccgtcctgtcactgatggaaggtttgcggatgagggcatgtgcggctgaactgagaaggcaggcctccgtcttcccagcggttcctgtgcagatgctgctgaagagaggtgccggggaggggcagagaggaagtggtctgtctgttaccataagtctgattctct

SEQ ID NO: 152429 - DNA, 911 bp, Homo sapiens
  misc_feature (1)...(911): n = a,t,c or g
atggataataaattagatgaacgggtcactcaagggtcctttggtgatgggcgagacagagaaaggggcaggaagcgtaagaaggttggaactttctaccagagacagggcaggctacaccgaggaggtgatattgaagcagagacccagaggagagcacacggccgcggagatgacgtcacgcaagcaacggcgctngacgtcacatatcaccgtggtgatgggcgtcacgtggccatgtagacgtcacgaagagatatagcgatggcgttcgtgcagattgcaggcacgttcgcacacagacatggggaacttggcatgacgtctcaccgagatgcagcgacgacgtcacgggccatgtcgacgtcacacatattaatgtcacacagacgcggcgatggcatcacacagacggtgatgatgtcacacacagacacagtgacaacaacacaccatgacaaccgacacctatagatatggcaaccaaacatcacatgcacgcatgccctttcacacacactttcttacccaaattctcaccttagtgtcacgttcccccgaccctgggcacacgggggcaaggtacccaccaggatccattccccttcccgcacagccctggggccccagcaccttgccctcctccagcttcctggggcctcccaggccatttccttcacccccagtgcctggacccggaggtgagaacaggaagccattcacctccgctccttgagcgtgagtgtttcccaggacccccctcggggccctgagccgggggtgagggtcacctgttgtcgggaggggagccactccttctcccccaactcccagccctgcctgtggcccgttgaaatgttggtggcacttaataaaaaattagtaaatccttaaaaaaaaaaaaaaaaaaa

SEQ ID NO: 152430 - DNA, 455 bp, Homo sapiens
  misc_feature (1)...(455): n = a,t,c or g
agggtgagcaggccngnnnaattganaattgatgacccttagaccatgcggtggaattcgctggtgcaaacagctgcacagcaagtggcagaggataaatttgtttttgacttacctgattatgaaagtatcaaccatgttgtggtttttatgctgggaacaatcccatttcctgagggaatgggaggatctgtctacttttcttatcctgattcaaatggaatgccagtatggcaactcctaggatttgtcacgaatgggaagccaagtgccatcttcaaaatttcaggtcttaaatctggtaattattgaacatctacttgctgcctactttcaacatctgcatgtgtgtgtgaatattaaatatcacaccaagacattgttcagaggagacagaatagtgagctgagataaatgagaatctctctatggaagattagactggagcatgaact

SEQ ID NO: 152431 - DNA, 1114 bp, Homo sapiens
cccggaagtacttgttgcctgagcagtgggctgcttaggaagagaaggtcagagttcgcgggggcagaggcattcttgccgctggcccagtcactatgtagtggaggggcagacaccctcccgcaaattctggaaggttcttagtctcgactagggcagtagccccaggactcctagtcgccggcttcaggtcactgccggctgaacggagctgccgtcgccatgtttggctgcttggtggcggggaggctggtgcaaacagcttgcacagcaagtggcagaggataaatttgtttttgacttacctgattatgaaagtatcaaccatgttgtggtttttatgctggggaacaatcccatttcctgagggaatgggaggttctgtctactttttcttatcctgattcaaatggaatgccagtatggaaactcctaggatgctgtcacgaatgggaagccaagtgccatcttcaaaatttcaggtcttaaatctggagaaggaagccaacatccttttggagccatgaatattgtccgaacctccatctgttgctcagattgggaatttcaggggaattattagacagtatggctcagcagactcctgtaaggtaatgctgctggtatcctcagtttgactcattcactcagttcacacaaaagatgttggacaatttctacaatttttgcttcatcatttgctgtctctcaggcccagatgacaccaagcccatctgaaaatgttcattccggccaaatgtggttctgaaatggtatgaggcattttctgtctccaatattaaggctttttataactgaatatctattttgtctatgaatatattccttttttgacatttaaacatattcttttattgtgaacatcagcactgcatgccattaaagtatgtactatagagatctgatgagaaacagttcttaccctaaatattttgttatattgtcgccattatgaatttataaagacaggaaaatatagttgcctatgttttagggaccactattaaagcttataaatatttgtgtattttcatttagaagtaccatctatgagagtagtttatactgcactgtgtacatgaatggctaatga

SEQ ID NO: 152432 - DNA, 861 bp, Homo sapiens; identical to SEQ ID NO: 140546

SEQ ID NO: 152433 - DNA, 1126 bp, Homo sapiens
  misc_feature (1)...(1126): n = a,t,c or g
ggtcgaccggcaccggaagacggaggtcctctttcgttgcctaacgcagccatggctcgtggtcccaagaagcatctgaagcgggtggcagctccaaagcattggatgctggataaattgaccggtgtgtttgctcctcgtccatccaccggtccccacaagttagagagagtgtctccccttcatcatttttcctgaggaacagacttaagtaatgccctgacaggagactgaagtaaagaagattttgcatgcagcgggttcattaaaatccgatggccaggtccggaactgatataacctacccttgctgggattcatggatgtcatcaagcattgacaaagacgggagagaattttccgttctgatctaattgacacccaaggggtccgcttttgctgtaacatcgtattacaccttgaggaggccaagtacaaagttgtgccaaaatgagaaagatcttttgtgggccaacaaaaggaatcccttcatctggtgacctcatgatgccccgcaccccatcccgcctacccccgaaaccccctcatccaaggtgaaatgaatacccattccagattgattttagagactggccaagatttactgatttcnattcaaagttcgaccacttggtaaccctgtgttatggtgacctggaggtgcctaacctaggaagaaattgggtgttgatcacccaacagaggagaggcacccctggatcttttgaccgttggttcacgtgaaaagatgccaatggcaacaagcttttggccacttcggacttttccaacattttttggttattgggcaagggcaacaaaccatgggatttctctttccccgaggaaagggtattccgcctcaccatttgcttgaagagagagacaaaagactggcggccaaacagagcagttgggtgaaatggggtccctgggtgacatggtcagatcttttggtaccgtaattaaaaaccattgtggcaggattaatagcaaacaaaaaaaaagggggcgccgtttaaaaaattacaactttaattacgccggtctgccgaggttaaagctttttaaagggggcccaatatatcatttacttgcccggggttataaagaccggagagggaag

SEQ ID NO: 152434 - DNA, 442 bp, Homo sapiens
cgcatccgcaaactctgtctcaacatctgtgttggggagagtggagacagactcacgcgagcagccaaggtgttggaacagctcacagggcagacccctgtgttttccaaaggtgcgggagtatgagttaagaaaaaacaacttctcagatactggaaactttggttttgggatccaggaacacatcgatctgggtatcaaatatgacccaagcattggtatttacggcctggacttttatgtggtgctgggtaggccaggtttcagcattgcagacaagaagcgcaggacaggctgcattggggccaaacacagaatcagcaaagaggaggccatgcgctggttccagcagaagtatgatgggatcatccttcctggcaaataaattcccgtttctatccaaaagagcaataaaaagttttcagtgaaaaaaaaaaaaaaa

SEQ ID NO: 152435 - DNA, 224 bp, Homo sapiens
gggggggccgttttaaagaacccttgggggggccaaagttaacgcgggctggcaaggaaaaagttttttccttatggggggccgatttaaaacctgggcccggcccgtgttttaacaacgccggaaggggaaaatttgttacttgggaatttttggaaagaaccttaattttgggggggggacatattggcccaacctccctacagaaattaaaggctttaggg

SEQ ID NO: 152436 - DNA, 434 bp, Homo sapiens
cactggaaaataggctgggttaggggggtgctgaaagttccagcctccaaagcaaacttatagtatggctgtgtgttgcgtgggatgctggtggcagctttgtcagacacagatcatgggtcttgctccagaatccattgggctgccaagtgactctttgaagatctgtctgtaatgtgtgagtcttgtccatctgctcttgactctgagctggctaggtgactgttggttattcctgggacaggtgctgggtaggccaggtttcagcatcgcagacaagaagcgcaggacaggctgcattggggccaaacacagaatcagcaaagaggaggccatgcgctggttccagcagaagtatgatgggatcatccttcctggcaaataaattcccgtttctatccaaaagagcaataaaaagttttcagaaaaatgtg

SEQ ID NO: 152437 - DNA, 669 bp, Homo sapiens
gatcatggcgcaggatcaaggtgaaaaggagaacccccatgcgggaaacttcgcattccgcaaactcgttctcaacatctgttgtgggggagagtggagatcagaccgacgcgagccagcccaggtgttggagccagctcaacagggcaagaccccctgtgttttcccaaaagcctagcatacacctgtcaaatccctttgggcatcccggagaaaatgaaaagattgcctttcccactgccaccagttccgagggggccaaggcccgcagaaatctctgcagaaggggtcttaaaaggttcagcgagtatggagttcaggacaacaccaccttctcaggatactgggaaacttttggttttgggatcccaggaacacatcgatctgggtatcaaatatgacccaagcattggtatctacgggcctgggacttcctatgtggtgctggggtaaggccaggttttcagcatccgcagaccaagaagccgcagggacaaggctgcattgggggccaaacacagaatccagcaaagaggaggccattgcgctggtttccagcagaagtatgatgggatcatccttcctgggcaaataaattccccgtttctatccaaaaagagcaataaaaagttttcagtgaacaaaaaaaacaataaaaaaataactctc

SEQ ID NO: 152438 - DNA, 978 bp, Homo sapiens
tacatgttaagtacggtttaatcacaactttgaacaagaattttatcataaattagtaagaagtagaacataaaaaaagttacacatgctagatattaagttatttaaaaaatgaaaactgaagtcaattttattacaaaagattaaactcattagccaccaaaaagaaatataattccaactcagaattgaaagtaattttttattgataaacatttacactagaattagaaatgtcagtagaaaaataaaatttaaataattttctattgtacaaagatttgatcattttgactggtagcagttaggtgaaataacataatataaaaagttaagctgatctgagtcacaaccagccttatagagggcccaaaaaagaaatgcaagtaccccgacatttctggattatggtctgctaatggcaccgatgcttcacattccaggaaatggttacttagggaaggttgatatgtgctgcagcataataggaacttaattcaaaccagagcaaccagaaaggatactgggaggcaaaagccaaaatacaatttaaaatcttaaaaaaaataaggaacggtttaaaggtaattaatgaacttttcctcacctagtgtaaaacattttcatagaagtaagattttgtggtcacaaaaaaaagcacagatacctcttttagaatattcatgatgctcttgtgtatggaacttaagttttcatggaaatgctttccacctcaaaaccccgtattcaagaatcaagaaggccaagcactgatggctcatgtctatagtcccatcacgttgggaggccgaggcgggtggatcacttgaagtcaggagtttgagaccagcctgtccaacataatcaaaccctgtctctactaaaaatacaaaaattagctgggccttgtggcgggtgccagtaatcctagctactcagcggccaaggcaggacaatcacttgaacccaggtcgacgc

SEQ ID NO: 152439 - DNA, 1163 bp, Homo sapiens
  misc_feature (1)...(1163): n = a,t,c or g
tcgctttttttcgggggggagtgtgcgtggggtttgccatgcagactcgtgcatgcaacgcattaaccatcggcctaccctgaggaggatgatgaccgactgatgcaccattgccactgactagatctagctgagaagacatgtacccgatctggcgctctaaggagggagaatgctctatgcctcatttaaataacataactccgtatttgaaagttgccttagctgcttacgcttgctgatagccagtattggatgctgctcatgaaagaggatggagcccatctcggcccttatctattctaggacgcactatatgtgactgtgactttcaaggacatttgtttgccatttgctgatttttttttgggaagttaatttctaacattctttcactgataaatgaagaaaagtattgcacctttgtaatgcaccaaatgaattgagtttgtaattaaaaaaatttttttccctttcagtcattgtcttatatgcttagccatagatttgcagctccagtagtatatgggagttcctaggaatgcagctgaagacctgttatgttagagggaaataccgaggggtggtgctagaagaacagaacatcctgtggaaatgaatccacatccctctccaagttagggaggatggaaggccctgccttccattaagaaagctggggggtaagggtgggggtgggggagaaccacttaaccaacatggggacccagtccaggggaatcccccttatttcctgttttgccatatgaggaacccctagagcagcccaggtgaggctttctaagttttaataaaaatcatggaaagactcttaatgcagactcttcgttaagtgttaatagggatttttttcagctttattttgggttgcagtttccaattttttaaaaatgtttgaggtaaatcttttcccaccttcccaaacctaattcttgtaagatgcattaagtgttgaaccaatgcttttctcatgtctcaattcttvgatatatgcattcttttcagatgtattaaacaaacaaaaacccttcnnnnnnnnnnnnnnnggggggcgcccttttaaaagaacccttggggggcccaattttaccgggggcaggcaaggtaaagtttttttctttagggggggccaaataaaaccc

SEQ ID NO: 152440 - DNA, 413 bp, Homo sapiens
aaggggtcctgtctgctctaccccttgctggtaggacaccgaggtaaagccacagtctgctctaccccaggcctcggcgctgacgatctgggtgtcctaccagcaaggggtcctgtctgccaccatcctctatgagatcctgctagggaaggccaccctgtatgctgtgctggtcagcgcccttgtgttgatggccatggtcaagagaaaggatttctgaaggcagccctggaagtggagttaggagcttctaacccgtcatggtttcaatacacattcttcttttgccagcgcttctgaagagctgctctcacctctctgcatcccaatagatatccccctatgtgcatgcacacctgcacactcacggctgaaatctccctaacccagggggaccttagcatgcctaagtg

SEQ ID NO: 152441 - DNA, 968 bp, Homo sapiens
ccactctgagaggggctgtgctgagaggcgctgctgggcgtctgggcggaggactcctggttctgggtgctgggagagcgatggggctctcagcggtgggaaggacccgagctgagtctgggacagcagagcgtgcagcaccggtttttgtcctgggcctccaggctgtgagcacagatacgcagatgtttggcccaggcacccggctgacagtgctcgaggacctgaaaaacgtgttcccacccgaggtcgctgtgtttgagccatcagaagcagagatctcccacacccaaaaggccacactggtgtgcctggccacaggtttcttaccccgaccacgtggagctgagctggtgggtgaatgggaaggaggtgcacagtggggtcagcacagacccgcagcccctcaaggagcagcccgccctcaatgactccagatactgcctgagcagccgcctgagggtctcggccaccttctggcagaacccccgcaaccacttccgctgtcaagtccagttctacgggctctcggagaatgacgagtggacccaggatagggccaaacccgtcacccagatcgtcagcgccgaggcctggggtagagcagactttggcttcacctccggtaaagtcttaccagcaaggggtcctgtctgccaccatcctctatgagatcttgctagggaaggccaccttgtatgccgtgctggtcagtgccctcgtgctgatggccatggtcaagagaaaggattccagaggctagctccaaaaccatcccaggtcattcttcatcctcacccaggattctcctgtacctgctcccaatctgtgttcctaaaagtgattctcactctgcttctcatctcctacttacatgaatacttctctcttttttctgtttccctgaagattgagctccaaccccaagtacgaaataggctaaaccaataaaaaattgtgtgttggga

SEQ ID NO: 152442 - DNA, 1214 bp, Homo sapiens
cgctattctttcttcaaagcagtcatgggaatcaggctcctctgtcgtgtggccttttgtttcctggctgtaggcctcgtagatgtgaaagtaacccagagctcgagatatctagtcaaaaggacgggagagaaagtttttctggaatgtgtccaggatatggaccatgaaaatatgttctggtatcagcgacaagacccaggtctggggctacggctgatctatttctcatatgatgttaaaatgaaagaaaaaggagatattcctgaggggtacagtgtctctagagagaagaaggagcgcttctccctgattctggagtccgccagcaccaaccagacatctatgtacctctgtgccagcagtttattcaatagcgggtaccaagagacccagtacttcggcgccaggcacgcggctcctggtgctcgaggacctgaaaaacgtgttcccacccgaggtcgctgtgtttgagccatcagaagcagagatctcccacacccaaaaggccacactggtgtgcctggccacagggtatcttccctgaccacgtggagctgagctggtgggtgaatgggaaggaggtgcacagtggggtcagcacggacccgcagcccctcaaggagcagcccgccctcaatgactccagatactgcctgagcagccgcctgagggtctcggccaccttcttggcagaacccccgcaaccacttccgctgtcaagtccagttctacgggctctcggggaatgacgagtggacccaggatagggccaaacccgtcacccagatcgtcagcgccgaggcctggggtagagcagactgtggctttacctcggtgttcttaccagcaaggggtcctgtcttgccaccatcctctatgagatccttgctaggggaaggcccaccctgtattgcttgtgctggtaagcgccccttgtgttgatggccaatggtcaaagagaaaggatttctgaaggcagccctggaagtggagttaggagccttctaacccgtcatgggtttcaatacacattcttcttttgccagcgcttctgaagagctgctctcacctctctgcatcccaaatagatatccccctaatgtgcatgcacacctgcacactcacggctgaaatctccctaacccagggggaccttagcatgcctacgctgactaaaccgaataaaaatgttctggtctggcctgactctg

SEQ ID NO: 152443 - DNA, 465 bp, Homo sapiens
aaggtcaagggtggatagctgatggactgtgatgacaacatgtaatatcacagctacttgaaagtgctggaataggcagtgccttagaaacaagtggttagatggttattttagtcagaaaacagcagttatagttgaatatttagaaaaatgtttttctttttttcctcatagtaccatttgaagatgtttagtggttctaacaccaatttaaagtctttccacaaaaatgaactccaaaccttttcgtacatcacttgaagttatctgaggagaaatgggaataaatgaacacttttgagtttactaataaaacctagtttttaaaactatgcaacagtaaattacttctaaaagatggtttcatctcaagttttccacacaaataaaaaaacgtgttataatcgcacctcatcttttaaccctctcagcactcaaactaatattttgctttagaacctgaat

SEQ ID NO: 152444 - DNA, 2981 bp, Homo sapiens
ttccttccttccgcccgcccgccggcccgccctaagagttgaccacgccgcaatgaagagcttcttacagtgaaagcaaagtaggtcgagtccactgaaaatgcctttaagggacaaatactgtcagactgaccaccatcatcacggatgctgtgaaccagtttatatcctggaacctggagatcctcctttgttacagcaaccactacagacatccaaatctggtattcaacaaataattgagtgctttcgatcaggaactaaacaacttaagcatatattattaaaagatgtggaccactaatttttgaatgtaagttatgccgcagtctcttcagaggattaccagatttaattacccataaaaaattctactgcccaccaagtctccagatggatgacaaccttcctgatgtaaatgataaacaaagccaagccataaatgatctcctagaagccatatattccagtgtgggacaaacgagaatatattattaagctagaacccatagaaactaatcaaaatgcagtatttcaatatatttcgaggactgataatcctattgaagtcacagagtcaagcagtactcctgaacaaaccgaagttcagatacaggaaactagcactgaacagtcaaaaacagtaccggttacagatacagaggtggaaactgtagagccccctcctgttgagattgttacagatgaagttgcacctacatctgatgaacaacctcaggagtcgcaggctgacttggaaacttctgacaattctgattttggtcaccagttgatatgttgtctttgtagaaaagaattcaattctagacgaggtgttcgccgtcacattcgaaaagtacacaagaaaaagatggaagaactaaaaaagtacattgaaacacgaaagaatccaaaccaatcctcctaaaggacgccagtaaggaatgttctagttccattaagtaggagttgtccagtatgttgtaaatccatttgctacaaaagcgaatgtaaggaggcattttgatgaagttcatagaggactaaggagggattcaattactcctgatatagcaacaaaagcctgggcaacctttgttcctgggttctatttctcctaaaaaatcttttaagactcgaaaacaaaagtcttcttcaaaggctgaatacaatttaactgcatgcaaatgcctcctttgcaagaggaaatatagttcacaaataatgcttaaaagacatatgcaaattgtccacaagataactctttctggaacaaactctaaaagagaaaaaggccctaataatactgccaacagttcagaaataaaagttaaagttgaaccagcagattctgtagaatcttcacccccttccattacccattctccacagaatgaattaaagggaacaaatcattcaaatgaaaaaaagaacacaccggcagcacagaaaaataaagttaaacaagactctgaaagccctaaatcaactagtccgtcggctgcaggtggccagcaaaaaaccagaaaaccaaaactttcagctggctttgactttaagcaactttactgtaaactttgtaaacgtcagtttacttccaaacagaacttgactaaacacatcgagttgcacacagatggaaataacatttatgttaaattctacaagtgtcctctttgcacttatgaaactcgtcggaaacgtgatgtgatacgacatataactgtggttcataaaaagtcatctcgttatcttgggaaaataacagccagtttagagatcagagctataaaaaagcctattgattttgttctaaataaagtggcaaaaagaggcccttcgagggatgaagcaaaacatagtgattcaaaacatgatggcacttctaactctcctagtaaaaagtatgaagtagctgacgtcggtattgaagtaaaagtcacaaaaaacttttctcttcacagatgcaataaatgtggaaaggcatttgccaaaaagacttaccttgaacatcataagaaaactcataaggcaaatgcttccaattcacctgaaggaaacaaaaccaaaggccgaagtacaagatctaaggctcttgtctgataacttcaagtgatgtacgaaaaggtttggagttcatttttgtggaaagactttaaattggtgttagaaccactaaacatcttcaaatggtactatgaggaaaaaaagaaaaacatttttctaaatattcaactataactgctgttttctgactaaaataaccatctaaccacttgtttctaaggcactgcctattccagcactttcaagtagctgtgatattacatgttgtcatcacagtccatcagctatccacccttgaccttgtgcatttggtcgacagtttctacaaaaatgttacaaattttgttttctaaacaatttgttgattaagtgatcaacaacctgaagaaaatatcaatttttaattgacaaagactttatatcttagtgattttagttttgtttctctttatttggcaacattttcatctgaattgtatagatatatgattttctagtgagtgtatgttaggaacaaaagacaaaatagtatcaacacattataaatatttagcttactaaatatttgtaattatttttacatccatttatttctagcttgttctccagcacttcagtgtttgaaagtttcatcctaaaatatatactacaggaaagctgcagttcattttcatgcatggatcattacatttttcacttgtaaatgtaggtttttatgaaaattaaacattcccctatttttctttaaattttatacaaagcactttaatgatagatgcaaccttatttttcagttcctatttttttaaagaccacacatttactaatgttaatatgaaggtaataaatagcttactgatattttatggatgcagacaatccatgcacaaccacttcttatgatactagtttat

SEQ ID NO: 152445 - DNA, 624 bp, Homo sapiens
ggcccagctgtgcccagatggatgggacagagacccggcagcggaggctggacagctgtggcaaagccaggggagctggggcttcctcaccccctcagcacaggaggactccctgtagcctcagaagatggagctctcagggcccctgagagccaaagcgtgacccccaagccactggagactgagcctagcagggagaccgcctggtccataggccttcaggtgaccgtgcccttcatgtttgcaggcctgggactgtcctgggccggcatgcttctggactatttccaggccaacactggacaaattgatgacccccaggagcagcacagagtcatcagcagcaacctggccctcatccaggtgcaggccactgtcgtggggctcttggctgctgtggctgcgctgctgttgggcgtggtgtctcgagaggaagtggatgtcgccaaggtggagttgctgtgtgccagcagtgtcctcactgccttccttgcagcctttgccctgggggtgctgatggtctgtatagtgattggtgctcgaaagctcggggtcaacccagacaacattgccacgcccattgcagccaggcctggagacctcatcacactgtccattctggct

SEQ ID NO: 152446 - DNA, 1780 bp, Homo sapiens
ggccggaattcccgtgtcgacgatttcgtcctgttccgggcggggttggggcggaagggctgtcaggcgcccagctgtgcccagatggatgggacagagacccggcagcggaggctggacagctgtggcaagccaggggagctggggcttcctcaccccctcagcacaggaggactccctgtagcctcagaagatggagctctcagggcccctgagagccaaagcgtggacccccaagccactggaggactgagcctagcagggagaccgcctggtccataggccttcaggtgaccgtgcccttcatgtttgcaggcctgggactgtcctgggccggcatgcttctggactatttccagcactggcctgtgtttgtggaggtgaaagaccttttgacattggtgccgcccctggtgggccctgaaggggaacctggagatgacactggcatccagactctccacagctgccaacactggacaaattgatgacccccaggagcagcacagagtcatcagcagcaaccttggccttattcaggtggcaggccactgtcgtggggctcttggctgctgtggctgcgctgctgttgggcgtggtgtctcgagaggaagtggatgtcgccaaggtggagttgctgtgtgccagcagtgtcctcactgccttccttgcagcctttgccctgggggtgctgatggtctgtatagtgattggtgctcgaaagctcggggtcaacccagacaacattgccacgcccattgcagccagcctgggagacctcatcacactgtccattctggctttggttagcagcttcttctacagacacaaagatagtcggtatctgacgccgctggtctgcctcagctttgcggtctctgaccccagtgtgggtcctcattgccaagcagagcccacccatcgtgaagatcctgaagtttggctggttcccaatcatcctggccatggtcatcagcagtttcggaggactcatcttgagcaaaaccgtttctaaacagcagtacaaaggcatggcgatatttacccccgtcatatgtggtgttggtggcaatctggtggccattcaaaccagcccgaatctcaacctacctgcacatgtggagtgcacctggcgtcctgcccctccagatgaagaaattctggcccaacccgtgttctactttttgtacgtcaaaaattaaattctatgtcatgctcgagactcttgctcttgctgggtgggtcccagggccatctgattttcttctacatcatctacctgggtggaggggtcagtcagtcataaacaagccagacctttgtgggtgctctaacctgctgggcagggcctgatccagggtgacaaatcctgctgtacctggcaaaaagtgaatggttcggctgacttggcaccaggccctgggatcctgacaaccactgcatcccctaccttacagggctgggggacctgctcggtactgggcctcctggggactctgctttttcactgactggctactgaagagcaaggcagagctggggtggcatcttcagaactgggcatctgggaccttccctaactggggccccgttgggtcccattttgctcattagaatttcctctcacatcagtgggatacagaattcagtttctcccttggcaaggtccttgggatggttgacccctgcctctgcagtagccttttgtgagtctgctaatgtagctctcacacacctcggctctggggttgatacctgagcctgcaatagagccctgaaa

SEQ ID NO: 152447 - DNA, 614 bp, Homo sapiens
  misc_feature (1)...(614): n = a,t,c or g
tcgaatcccagagttcgaggtggtgggactcaccgctctggccagggtgcttttgnaaacatgtgtcgtggaggccgaatgtttgcaccaaccaaacctggcgccgttggcatcgtagagtgaacacaacccaaaaacgatacgccatctgttctgccctggctgcctcagccctaccagcactggtcatgtctaaaggtcatcgtattgaggaagttcctgaacttcctttggtagttgaagataaagttgaaggctacaagaagaccaaggaagctgttttgctccttaagaaacttaaagcctggaatgatatcaaaaaggtctatgcctctcagcgaatgagagctggcaaaggcaagaagcctgtggtaggtaagaaaggaaagaaggctgctgttggtgttaagaagcagaagaagcctctggtgggaaaaaaggcagcagctaccaagaaaccagcccctgaaaagaagcctgcagagaagaaacctactacagaggagaagaagcctgctgcataaactcttaaatttgattattccataaaggtcaaatcattttggacagcttcttttgaataaagacctgattatacaggcagtgagaaaaaa

SEQ ID NO: 152448 - DNA, 1546 bp, Homo sapiens
cttttcctgtggcagcagccgggctgagaggagcgtggctgtttctctcttccgccattggcgtgtgctcgcccactgactatcggtgtacttccgaaaagggggagtcatctggcaaaaatgtcactttgccctgctgtattcaaggctcctattccgaccagatattgtggaactttgttcaaacccaaacttgcgcaaaaacaacagacagccctatgctgtcagtgaattaagcaggtcatcagactaagtgctgaagtcttggggtactggcagagctggtggctcgaaattcccagaagttcgaggtggtgggactcaccgctcttggccagggtgcttttgggaaacatgtgtccgtggaggcccgaatgttttgcaccaaccaaaaccctgggccgccgttggaatccgtagagtgaacacaaccccaaaaaacgatacgccatctgttctggccctggctggcctcagccctaaccagcaactgggtcatgtctaaaaggtcatcgtattgaggaagttcctgaaacttcctttggtaagttgaagataaagttgaagggttacaagaagaaccaaggaagctgtttttgctccttaagaaactttaaagcctggaatgatatcaaaaaaggtctatgcctctcagcgaattaagagcttgccaaaggcaaaatgagaaaccgtcgccgtattccaggggcagggggcccgtgcatcatctataatgaggataatggtattcatcaaggccttcagaaacattcctgggaattactctgcttaaatgtaagcaaagctgaacattttgaagccttgctcctgggtgggcatggtggaacgtttctgcattttggactgaaaagtgcttttccggaaagttaggatgaattgtacggcacctggcggtaaagcccgcttcccctcaaagaagtaactaccattctttcccattgcacaagattgattaatacagattcttagcagaattcttgaaaagccccagagatcccaaagagcccctccgggccaccacgccaagaagatccatcgccagagtcctaaagaagaaccccactgaaaaaactttgagaaatcatgttgaagcttaaaccccatatgcaaaagacccatgccgccggaaccacccattcttcgcccaggcccaggaatcacaaagctccggggtggataagggcaagttgttgcaccagcggcacttacaagccaaatcagatgagaaggcggcggttgcaggcaagaagcctgcggtaggctaagaaaggaaagaaggctccttgttggtgttaaaaaagcaaaaaaagcctctggtggggaaaaaaggcagcagctaccaaagaaaccagcccctgaaaagaagcctgcagagaagaaacctaactacagaggagaagaagcctgctgcataaactcttaaatttgattattccataaaggtcaaatcgattttggacagcttcttttgaataaagaacctgattatacaggcagtgagaaacatgaaaaaaaaaaaaaaaaa

SEQ ID NO: 152449 - DNA, 2199 bp, Homo sapiens
atgtcccgaaaggggccgcgagcggaggtgtgtgcggactgcagcgccccggaccctggctgggcatccatcagcaggggtgtgctggtgtgtgacgagtgctgcagcgtgcaccggagcctgggacgccacatctccattgtcaagcaccttcgccacagcgcctggcctcccacgctgctgcagatggtgcacacgcttgccagcaacggggccaactccatctgggagcactccctgctggaccccgcacaagtgcagagcggccggcgtaaagccaacccccaagacaaagtccaccccatcaagtcagagttcatcagggccaagtaccagatgctggcatttgtgcacaagcttccctgccgggacgatgatggagtcaccgccaaagacctcagcaagcaactacactcgagcgtgcggacaggcaacctggagacatgtctgcgcctgctctccctgggtgcccaggccaacttcttccacccagagaagggcaccacacctctgcacgtggctgccaaggcaggacagacactgcaggccgagctgcttgtagtgtatggggctgaccctggctcccctgatgttaatggccgcacacccattgactatgccaggcaggcggggcaccatgagctggcggaaaggctggttgagtgccaatatgagctcactgaccggctggccttctacctctgtggacgcaagccggatcacaagaatgggcattacatcatcccacagatggctgacagccttgacttatccgaattggccaaagctgctaagaagaagctgcaggcgctcagcaaccggctttttgaggaactcgccatggacgtgtatgacgaggtggatcgaagagaaaatgatgcagtgtggctggctacccaaaaccacagcactctggtgacagagcgcagtgccgtgcccttcctgcctgttaacccggaatactcagccacgcggaatcaggggcgacaaaagctggcccgctttaatgcccgagagtttgccaccttgatcatcgacattctcagtgaggccaagcggagacagcagggcaagagcctgagcagccccacagacaacctcgagctgtctctgcggagccagagtgacctcgacgaccaacacgactacgacagcgtggcctctgacgaggacacagaccaggagcccctgcgcagcaccggcgccactcggagcaaccgggcccggagcatggactcctcggacttgtctgacggggctgtgacgctgcaggagtacctggagctgaagaaggccctggctacatcggaggcaaaggtgcagcagctcatgaaggtcaacagtagcctgagcgacgagctccggaggctgcagcgagagatccacaagctgcaggcggagaacctgcagctccggcagcctccagggccggtgcccacacctccactccccagtgaacgggcggaacacacacccatggcgccaggcgggagcacacaccgcagggatcgccaggccttttccatgtatgaacctggctctgccctgaagccctttgggggcccccctggggacgagctcactacgcggctgcagcctttccacagcactgagctagaggacgacgccatctattcagtgcacgtccctgctggcctttaccggagcaagctttcccgccacggcagtggagccgacagtgactatgagaacacgcaaagtggggacccactgctggggctggaagggaagaggtttctagagctgggcaaagaggaagacttccacccagagctggaaagcctggatggagacctagatcctgggcttcccagcacagaggatgtcatcttgaagacagagcaggtcaccaagaacattcaggaactgttgcgggcagcccaggagttcaagcatgacagcttcgtgccctgctcagagaagatccatttggctgtgaccgagatggcctccctcttcccaaagaggccagccctggagccagtgcggagctcactgcggctgctcaacgccagcgcctaccggctgcagagtgagtgccggaagacagtgcccccagagcccggcgccccagtggacttccagctgctgactcagcaggtgatccagtgcgcctatgacatcgccaaggctgccaagcagctggtcaccatcaccacccgagagaagaagcagtga

SEQ ID NO: 152450 - DNA, 207 bp, Homo sapiens
agcatggactcctcggacttgtctgacggggctgtgacgctgcaggagtacctggagctgaagaaggccctggctacatcggaggcaaaggtgcagcagctcatgaaggtcaacagtagcctgagcgacgagctccggaggctgcagcgagaggagctagaggacgacgccatctattcagtgcacgtccctgctggcctttaccgg

SEQ ID NO: 152451 - DNA, 1065 bp, Homo sapiens
atgacctggcagcgagggaaccgcagctttgtcttcaggggccaagacacaagcgccgtggtcatggagattgaccacgaccgccgggtggtgtacacagagactctggcactggctgggcaggaccgggagctgctgctggctgctgctcagcccactgaggaacaggtgctgagccggcttaccgcgcccgtcgtcaccactcagcttgacaccaagaatatctcctttgagaggaacaagactggcatcctgggctggcgcagtgaaaagacggagatggtgaatgggtatgaagctaagacagggcgagtggataagaactacccactggtcactgggcacactgcccctgtgctggatattgactggtgtccacacaatgacaacgttatcgccagtgcctcagacgacaccaccatcatgggggccgccagctccgcagagcaaaggccagagccagggcctaaggagaggagagagagcaatcaccctgctgcccctctcagagaacccgagggccaacaagcctgggcccagcgtctctcacctgcacacaccctcttcggcacagcctccctctaccggggagttggctcggagggagcaggccctgaaaggctttcacagctggaagggaagaggtttctagagctgggcaaagaggaagacttccacccagagctggaaagcctggatggagacctagatcctgggcttcccagcacagaggatgtcatcttgaagacagagcaggtcaccaagaacattcaggaactgttgcgggcagcccaggagttcaagcatgacagcttcgtgccctgctcagagaagatccatttggctgtgaccgagatggcctccctcttcccaaagaggccagccctggagccagtgcggagctcactgcggctgctcaacgccagcgcctaccggctgcagagtgagtgccggaagacagtgcccccagagcccggcgccccagtggacttccagctgctgactcagcaggtgatccagtgcgcctatgacatcggcaaggaacttggaaacaatggtttttaa

SEQ ID NO: 152452 - DNA, 1302 bp, Homo sapiens
ttactggaacgttgtgagggtaaacaactggcggtatggatgcggcgggaccagagaaaaatcactcagggtcaatgccagcgcttcgttaatacagatgtaggtgttccacagggtagccagcagcatcctgcgatgcagatccggaacataatggtgcagggcgctgacttccgcgtttccagactttacgaaacacggaaaccgaagaccattcatgttgttgctcaggtcgcagacgttttgcagcagcagtcgcttcacgttcgcagtaaggcaaccccgccagcctagccgggtcctcaacgacaggagcacgatcatgcgcacccgtggccaggacccaacgctgcccgagatgcgccgcgtgcggctgctggagatggcggacgcgatggatatgttctgccaagggttggtttgcgcattcacagttctccgcaagaattgattggctccaattcttggagtggtgaatccgttagcgaggtgccgccggcttccattcaggtcgaggtggcccggctccatgcaccgcgacgcaacgcggggaggcagacaaggtatagggcggcgcctacaatccatgccaacccgttccatgtgctcgccgaggcggcataaatcgccgtgacgatcagcggtccaatgatcgaagttaggctgcctggacagcatggcctgcaacgcgggcatcccgatgccgccggaagcgagaagaatcataatggggaaggccatccagcctcgcgtcgcgaacgccagcaagacgtagcccagcgcgtcggccgccatgccggcgataatggcctgcttctcgccgaaacgtttggtggcgggaccagtgacgaaggcttgagcgagggcgtgcaagattccgaataccgcaagcgacaggccgatcatcgtcgcgctccagcgaaagcggtcctcgccgaaaatgaccacagagcgctgccggcacctgtcgtcgtgcaagtgcgtgtctccttcagagaaaagcgtgccgaggtagactaggccccgggcagcaaaaaccctgtcccgtcgccagcgccccgcaccgccagagcgactggagcagacgcgagcgctgggcacgtagccggtggcgcgcacgctcagcccgaggccgcacgggaggctgtctggcgtgcgcgcccccgcggcggtgggcggggtccggggcggggccgcaggagcagtaggtgttagcagcttggtcgcgacaggtgcgctaggtagagcgccgggacaagtcaggcggttgatgctgtcatctgggatctcagctggggccat

SEQ ID NO: 152453 - DNA, 1063 bp, Homo sapiens
  misc_feature (1)...(1063): n = a,t,c or g
ggcattttagattatctggataacatatcccctcagcaaatacgaaaactcttctatgttctcagcacactggcatttagcaaacagaatgaagccagcagccacatccagcaactacactcgagcgtgcggacaggcaacctggagacatgtctgcgcctgctctccctgggtgcccaggccaacttcttccacccagagaagggcaccacacctctgcacgtggctgccaaggcaggacagacactgcaggccgagctgcttgtagtcgccgcaaagaatccggaaaaacgtgaatataccaccgaaaacggatctccggctgaaacccctacgtgtagcgcaggaaaacgaggaacaccacgaaccaagatgtcggacatctccagcgaggacctgcgtcgtgaaattcaggcggttttgaaggacgccgatttggcgaccatttcggcaaagagggtgcgcgagcaggtggagggaaagctgaactgctcgttgctgagccgcaagaaggagttcgacaagatcgtgatggaggtgatcaacgagcagcaggacgaggaggacgaagacgatgacgagggcaaggatcccgatgccgatcccgacgatgagagcgagcccagcgaggaggaggaccccagcagcagcgaggaggaggccgccaagaagaagaagcagacccccaagaagaggccacagcccacgaagcacaaggcgcccaagaagaagcgcaagaccctaaatgccgacgattccggcaccgctgatgaacgactgccnnnnnnnnnnnnnnnnnnnnnnnnnnnnnnnnnnnnnnnnggtgtagagtacaatagcacacttcacacttgtcctgaagtggttggtgccttagtgacccatatctgcagtgggaatgaagctgaagttgatactgccttagatgtccttctagagttggtagtgttaaacccatctgctatgatgatgaatgctgtctttgtaaagctcagcaaccggctttttgaggaactcgccatggacgtgtatgacgaggtggatcgaagagaaaatgatgcag

SEQ ID NO: 152454 - DNA, 1602 bp, Homo sapiens
atggggtaccgagctcgaattcgtaatcatgtgtggctggctacccaaaaccacagcactctggtgacagagcgcagtgccgtgcccttcctgcctgttaacccggaatactcagccacgcggaatcaggggcgacaaaagcttggccgctttaatgcccgagagtttggcaacttgatcatcgacattctcagtgagagcaagcggagacagcaggcaagagctgagcagccccacagtgcagctgctgctgacggtgtgacgttctctgttccggtcacaccacatacgttccgccattcctatgcgatgcacatgctgtatgccggtataccgctgaaagttctgcaaagcctgatgggacataagtccatcagttcaacggaagtctacacgaaggtttttgcgctggatgtggctgcccggcaccggcaaccaacaaggaggaaagcccccgcagtgctcggccagtgccgcgccatcgccaccagggagcgacccggctggttccacgtggcagaggttcgcgcctcgcggcgcgggaggagcccgacgccacagtgtgcagaccctggctgggcatccatcagcaggggtgtgctggtgtgtgacgagtgctgcagcgtgcaccggagcctgggacgccacatctccattgtcaagcaccttcgccacagcgcctggcctcccacgctgctgcagtcaggcttccccggcccctcgcgcagagccgctccacgggcagcccggggccccaccccacgcactgaagaggccgcctgggctgccatggccctgaccttcctgctggtgctgctcaccctggccacgctctgcacacggctgcacagaaacttccgacgcggggagagcatctactgggggcccacagcggacagccaggacacagtggctggaagccctgatcatggtcttctggcttttgcctaccataggcttgtccggtttctcctctgggtcctctgccctggttgggccttcttcctagtgaactcttctaggggtggggtcttcaaccccatcctccacccctgcccccgccacggccaagccagatttgcaggggtggggagggctgaggatgtcaccttcctctaccacccctgtgcccatccctggctgaagctccagcttgccctcctggcctatgcttgtatggctaacccttccctcacccctgacttcagcctcacgcaggatcgggtggacatcgagcagctggatccccgcggccggactcccctgcacctggccaccacgctggggcaccttgagtgtgcccgtgtgctcctggcgcacggcgagacgtgggcacgggagaatcgcagcggctggacagtgctccaggaggctgtgagtacccaggacctggagctggtgcagctggtgcttcggtaccgggactaccagcgggtggtgaagcggctggcgagcattcccgtgctcctggagaagctgcgcaagcaaaggagctatctccctggtaggcccctggcacggctgcggaggtccgtgaactctagcggggctgtgggcatgattaagagtgagagtatggggcgctggtttgtgggcccataa

SEQ ID NO: 152455 - DNA, 737 bp, Homo sapiens; identical to SEQ ID NO: 122659

SEQ ID NO: 152456 - DNA, 4503 bp, Homo sapiens
atggacgatatcccgcaagaggcccggcagtaccggcataaccaagcctatgcctacagcatccagggtgacggtgccgaggatgacgatgagcgcattgttagatttcatacacgcgttatcaatcacaagaaacgtaaaaatagcccgcgaatcgtccagtcaaacgacctcactgaggcggcatatagtctctcccgggatcaaaaacgtatgctgtatctgttcgttgaccagatcagaaaatctgatggcaccctacaggaacatgacggtatctgcgagatccatgttgctaaatatgctgaaatattcggattgacctctgcggaagccagtaaggatatacggcaggcattgaagagtttcgcggggaaggaagtggttttttatcgccctgaagaggatgccggcgatgaaaaaggctatgaatcttttccttggtttatcaaacgtgcgcacagtccatccagagggctttacagtgtacatatcaacccatatctcattcccttctttatcgggttacagaaccggtttacgcagtttcggcttagtgaaacaaaagaaatcaccaatccgtatgccatgcgtttatacgaatccctgtgtcagtatcgtaagccggatggctcaggcatcgtctctctgaaaatcgactggatcatagagcgttaccagctgcctcaaagttaccagcgtatgcctgacttccgccgccgcttcctgcagcacatatttgttcttcgggagcgccctgaaaccgtgttaatagatctcattcagaggacaaaggatgcagtaagagagctggacaatctgcagtatcgaaagatgaagaaactccttttccaggaggcacataatggaccagcagtagaagcacaggaagaagaagaggaatatggctggaatctggaccgagcctatgactatgtgaaagaaagacgaacggtaaccaagcccaacccaagcttcatgagacaactggaagagtatcaggggatcttgctggcaagacccaagagaactgcttacatttatggctccgtgtatcggcgttgtggttatgcagaccacaaggtagaaataaaacaccctggctgggcatccatcagcaggggtgtgctggtgtgtgacgagtgctgcagcgtgcaccggagcctgggacgccacatctccattgtcaagcaccttcgccacagcgcctggctctcccacgctgctgcagatgggtgcacacgcttgccagcaacggggccaactccatctgggagcactccctgctgggaccccgcacaagtgcagagcgggccggcgttaaagcaaacccccaaggacaaagttccaccccttcaagttagagtttcattcaggggccaagttaccagattgttgggattttgttgcacaagttttcctttgccgggacgattgatgggagttaaccgccaaagaccttcagcaaagcaaactaacactcgagcgtgcggaacaggcaaaccctggaagacatgtctgcgcctgctctcccctgggtgccccaggccaacttcttccacccagagaagggcacccacacctctgcacgtggctgccaaggcaggacagacactgcaggccgagctgtcttgtagtgtatggggctgaccctggctcccctgatgttaatggccgcacacccattgactatgcccaggcaggcggggcaccatgagctggcggaaaggctggttgagtgcccaatatgagcctcactgagcggctggccttctacctctgtggacgcaagccggatcacaagaatgggcattacatcatcccacagatggctgacagatctcggcaaaagtgcatgtctcagagccttgacttatccgaattggcccaaagctgcctaagaagaagctgcaggcgctcagcaaccggctttttgaggaactcgcccatggacgtgtatgacgaggtggatcgaagagaaaatgatgcagtgtggctggctacccaaaaccacagcactctggtgacagagcgcagtgccgtgcccttcctgcctgttaacccggaatactcagccacgcggaatcaggggcgacaaaagctggcccgctttaatgcccgagagtttgccaccttgatcatcgacattctcagtgaggccaagcggagacagcagggcaagagcctgagcagccccacaggcaacctcgagctgtctctgcggagcacagagcgacctcgaggaccaacacgactactacagcgtggcctctgacgaggacacagtagcacgagcccctgcgcagcaccggcgccactcggagcaaccgggcccggagcatggactcctcggacttgtctgacggggctgtgacgcctgcaggagtacctggagctgaagaaggccctggctacatcggaggcaaaggtgcagcagctcatgaaggtcaacagtagcctgagcgacgagcttccggaggcttgcagcgagagatccacaagctgcaggcggagaacctgcagttccggcagcctccaggggccggttgcccacacttccattccccagttgaacggggcgggaacacacacccttgggcgccaggcggggagaacaacaccgcaggattcgccaggccttttccatgtatgaacctggctctgccctgaagccctttgggggcccccctggggacgagctcaatacgcggctgcagcctttccacagcactgagctagaggacgacgccatctattcagtgcacgtccatgctggcctttaccggccagtaggttctgagccccagggggttctgggctctgtgctgaattcggggcttaagatgattagactgacctggtccctcatacttgttgcaacctccacacttggctctaggagatccccaatgaaaaccagatcacccccttaaaagaaaaacaggagaggctttcagagcagaaggagaatatacagcatttccaagcagaagaagaagctaaccttcttcgacgtcaaagacaatacctagagctggaatgccgtcgcttcaagagaagaatgttacttgggcgtcataacttagagcaggaccttgtcagggaggtggacatcgagcagctggatccccgcggccggactcccctgcacctggccaccacgctggggcaccttggagtgtgcccgtgtgctcctggcgcacggcgcagacgtgggcagggagaatcgcagcggctggacagtgctccaggaggctgtgagtacccgggacctggagctggtgcagctggtgcttcggtaccgggactaccagcgggtggtgaagcggctggcgggcatccccgtgctcctggagaagctgcgcaaggcccaggacttctacgtggagatgaaatgggagttcactagctgggtgcccctggtgtccaagatctgccctagtgacacctacaaagtgtggaagagcggccagaacctgagggtagacaccacactcctgggctttgaccacatgacctggcagcgagggaaccgcagctttgtcttcaggggccaaggtcaggcaggcaggaaacacaagcgccgtggtcatggagattgaccacgaccgccgggtggtgtacacagagactctggcactggctgggcaggaccgggagctgctgctggctgctgctcagcccactgaggaacaggtgctgagccggcttaccgcgcccgtcgtcaccactcagcttgacaccaagaatatctcctttgagaggaacaagactggcatcctgggctggcgcagtgaaaagacggagatggtgaatgggtatgaagctaagcatgaatctatgcaagaactggagttccgccacctcaacacaattcagaagatgcgctgtgagttgatcagattacagcatcaaactgagctcactaaccagctggaatataataagcgaagagaacgagaactaagacgaaagcatgtcatggaagttcgacagcagcctaagagtttgaagcacatatttgttcttcgggagcgccctgaaaccgtgttaatagatctcattcagaggacaaaggatgcagtaagagagctggacaatctgcagtatcgaaagatgaagaaactccttttccaggaggcacataatggaccagcagtagaagcacaggaagaagaagagcgcacctgtcgcgaccaagctgctaacacctactgctcctgcggccccgccccggaccccgcccaccgccgcggggcgggcacgccagacagcctcccgtgcggcctcgggctgagcgtgcgcgccaccggctacgtgcccagcgctcgcgtctgctccagtcgctctggcggtcagttgtcatcttctacatttgactcggagaaaaatgagagtagacgaaatctggaacttccacgcctctcagaaacctctataaaggatcgaatggccaagtaccaggcagctgtgtccaaacaaagcagctcaaccaactataca

SEQ ID NO: 152457 - DNA, 7261 bp, Homo sapiens
  misc_feature (1)...(7261): n = a,t,c or g
tggcaagtgctccaccccagcagtcgtctttgtcaccgaaaagacccgctaagtgtgtgcaacccagagaagaaatgggttcgggagtacatcaactctttggagatgagctaggatggagagtccttgaacctgaacttacacaaatttgcctgtttctgcttgctcttgtcctagcttgggaggcttcccctcactatcctaccccacccgctccttgaagggcccagattctaccacacagcagcagttacaaaaaccttccccaggctggacgtggtggctcacgcctgtaattcccagcactttgggaggccaaggtgggtggatcacctgaggtcaggagttcaagatcagcctggccaacatggtgaacatggtgaaaccctgtctcgggaaacccctgtctctactaaaaatacaaaaaattagccgggcgtggtagcgggcgcctgtagtcccagctactcgggaggctgaggcaggagaatggcgtgaacccgggaggcggagcttgcagtgagccgagatcgcgccactgcactccagcctgggtaacaagagcgaaactctgtcaaaaaaaaaggaaagacttcctcaaactaattacattgttgttcttatcaacattaaccagaattgagtacagactgcactatgtgctgttactgtgtcgggctccatgcaaagcacttaacaagatttgttactttatccttataacaactctgtgtggtgtaggtgtaataattatcccattgtccagatgaggaaactgaggtaccaagaggttaaataacttgccatagctcgcagaggtggtaagtggggaatctaggattcacttctaagcttgaacgtggtatggttgtggtatggaaccaaggcaagactccagtctgcttacatctgactcagagatcctacaagaacatgccgactgtccctgtttaaccaaatgtcagtccaggcagcattgtctgtgtccctgattgtgcctttctctagtctgggaacactgccaggcagtgtatgtcactagatgtaaataaggccattatttgattttatgaaactctttttggaggttgagacttgtatattctgtgtgacactcccatttggatatcccaaagacaccttaaattcaatatgtcaaaaaactgaagttatcatttctgcagtctctcctttttgccctgaaaaagaacatgcacttgtttttcatatttccttatctcttggaaagacatcttgaccactcaagaatgtaagctggaaacctcagggtcacctttcttctctgtcactacccctggcttaggtcacccttacagatgtgcctcttaaatatttttcaatcgtgtctctccctattccttcctaccagtgcagccccagactgttgtgtttcatagacagctgccgcagtgccctccagactgccaccatgcctttggctgtgccctcccaccatcctccacactgctgcctggctcatctgtataaggatgattctgtaggcattgtcctgcttaaaaccatgtggtgattccaggcttgagtctgaactcagagcaaggcacatggcattctgcctggcacctgaggccacagcagcatattataggtccgctgtgccttgtgccctgagtatgtcctgttgaggccacttctattcctgctcttccttctacctgggaagcactcccttcccattgcggctgaagcctgtctcttcaaacctcagcccaacttctgcttatcttccagagcctatttgagctttcatcccttctagaagctttccctgatgttggcagagtagttttctcttcttttgtgttaccattacactctagagagacctttgtttctgcatgcatcacagtgtatttgtctttttgaaggcagggactctgacactcatcttgacagcaaaggggtgaattactcaactgtcaattcttttgtaaaatggacaatgtcaaccctgttagaagtaaatgcaataatgggtgtcacgtccttagcaccgtgcctggcccatagtatatacccagtggacacctgtacctcctctccacatccctgttgcatggtgactgggcccagaaggcagctagaattggcaactcaagcccttttggtcaggatcctttgctgggtggaagctcctcgcctactaatgcgggtgccctgtggctgaatctggtgaatccatcaggtccaggttgaaaactactgagcagagccctgctgcctctgggtattctgttcaccacccagcccttttgcatttaatgaatgtaaaaaataatggggcagctgctgttccttactctctcttcctgctgcactaagtctctgtctccctggagaggcatttaaccgcacgaaggtttatggtggaaatgacaaattgcttcttcacaacgagctcaccctgctttctaaccagttggaatcacccttgttcatgtaatattagcaatttacctgtctccttaaccactaaccatcctgagaggatttggcattctttgcagctgttaatcctctcatcacctgagggcttattaaataggtggagtgtacatctagcctttctcctacagtgaacagtcattcatgatcttttcctttttactcagcctctctcctcagctgcctgagcccaggataaggcagggtcctcccctctagaggccacagcggagagagctgggctctggaccggggagtccccggtttgactccttgcttggtcaggacttcctcaacataatcgcctggccctggtgccagggtggttgtggggctgagggaggtgcctgtgcagcccatttccctgtggaggtcagttgcccctttcctttcccttcatcaggctcaggccatccttggggcagccctgctatctgagggggtctctcccgagccgctaagacatagtcctcattcatattgggtgttgttgacaatcatcccatcctctgctgcttcattttgtgacttgtggacccaagtggggtctttgtttatcctgatccaggagagctgggaagggagacagtttgaattgctccgggcatatgttacttgttaatattttaaaatttgacttgttgcagtttttcagaggtattaatctaaaagccatttcatggaaaaaagcaacaaggaactggttttatttcttttaggtgacactaataaccaaacatgagacacatcagaatttaagtggctagtcaaaaaaaaaaaaaaaaataccagtgaaaatagcaagtctacattgatgttagttgttatataacaggcgctgttctaagcgttttgcctgtagcaactcactgaatcctcataattactttatgaagaggagattcagtaacctggtcacataggcaatgaatggccaggattcgggctctaaaactgggtctcctgaccacgacgatccctctctagggctgatggagatcatcactaaatcacctcctttgggattctctgctcgttggaaatggagtgttacctgcagagtactgctgtgacctctcctttaggcctctctgtgcagagactgcagtagtctgtgttagtgctgtcctgttgaagctggtccacacttttctggacttctggttgagccagtctgctcagatacgaacttccaaacgaacctgtttctctttggtcctcagccaggctttgtgacatcagctgctacagctgtggaaacagttgataaacagggtcaggctgctcagagggagaatgtggcagtagggtccctggcaagggttgcctgctcacttggaagggcaaaggcctagaaatccacgcgcaattgatgcacaagctgtcattgtgctgaggcttgtgggcaggggggtgtgtttctctttccttctccccttttcttcctctctttcccttgctctctttctttcttcctccttcccttcctctttccttcctccctttctttctcctttgaaaaactaagatgaggtcctggtaaagatagtacatagaagagaggcttcaagcctcaaaaagttatttcgataatatagtaagtcactgctccttattaaataagaggcctaaggggctgaggtggtgagggattgaagtgaagtctggcttggttcaggcctgaatacccaaaccaggccagctttgggttgggttggctctgcctggcatgaggagacatccaaggattccgtctccctcagagagccatgctgggaaatcttctaagcattggactttgaggttaaaataaagagtcttgcacccttggcggggatttctgaaagattgatgggattctaactgcctaacagttccatttccagatgagcgccctccgtgcatgggctttgtagcagctctctgcctttccttgccaaatgaccctatttgatctggagccctggcttgacttttctcttcagcatctgctgttttctgaccaatcccacaccttcccctggttttctcttttacagaaatcctttcttccaacttgattagatttctttgttggcttgcacatctggtcttcatttagtagggatgacacttaattgaagtaagagtttggctgcctttaaatttaacaactgcaccctgctgggggtgctgatgaggagtcagtagctgaattgtttattgaaagagatcatattgatttgtgattttcacttaagaaatgcattcccacacacccctgcatttagttgcttagctgggcactcagacagctgctttaagaatccagtacccttgtctctggagaggcgtttctcctcagtgtgcatgcagtactactgtatgcacgtggcatgtgtccatctgtcctcacagaggagactgtgcattggtagagctggagggctcctgttgtccacccagcatgccactttgaaccagctcctaaagcatgaggtccatcatgtctctattcaaaaactttcagtggctcctcattgcctgtgaatgaaatatggaatctcagcgggcggtcaggggcctcccagtctggcttcactgtgcctgtccaactcatttcctatgattgccatgcagaaacccagttctctggccacaccgaatttcttacaatcttcccattcacttggccattctgcctttatgtttttcactttctctggaatttcctccctccctttcctgcctgtatggtctcagttcttcaaagcccatttcaaatgaaaacctttgctacgaaatcttccctgattcctctcacctatagtgcacccctttgaactcagacaccctctctgtatttctcttcaggtattttagctcactttatgttataattgtttttatgattgttgtttattcttattcaacagagtcactacctgagagcagtgaccttgtgttggtcacatgtgtcccctgaaggatacagctcagtgcttggggtagtaataattgatattcttgagtgctcactacatgccagttctattctaagcactatacatgtattcatcttggttgatcctcacaaaagcccttggagggaggtactgttattagccccattttacagataaggtaactgagatctaggctgagtaacttgcctaaggctacccaggtagcaagcagcagagctgggggtccacctgggccttctgaatccaggctctcaactagtaagccacatggcttctttcattagctacttgctcaatacatatctatcaagaaaagttgtactgaagttaagagatataggggagcaggaatgggttagtttaaaaacaaggagagggaagaagagaaggaaattagaatgggccagtaggaaaagaaaagaaaggagaagtgctaagaaaccaaggaacaggccaggcgcggtggctcacgcctgtaatcccagcaccttgggaggctgaggcatgtaaatcacttgaggtcagaagttcgagacagcctgaccaacatggagaaaccctgtctcgactaaaaatacaaaaactaaaaatacaaaaattagctggggcgtgggtgggtgcatggcctggtaatcccaggctactcgtgagggctgaggcagggagaagcctggcgaacagagagtctgccctcaaaaaaaaaaaaaaacaaaacaaataaataaaaataaaaacttccctcaaacatcagattttttcacctcagcaaatactttttcctttgataattcataatcctgctgttcatttgtcacatttatgaatatctggtaatttcataaacaactaccaatggtacacttcaaatgctgattctgttgaatcttcttattttttttcccccaatgaacttagggcctatgatagagaaaatactgaaacatgctaagataataattggtcttagaaagactttacagcaagtatttaatgaaagcccactacactttccaggntctaaaaagagccagacacaatccctgcttccagagttcaccattcagaatacaggaggtcaagcactgattctgaatccattaatgggctttgatttcggtctttcaagatttgcaatagatattgatttcttccgaaaggcaaaataaaattcttccttcacacacatcattctttggattctcataaggggtattttgaagtctgtatgttgacaaggccagtagatactttgttttctctaactgccttcttctacttaagactatgtcaaagtattttgttttcccctttcaagttctcccccaacatacaccttctgcaagttttgtctatcccagtccgcttttctgtaacactttgctacccccttctgttccccttcactgtttcctctgttgctttcctccttaatagaagcctggtgatctgggcttccccatctttcctttcctggcttcttattcacatgggtgactgatcgttagcacttccttaaaagttgggttttcaataaatataactcatcagcacttccgatctgtatttccttgagcttttttttgatcttcagatctgtgcaataatactctgttcctgaatgctatttagaaatcctatcctcacaacaccagtggtttcttgaagctacttgtttcaaatgttgtatcaaaacagattgataaaggaatgtatagctcagcaaaggacgcttctgctgtaaattccccccattaaaagtactggattctataggtccaccattaaaagctggtatgggacaccaattt

SEQ ID NO: 152458 - DNA, 714 bp, Homo sapiens
aatggtgtcaccctggagagaaggaagggaaactcacataaggattagcatgtcgcctctgaggtagttaccctggaggcaatgagtcccaaagctccagataatgaaacatgttagccaatgagtatatagtaaataccagttcttgatactaaagggatattatgagttactacctataatcttttctctggagaactgctgcagaagtgatcaaagatgcaatgaaacatgacaaggtgaaaacaaacatctgagttttaaaagcctgagagatcagaagatgaactgaggtgagaggacttgactgatgctccttaagtgctattgcagctttgaagctgtacttttctagactttttactaggataattaaaggaatcagttacaaaacaaacaaaaaaatataaacaaactcattatatggcctaaacatctatctggagatagatcaacatttcaggaacatgaaaatttatctggtcaaactcattgattctgattttgatactactccacctttactgtatatttgcactgtctgatttggcagccactagccacaagttgctatttaaaaggaaattaattggccaggcgcagtggctcacacatgtaatcccagcactttgggaaaccgaggcaggtggatcgtctgaggtcaggagttcgagactagcctggtcaacatggcgaaagcccgtctctactaag

SEQ ID NO: 152459 - DNA, 450 bp, Homo sapiens
tatccgggtcgacccacgcgtccggtgggctccaggcgtcgcgatggaggagagcgggtacgagtcggtgctctgtgtcaagcctgacgtccacgtctaccgcatccctccgcgggctaccaaccgtggctacagggctgcggagtggcagctggaccagccatcatggagtggccggctgaggatcactgcaaagggacagatggcctacatcaagctggaggacaggacgtcaggggagctctttgctcaggccccggtggatcagtttcctggcacagctgtggagagtgtgacggattccagcaggtacttcgtgatccgcatcgaagatggaaatgggcgacgggcgtttattggaattggcttcggggaccgaggagatgcctttgacttcaatggtgcattgcaagaccatttcaagtgggtgaaacagcagtgtgaattgca

SEQ ID NO: 152460 - DNA, 871 bp, Homo sapiens
cgtcgcgatggaggagagcgggtacgagtcggtgctctgtgtcaagcctgacgtccacgtctaccgcatccctccgcgggctaccaaccgtggctacaggtgactacccaccgccagaccaggctagctccaatttaaccctttctccgccacccggacacacccactgcgggaaccgaggacagccctggccagttttggggcgagggggagctaatgctgctgcttcttccagttccaggcccgagcagggaggcggatccagagtttcgcccgtctcagttcgacgcacgggactcctggcggcggggagggcgttaaagccgtatctagcgcttagggaccccggtgggctgccgggtaccctaaacttggtcgggggtggtgatgtcacagacgcttctctttcagcgctaaccggtggccttgaagggatcctcgaaaagccttaagcggggaggtgccctatcacagacggaaatccccgagaggaggggagggagcccagagccggctgaaaggaccggtcccggggagctttaaggtgacggtcgaagcccagggaccccttcctacccagatcccttcgcacgaatttcacccttgatcacagcctggagcagttgggaggaccccttctatatttctctggtctctacctgagacgaataaacacacacgcttgtaaacatactgagtatctctgcaaaggaacacaggaaactgccctaggggaggggaaccgcccttggaaggaaacttcctttcccttttgtgctgtttgcgttttactactctttgtatgcgttatctatcaaaacgacgaaaaatattaaaagaaaaaagatacccttcatccagccaaaaaaaa

SEQ ID NO: 152461 - DNA, 397 bp, Homo sapiens
cgcggccgcgtcgaccttcaatgtcacacatgttggctgtgcttccaagatccctaacactgtctctttaaaagcagtactgtccagactctgggatccatagatgggcatcaggagagagatcttggaagtaatccgaaatagtaaaacaaatttcctatgcataagcttttgtgtgtgcttggggtgggggccgggggaagtattatagaggtggaggggccatagcttacacgagattttcaaaaggtctgtgactcaaaataacttaattgagtacagaatacctataatgtccttgtgctgtgccagcgatacacgacagtgtttaacactacgtcagttcccgccgttaaaaagctgacagtcactgtgaatacaatctccatcttctaaa

SEQ ID NO: 152462 - DNA, 948 bp, Homo sapiens
atgggcatcaggagagagatcttggaagtaatccgaaataggcccgggaatcctagggagcgggtaaaggcctgggagagggagcaagatgggctccgccacgagatccggctgaagtccggctcggcgccggcctcaactgcaagaagaaggccacccctctctccccaagctgaaacaccagaagagccacactcggccgttcccaaccgccgccagttaccggccgccagcgaagaccctttcagctcccacactccattggcctcttgcggtcacgccgccggaagccgcccccggaaacggaagtcaggctacgagtcacggtggctccgcgctggcggcgggttcccccacagggtcttggggaaaggagcatgcgctggaagctgtgtgctgttggttttgaggatcttcaaaaagaaaaccgaggacgagaaaatgctggagggctgtgatcccccacctccaagtccagtcctgctctcagctctcagaacagacttgacccgggaaagtttgatgaagagtggacagatacggacaagtatggttgtggaacaagaacccaaagctatgccacatggctggaagctgtgtttacaagcttttcatccgtcttccttaacttgtggtcgctatggtttcctttgcctgctgggctggccctttaagggggacaagctgtccactcaaccaaatgccagaggcactggctccaatagcttgggtcttttggctatgggcttaaccatatctcatcacctgctcattctgagccccaaacttctcccctggttgggctttctgtcacttgcaactgaaagagtctggtacatccccattcacgaggacaccaaggttcagagaagtgagggagtcttgacccgtgcatatcttggaggtagttgcttttggaggaggcctgacacaatggaaagggcctga

SEQ ID NO: 152463 - DNA, 1176 bp, Homo sapiens
gcaaagcgcaaaaagataaatcagaattcaagtaaagagaagattaataatggacaagaagtcaaaatcgatcagagaaatgttaaaaaagagttcactagccatgctttagattctcatatcttagattattatgaaaatccagccatcaaagaggatgtatcaacattaataggtgatgatttggcatcttgcaaagatgagactgatgaaagctcaaaagaagaaactgagcctcaagtgctgaagtttagagtcacatgcaacagggcaggagagaaacattgctttacctcaaatgaggctgcaagagattttgggggtgctgttcaagattattttaagtggaaggccgacatgaccaactttgatgtggaggttcttttgaacatccatgataatgaagtcattgtgggcattgcattgactgaagagagtctccaccgaagaaatataacacattttggacctacaactcttagatcaactcttgcctatgggatgctcaggctctgtgatcctctaccttatgatataatagtcgatccaatgtgtggaactggggcaataccaatagagggggccactgaatggtctgactgtttccatattgctggtgataataatccactggctgtgaatagagcagcaaataacattgcatctttattgaccaagagccaaattaaagaaggcaaaccctcctggggcttgcccatagatgctgttcagtgggatatctgcaatctgccattgagaactggctctgtggatattattgtaacagatttgccatttggaaaaaggatgggatccaagaagagaaactggaacctttatccagcttgcctacgggagatgagccgtgtctgcacacctaccacaggccgagctgtactacttactcaagacacaaaatgctttaccaaggcgttatctggaatgcgacacgtatggcgaaaggtggatacagtctgggtgaacgttggtggtcttcgtgctgcagtttacgttctgatacgtacacctcaagcttttgttcatccttcagaacaagacggagaaagaggaactctttggcaatgcaaagaatgaagatgactaatagtacttgtacttcccaccactggaaatgttagcataaaagaacttggagaggaaaaaagtattaacaaa

SEQ ID NO: 152464 - DNA, 2596 bp, Homo sapiens
ctactgtgttggcggactggcgggactgggtgctgcgtgagtctctgagcgcagtgcgggcggctggcgcccctcccccggcagcgtgcggcggctggctgtgcggctggcggcggcgtgcggcagctcactcagcccggtcggcgacgccggaacctctgcttgggaaggggacggtgcggtcccactgggggcaatgggtgcgctagcggcggccggcttgttgtcttccggcggctgcctctcccgtgcggaagtcgccagatgggtgatgcgccgggcatttggtggtcgtttgatgtggaatgtggatgagtggtgggtgggtgggggtggttggtacggtcgggcggtggtacggtgttgtcgattcagcttcatcccgtgaggaggtagattgggcatgtgcatgggctccgtgttgaagatcctcaaaaccaacagcacacagcttccagcgcatgctcctttccccaagaccctgtgggggaacccgccgccagcgcggagccaccgtgactcgtagcctgacttccgtttccgggggcggcttccggcggcgtgacctgaccgcaagaggccaatggagtgtgggagctgaaagggtcttcgctggcggccggtaactggcggcggttgggaacggccgagtgtggctcttctggtgtttcagcttggggagagaggggtggccttcctcttgcagttgaggccggcgccgagccggacttcaggcggatctcgtggcggagcccatcttgctccctctcccaggcctttacccgctccctaggattcccgggccctgtaggtgggagttgggagacgacagtactgcttttaaagagacagtgttagggatcttggaagcacagccaacatggtgtgacattgaagaagccacttaaccacctcctagatgtgaacctcattgagaaccagaagtctgtacaagtgacagaaagcgacctcggaagtgaatctgagcttctagtcactattggagccactgtacctactggctttgagcaaacagctgcagatgaagtcagagagaaacttgggtcatcatgcaaaatcagcagagaccgtggcaagatatattttgtcatttcagtggaaagtctggcacaggttcattgtctgagatcagttgataacttatttgtggtggttcaggagtttcaagattaccagttcaaacaaacaaaggaagaagttctaaaggattttgaagacttggctgggaaaactcccatggtcaaaccccttaaaagtgtgggaaaattaatgccagttttaaaaagaaaaaaggcaaagcgccaaaaagataaatcagaattcaagtaaagagaagattaataatggacaagaagtcaaaatcgatcagagaaatgttaaaaaagagttcactagccatgctttagattctcatatcttagattattatgaaaatccagccatcaaagaggatgtatcaacattaataggttgatgatttggcatcttgcaaagatgagactgatgaaagctcaaaagaagaaactgagcctcaagtgctgaagttgagagtcacatgcaacagggcaggagagaaacattgctttacctcacatgaggctgcaagagattttggggggtgctgttcaagattattttaagtggaaggccgacatgaccaactttgatgtggaggttcttttgaacatccatgataatgaagtcattgtgggcattgcattgactgaagagagtctccaccgaagaaatataacacattttgggacctacaactcttagatcaactcttgcctatgggatgctcaggctctgtggatcctctaccttatgatattaatagtcggatccaatgtgtgggaactgggggaaataccaatagagggggccactgaatggtctgactgcttccatattgctggtgataataatccactggctgtgaatagagcagcaaataacattgcatctttattgaccaagagccaaattaaagaaggcaaaccctcctggggcttgcccatagatgctgttcagtgggatatctgcaatctgccattgagaactggctctgtggatattattgtaacagatttgccatttggaaaaaggacaatcatcctaacaagatgtaagatggatcaaaagataacactaaagacagagacagcaatttggaagctatcacacaggcatctgagatcagttactaactgggcaacgcccagggacccaagttagccccttaagcctaggcaaaagaatcccgcccataatcgagaagcgactcgacatggaggcgatgacgagatcacgcgaggaggaaaggagggagggcttcttccaggcccagggcggtccttacaagacgggaggcagcagagaactcccataaaggtattgcggcactcccctccccctgcccagaagggtgcggccttctctccacctcctccaccgcagctccctcaggatttgcagctcgcgccggtttttgggagaacaagcgcctcccacccacaaaccagccgggaccgacccccgctcctcccccacccccacgagtgcctgtagcagg

SEQ ID NO: 152465 - DNA, 1879 bp, Homo sapiens
  misc_feature (1)...(1879): n = a,t,c or g
gaaagcgagcgtatctcccgagccgttgccactgacagccgcgggcgctcccatctgagtaagagccagcccgtccgcggcctctccagccccgggttcgcgctctcgactctcctgcctgcccagctgcgcgacaggagcggagcgaggcgcggcctgcgagtccccggcagcccccgtacccctccctcggcgctgcgtgtaggccgcgccgtcaggcccagtccgcggtgccccggcgggtgaatgccaaatacagccatgaaagaaaaaaggtgcttgctgatgggggaaagaagcgggtcggggaagaaccaagcaatgaaggtcgataatcttcgccaaattaccatttgctcgcgacacccggcggcctgggggccaccattgacgtggaacactcccacgtccgattcctaaggaaacctggtgctgaacctgtgggactgtggcggtcaggacaccttcatggaaaattacttcaccagccagcggagacaatatcttcccgtaacgtgggaagttttgattttaaggtgtttgacgtggagagccgcgaacttggaaaaggacatgcattattaccagtcgtgtctggaaggccatcctccaagaactctccctgacgccaaaatccttctgcctgggtgcacaaaatggattcttggttcaggaggatcagcgtgaccctgatttttaaagagcgagaggaagacctgagggcgtctgtcttcgcccgctggagtgtgcttgtttttcgaacgtccatctggggatgaggacgcttttacaaagcctgggtccaggcattcgtcttaccagctggatttccccaacgtttcagcagctgggagattgaacctcagggatttttgcccaaatcatttgaggccgatgacagttctgctgttcgaaagaagttacattcattggtaatatcacactatccagtgcaaagagcagcgcgacgtccaccggtttgagaagatcagtaatattaataaactagttcaagctgagctgcagtaaattggcccgcttccttccagagcatggaagttaggtaattccaacttcgcttgctttcatgcgacatcttttcacctaaaatacgtacgtgatgggtggtcatgtcaagatccggtcgatccctttctggggccacttctgatcaaccattcgcaatgccccggaaaccactttgaggaaactgggagagagttgaatgggccccaagccacagtcttcccttatggcgttgaatattgccaaaatgctctttctgaaaaagcctgaaatgcccttttttgtttgccacccctttaatttttaaatattccataatggccgtgtgccttaaaaaagtggggctttgaaagtgtgtgcctgccttactccctttccatcctttcctcccccgccttcccccagtcttttaaaacattgggacggtaatttacttaagttaaccccggtaggaggtttgaaggctggaccctttctgagaagttgggtatggtgtaacactaaagtagggtggttccgtgtgtgttctcaattacctggttatgataagataatgcacatcaaaagcctttacccagtatcttcctgtatcccgtctcagattcgcaaagacggaatgttactattttatcagtcaaggtattaaaatgcatttataaattcttcttggcttcattcatgaataaacgtgttagcaatttataaaaaacgataaaaaaaatctcaatnnnnnnnnnnnnnccggcggccctttaaaataaaaggccctttttaaacccctttaacacccctaagggggccttttttttcccccccatttgggtttttccccctccccgctctttttttttcc

SEQ ID NO: 152466 - DNA, 1320 bp, Homo sapiens
  misc_feature (1)...(1320): n = a,t,c or g
agtcggctaggattgcaaagctgtgggctgagcactcaggcaatcacactctcagaaactgcggcggctctggactgcagcctcccaaggctccatgccggacaaagcatgcgtagtcacacttgctacaatagcctgggatggtttcttttggtctccaatttattcacacacagcaaatattttgccagatatccgaaaatgaagatttcatcaaagactgcgttccgaatccataacaagttcccgatcagaggtgaaaccaacaagccaagtgatatgcttatacatgacttgggacccagcactagcccaaattgcaaaagcatgggccacgcaattgccacgttttcacataatacacggctgaaagccacccccacaagcctggcatncaaactttcactttcactggggagagaacatcttgggacttgggtctgttgcccatttttttctgtgtcttccgccatcacaaactgggtatgacgaaatcccaggactattgacttcaagactccggatatgccaaaaaagtctgtggccaactacactcaggttggtttgggcagattagttacaaagttgggctgcgcagtttcaattttggccctaaaagtttctggctttgaccgtctttctcccaatggagcacatttttatatgcaactaccgggcccaggagggaattacccccaacttggccatataagagaggagccaccctggcagtgcctgccccaataatgacaaggtgtttggacaatctctgtgttaaccggacagcgagaccaagtcaaacgttactactctgttgtatatccaggctggcccatatatccacggtaacagaggcgggttctctctttctcattggtaattcagtaattctaatactgtgtgttataattaccattttggtacagcacaagtaccctaatttagttcttttggactaatacaattcaggaaagaaaaaacccaaaaaccaacctcattcacatatggctttttttttaaccaataacaattaggggcacttctattttaaaacatttcagaaaaaaatatatgttatagcaatactcttactcaaaagaagaaatttcctaactctatcagataaactcatctttagtatacctatgcattattatgcaggttgtcacaacgtggacttttattatgtatcctaactgcatgttacaccttctatatgctgcagatcgatccctgtaccattgcacatttttaggtgattctcaataacttgcctaggccatattaacttaaaaccatgatactttgagcgaggcgcat

SEQ ID NO: 152467 - DNA, 458 bp, Homo sapiens
tttgcagagacaagtgaacatttatttttatgcctttcttcctatgtgtatttcaagtctttttcaaaacaaggccccaggactctccagattcaattatgtccttgggcttggtcgactgctgcaggagtctcagggagccttctacaaatgctagagtgactcatttaccaacattaaaccctaggatacatgcaacaaagcaggactccttcctccatggaatgtgccgatttcagatgacacagcacccaatgcagaaaacgctggaatttttccttggaactcgactgtgatgagaggtgcttgacatgaacatatgctactgtcttttcttttttttttttttgtatttttagtagagatggcatttctccatgttggtcaggctggtctcgaactcccaacctcaggtgatctgcccacctcagcctccctaagtgttgggattacaggca

SEQ ID NO: 152468 - DNA, 2643 bp, Homo sapiens; identical to SEQ ID NO: 120390

SEQ ID NO: 152469 - DNA, 552 bp, Homo sapiens; identical to SEQ ID NO: 125911

SEQ ID NO: 152470 - DNA, 654 bp, Homo sapiens; identical to SEQ ID NO: 141921

SEQ ID NO: 152471 - DNA, 409 bp, Homo sapiens
ctcagagcaggtggcggcggcgcttttctcctcgtccgtggtgttctgctcctgcacggaggtgctggcggccagctctgagagcttgctacgctccatgatcaccatctcgatctctttagccttctcggcgtcttcttgggcatcctcggtgggccctttctcctcatcttcttcttccccaacgtttttgtagttgggtctcttttgcacccgcctcttgcccttgtgcttgttcatctcaagggaccgctcgagtgtctcggtgggtttaatgaagcaccgaatgctgggcttggcagaacttctctgaatatcctgttcagtcttagcgtacatctcagacagatcaccattcagaatgacttcagctaacgagttcaccagcggtgcatgatgtataattaag

SEQ ID NO: 152472 - DNA, 3030 bp, Homo sapiens
tgtcgtggaaagcggctcgcggttcctccaccgcctccgccgccgcattctccgcttgtgctaccgccgcgggcgctgggccgctctgctggtccggcatgagaccgtgagacgagagacgggtcggggccgccgacatgtttggccgctcgcggagctgggtgggcgggggccatggcaagacttcccgcaacatccactccttggaccacctcaagtatctgtaccacgttttgaccaaaaacaccacagtcacagaacagaaccggaacctgctagtggagaccatccgttccatcactgagatcctgatctggggagatcaaaatgacagctctgtatttgacttcttcctggagaagaatatgtttgttttcttcttgaacatcttgcggcaaaagtcgggccgttacgtgtgcgttcagctgctgcagaccttgaacatcctctttgagaacatcagtcacgagacctcactttattatttgctctcaaataactacgtaaattctatcatcgttcataaatttgacttttctgatgaggagattatggcctattatatatcgttcctgaaaacactttcgttaaaactcaacaaccacactgtccatttcttttataatgagcacaccaatgactttgccctgtacacagaagccatcaagtttttcaaccaccctgaaagcatggttagaattgctgtaagaaccataactttgaatgtctataaagtgtcattggataaccaggccatgctgcactacatccgagataaaactgctgttccttacttctccaatttggtctggttcattgggagccatgtgatcgaactcgatgactgcgtgcagactgatgaggagcatcggaatcggggtaaactgagtgatctggtggcagagcacctagaccacctgcactatctcaatgacatcctgatcatcaactgtgagttcctcaacgatgtgctcactgaccacctgctcaacaggctcttcctgcccctctacgtgtactcactggagaaccaggacaagggaggagaacggccgaaaattagcctgccggtgtctctttatcttctgtcacaggtcttcttaattatacatcatgcaccgctggtgaactcgttagctgaagtcattctgaatggtgatctgtctgagatgtacgctaagactgaacaggatattcagagaagttctgccaagcccagcattcggtgcttcattaaacccaccgagacactcgagcggtcccttgagatgaacaagcacaagggcaagaggcgggtgcaaaagagacccaactacaaaaacgttggggaagaagaagatgaggagaaagggcccaccgaggatgcccaagaagacgccgagaaggctaaaggtacagagggtggttcaaaaggcatcaagacgagtggggagagtgaagagatcgagatggtgatcatggagcgtagcaagctctcagagctggccgccagcacctccgtgcaggagcagaacaccacggacgaggagaaaagcgccgccgccacctgctctgagagcacgcaatggagcagacccttcctggatatggtgtaccacgcgctggacagcccggatgatgattaccatgccctgttcgtgctctgcctcctctatgccatgtctcataataaaggcatgggatcctgaaaaattagagcgaatccagctccccgttgccaaattgcggccgagaaggaccaccttacaaccacccgttaggttgaaagattcattcagggttcatggaacaacgtttgcccagccagatgggaagatccggctggcgacgctggagctgagctgcctgcttctgaagcagcaagtcctgatgagtgctggctgcatcatgaaggacgtgcacctggcctgcctggagggtgcgagagaagaaagtgttcaccttgtacgacatttttataagggagaagacatttttttggacatgtttgaagatgagtataggagcatgacaatgaagcccatgaacgtggaatatctcatgatggacgcctccatcctgctgcccccaacaggcacgccactgacgggcattgacttcgtgaagcggctgccgtgtggcgatgtggagaagacccggcgggccatccgggtgttcttcatgctgcgttccctgtcactgcaattgcgaggggagcctgagacacagttgccgctgactcgggaggaggacctgatcaagactgatgatgtcctggatctgaataacagcgacttgattgcatgtacagtgatcaccaaggatggcggcatggtccagcgatccctggctgtggatatttaccagatgagtttggtggagcctgatgtgtccaggcttggctggggagtggtcaagtttgcaggcctattgcaggacatgcaggtgactggcgtggaggacgacagccgtgccctgaacatcaccatccacaagcctgcgtccagcccccattccaagcccttccccatcctccaggccaccttcatcttctcagaccacatccgctgcatcatcgccaagcagcgcctggccaaaggccgcatccaggcaaggcgcatgaagatgcagagaatagctgccctcctggacctcccaatccagcccaccactgaagtcctggggtttggactcggctcctccacctccactcagcacctgcctttccgcttctacgaccaggggcgccggggcagcagcgaccccacagtgcagcgctccgtgtttgcatcggtggacaaggtgccaggcttcgccgtggcccagtgcataaaccagcacagctccccgtccctgtcctcacagtcgccaccctccgccagcgggagccccagcggcagcgggagcaccagccactgcgactctggaggcaccagctcgtcctccaccccctccacagcccagagtccagcagtcaggagtggcaggaaaggacgccgacgagtgttcagcctgtcggaggccgacagtcatggcggccactgggtttag

SEQ ID NO: 152473 - DNA, 2630 bp, Homo sapiens
ccgagatggagtctcgctctgtcgcccagctggagtgcactggtgaatcttggctcactgcaatctccgcctcctgggttcaagcgattttcctgccttagcctctcgagtagctgggactacaggcacgtgccaccacacccagctcatttttgtatttttagtagagacagggtttcaccatgttggtcaggctggtacatgcatgcaatcccagctgatcaaggggctgagggagaatcacttgaacccaggaggcggaggctgcaatgagccgagatcacggccactgcgctccagcctgggcaacagggtgagactgtctcaaagagaaaaacaaaacccataagatgcacaggtatctgagaagggtctaaacaccctagaactgcaagcaaaattttgaggggtatcccatgttttcccgggcgaaaggggtccctcatttctcaaaatccttaacctttttggaaaaaagttattaagcaagtttccaggttacgattcaaaaagccacaagatccatttagagccagtcaaagtttgagaatttttcaaagccatcactgaaaaagttggaacacatactcacagcagagacaagtgatcattttatttttatgcctttcttcctatgtgtatttcaagtctttttcaaaacaaggccccaggactctccagattcaattatgtccttgggcttggtcgacgtgctgcaggagtcttagggagccttgtacaaatgctagagttactcatttaccaacattaaacccgagaatagaagatgcaacaaagcaggactccttcctccatggaatggtgccgattgtcagacaagggcagcaccgaatgtaggaaaacgctggggaattttttccttgggaactgggactgtggatgagagggtgctttgcccatggaaccataaggctactgtcttttctttgacccttcctttccagtttttgaagataaagcaggaaataatcttctctgaagatgcttgataaaaattcccaaaacaacaaaacacatgcttccacttcattgataaaaaatttaccgcagtttggcacctaagagtatggcaacagcaacaaaaagtaatttcaaagagttaagatttcttcagcaaaatagatgattcacatcttcaagtcctttttgaaaatcagttattaatattattcttccctcatttccatctgaatgactgcagcaatagttttttgttttttttttccgagatggagtctcgctctgtcgcccagctggagtgcactggtgcaatcttggctcactgcaatctctgcctcctgggttcaagcgattttcctgccttagcctctcgagtagctgggactacaggcacgcgccaccacacccagctcatttttgtatttttagtagagacagggtttccccatgttggccaggatggtctcaatctcctggacctcatggtctgcccgcctgggcctccccaaagtgctgggattacagccgtgagccaccgcgccccggccagcaatacagtttttcagttactcgaacatctttaagccctataactcttaggctatgcatagccccatgtcctaatcaggcattcactgatcccagcagggttctccatctatttgtaccagcctcctctattcctcccaatctcaaggttactcttaaatactagtaaatgcaaaaagaacttgtaaagtggccaaggcatggcctatcaaaaagtccacccaaaggcaagttttcagccctgcctcacctgggtctagttcagctgacggatgagctgattgatgcgttcaccccgatagcccaggtgtgcccatctccttgaggaagcccactcttatttttggtagcatgacgggccactgagacggtggaaagggcacaagaaccatgagatctcctggaaatgcttccctgggaaggcaatttcatgaatgaggtcttccaagcaaatgacgccaaactttccccaggtgctcctccatcactgtaatgtcttgtcagagggatggtcttattcttgaccttggcttgtccacgtttcaaaatgagttctcggacagacttcagatttggaaatccccaggtcacataaggttccactatacgcagccatttttgaatcctggggggtgcctttacaaaagacaccactaaaaattttccttagggcgaagtcttgcaatggttctctgcaccaagtaaaactcacgccgtaaatcctttcgatgcgtacaaacaaaggccaaggaatgtttatctggcaattccaaggcatgaggtttcacttctagtcgtctgagacgcaccttgtcacgtttctgccgccaggaatcatgtaggaatgattccagtcgcttaaacctgagcccttttcctttcttctgctggtctgtcaaaccgttggggggagctcgtcaataccaaatgtagtccaacacatgcgggataaaactcaccaaataaaaattctaattactttctcttggttccccaccattacctccttctttgccaaaagtgcctgctttgcctgggtggctttgagggcttgataagccttcctctttttcaggagattttctggaaccaaagggatt

SEQ ID NO: 152474 - DNA, 776 bp, Homo sapiens
ccactgaagcgctcagatggctgtaacgacggccgacccacgcgtccgcccacgcgtccggacacaactgtgttcactagcaacctcaaacagacacgcatggtgcatctgactcctgaggagaagtctgccgttactgccctgtggggcaaggtgaacgtggatgaaagttggtggtaaggccctgggcaggctgctggtggtctacccttgggacccagaggttcctttgagtcctttggggatctgtccactcctgatgctgttatgggcaaccctaaggtgaaggctcatggcaagaaagtgctccgcggtgcctttagtgatggccctggctcacctgggacaacctcaagggcacctttgctcacactgaagtgagcttgcactgttgacaagcttgcacgtgggatcctggagaacttcagggctcctggggcaacgtgctggtctgtgttgctgggcccatcacttttgggaaaagaatttcaaccccaccagttgcaggcttgcctaatcaagaaaattggttggcttggtgttggctaaatgcccttgggccacaagtaatcacttaagcctcgctttccttgctggtccaatttccaattaaaaggttcctttggttccctaagtccaaatacttaaactggggggatattattgaaagggccttgagcattttggattttgcctaataaaaaacatttattttcatcgcatacaagaataaaacaagcgcggccgattaagaggatacttcaggggcgcaagat

SEQ ID NO: 152475 - DNA, 496 bp, Homo sapiens; identical to SEQ ID NO: 150663
  misc_feature (1)...(496): n = a,t,c or g

SEQ ID NO: 152476 - DNA, 1128 bp, Homo sapiens; identical to SEQ ID NO: 150664

SEQ ID NO: 152477 - DNA, 1941 bp, Homo sapiens
atgtggaagcatctttggaactgggtaataggcagtggttggaagactttggacgtccttgaagaagataggaagacaaaggaaaatttggtacttcttagagacttctcaagtggttgtgaccaaagtattgatagaaatatggacagtgaagtccaggctgatgagttctcagatagaaatgaggaagttattgggaactggagtaaaggtcagccttgttacaccctagcaaaggacttgtctgcgttgtgtccataccctaaggctttgtggaaggttgaactaaagagtgatgatctaggagagattcccctggagcttcagcgccttgttcatggtggccaagtgaatttggatatggaggatcatcaggatcaagaatacataaaacctagattgaggttcaaggcttttagtggagaagggcaaaaacttggaagccttacacctgaaatagtcagtacaccttcctctccagaagaggaggataaatcaatacttaatgcagttgttcttattgatgattcagtgccaacaacaaaaattcaaatcaggttagcagatgggagtcgtttgatacaaagattcaatagtacacacaggcgcagggcagtcaacggcccttcaaaccagctacccgacaaaccagggtctccatctccattctgtctggcacctctaatcacagtttgccctgcagctgatgacccctcgcctgcgctgtggctccacctcgttgctgctaggagtacaagtcaaaggaacggacaggtgctgtgctatctacctcgcaaatggggagccgtggcagtttgcacttcagtggaagcatgctgttgggtcttttggctgctggaaaggcaaaatgactcaggaatgcaattaggagggcctccgccctccgccatcttccgctggctagcggcgcccgctgcggacgcacctgccgcaacttccggggccggttgcctggcaaccgcaggaggggcgaagacgcgcaagttggccttggcagaattgtatgaagatgaagtgaagtgcaaatcttccaagtctaatagacctaaagccacagtcttcaagagcccacggacaccacctcaacgcactgttaaaaactggttccagctaatagcaccaaatgctggtgaggatgcggaacaacaagaacttgcatttattgctggtgggactgcaaaatggtacagccactttggaagaccatttggcaatttattacagagagctacgtggaatgtcagcagaaaactgctcaggaccacacaaatatccgggagccttagatactggggctttccaggcttccaggcaaaagtagctgcaactctggcaaaacaggaggttatacccccttacctatcccttggaagaggcgctgaattcaaggggctgagccaaaatagtctgcaggctccactccatggcacctcacagggtaagaaaaatgactaccctgagactgccgtactgcccaagcttccacgtgaaaaggtttccaggagagagaaacgtctggccagctccagatgtctcagcttaggcactaaatgtatgagtgaagaagccttcttggtcattacaaactctagcagttgcagctgtgaaggcggcttcccataccttattgcaggaaagtacgcccaagattttgggctggtggaagaagcttgcttcccctacacaggcactgattctccatgcaaaatgaaggaagactgctttcgttattactcctctgagtaccactatgtaggaggtttctatggaggctgcaatgaagccctgatgaagcttgagttggtccatcatgggcccatggcagttgcttttgaagtatatgatgacttcctccactacaaaaaggggatctaccaccacacttggtctaagaagaccctttccacccctttgagctga

SEQ ID NO: 152478 - DNA, 2466 bp, Homo sapiens
atgacataccccgaaaacattcaaatcaagaaaatcacaggggtacagtggatggtcccccttaagtataaagaagagggcagcaaggtgaccacttactgcaacgagacaatgactgggtgggtgcatgatgtgttgggccggaactgggcttgtttcaccggaaagaaggtgggaactgcctctgagaatgtgtatgtcaacatagcacaccttaagaattctcaggaaaagtattctaataggctctacaagtatgatcacaactttgtgaaagctatcaatgccattcagaagtcttggactgcaactacatacatggaatatgagactcttaccctgggagatatgattaggagaagtggtggccacagtcgaaaaatcccaagctctgtgccgctctgttcctctgctcctctggatgttcagctccttgtatctgtgcctgctaagattttgggtttatatgggggaaggatggggggcatggcgggccaaaaggcaccttttttgagagcacctgtcataggggtgtcctttgctgacagcttccagccatcacggcttcaggattcacctcagcttttcaatcaaggccaactgctaagtgcagcacaggtgggctccagcggttcccagcgcgatgtcaactgctcggttatgggaccacaagaaaaaaaagtagtggtgtaccttcagaagctggatacagcatatgatgaccttgggcaattctgggccatttcaccatcatttacaaccaaggctttgagattgtgttgaatgacttacaagtgggtttgcctttttttaagtataaagaaggaggggcagcaagggtgaccacttacttgcaacgagacaatgaccgggtggggggcatgatgtgtttggggccggaactgggctttgtttcaccggaaagaaggttggggactgcctctgaggaatgtgtatgtcaacacagcacaccttaaggaattctcaggaaaaagtattctaatagggctctacaagtatgatcacaactttgtgaaaggctatcaatgccattcagaagtctttgactgcaactacatacatgggaatatgagactcttacccctgggagatatgattaggagaaagtggtgggccaccagtcgaaaaatccccagggcccaaacctgcaccactgactgctgaatacagccaaaagattttttgcatttgccaacatcttgggactggaggaatgttcatgggatccaattttgtcagtcctgttcgaaaccaagcatcctgtggacagctgctacttcatttgacttctatgggtatgctagaaggcgaggaatccgtatactaaccaacaattctcagaccccaatcctaagccctcaggaggttgtgtcttgtaggccaggtatgctcaaggctgtgaaggcggacttcccataccttattgcaggaaagtacgcccaagattttgggctggtggaagaagcttgcttcccctacacaggcactgattctccatgcaaaatgaaggaagactgctttcgttattactccctctgagtaccactatgtagggaggtttctatgggaggctgcaatgaagccctgatggaagctttgagttggtccatccatggggcccatgggaggtttgctttttggaagtatatgatgacttcctccactacaaaaaaggggatcctaccccccacactggtcttaagagacccttttcaaccccttttgagcctgactaatcatgctgttcctgcttgtggggctatggcacctgactcaagcctctgggaatggaatactcggattgttaaaaacaagctgggggcaccggcttgggggttaagaaatggctacttcccggatccccagaggaactgatgagtgtgcaattgagagcatagcagtggcagccacaccccaattcctaaattttaggggaaggcttcccagtattttcataaatggatctgcatccagttgtaaagggggaattggtatattcacagactgtagactttcaacaagcatcttcagaagcttacaaatagattttccatgaagatatttggtcttcagaatttaaaactgcccttaaattttaatatacctttccaatcggccactggccattttttttctaagtattccaatttaagtggggaattttcctggaagatggtcagcctatgaagtaattaggagttttgcttaatcatttgtaattcaaacatgctatattttttaaaatcaatgtgaaaacatagacttatttttaaagttgtaccaatccacaagaaaataagtggcaagtaattatcacaaacttttaaaatagatgctcatatttttaaaataaagttttaaaaataactgcattatggagtttatgtttacttcagggaatttttatcactgactcagtaagattcacttatgttacctatgtaa

SEQ ID NO: 152479 - DNA, 489 bp, Homo sapiens; identical to SEQ ID NO: 128824
  misc_feature (1)...(489): n = a,t,c or g

SEQ ID NO: 152480 - DNA, 918 bp, Homo sapiens; identical to SEQ ID NO: 132020

SEQ ID NO: 152481 - DNA, 3189 bp, Homo sapiens
tttcgtgccgcagtcgccgctccagtctatccggcactaggaacagccccgggcggcgagacggtccccgaacatgactgcggccatgagggagaggttcgagcggatcctgcacgataagaactgcatgactgaccttctggccaagctcgaggccaaaaccggcgtgaacaggagcttcatcgctcttggtgtcatcggactggaggccttgtacctggtgttcggttatggagacatctctcctctgcaacctgataggatttggctacccagcctacatctcaattaaagctatagagagtcccaacaaagaagatgataccccagtggctgaacctactgggtagtgtaatggtgtgttcagtcattgctgaaattcgttctctgatattcttcctgtcatgggttccccttctaactacatggctgaaagtgtggcttcctggttggttggtgcaatggcccccgagccccttctaaatgggggctgaaactgctctaaaaggcgcatcatccggtccttttctttccctggaagcacgaagtcccagattggacaagtgttggtcaaggacccttaaagaccaaggccaaaagagactgcagatgccaatcactaaaagaagccgaagaaaagcctaccgtgaattttactggggtgaaagaaaaagaaagagcacctaaaccagactaaaccagactggatggaaactttcctgccctctctgtaccttcctacttggaagcttggatgttatattaggggactggtggtataattattttaataatgttgccttggaaacatttttgagatattaaagattggaatgtgttgtaagtttcttttgcttacttttactgtctatatatatagggagcactttaaacttaatgcagtgggcagtgtccacgtttttggagaatgtattttgcctctggggtaggaaaagatgtatgttgctatcctgcaggaaatataaacttaaaataaaattatataccccacaggctgtgtactttactgggctctccctgcacgcattttctctgtagttacatttaggataatctttatggttctacttcctataatgtacaattttatataattctgaaatgtttttaatgtatttgtgcacatgtacatatggaaatgttactgtctgactacaacatgcatcatgctcatggggagggagcaggggaaggttgtatgtgtcatttataacttctgtacagtaagaccacctgcaacaagctggaggaaccattgtgctggtgtggtctactaaataatactttaggaaatacgtgattaatatgcaagtgaacaaagtgagaaatgaaatcgaatggagattggcctggttgtttccgtagtatatggcatatgaataccaggatagctttataaagcagttagttagttagttactcactctagtgataaatcgggaaatttacacacacacacacacacacacacacacacacacacacacacacacacacacagagtaccctgtaactctcaattccctgaaaaactagtaatactgtcttatctgctataaactttacatatttgtctattgtcaagatgctacaatggaaaccatttctggttttatcttcaaagcggagaaacatgttgatttagtcttctttcccaatcttcttttttaaaccagtttaaggaacttctgaagatttgtccacctctgattacatgtatgttcttgtttgtatcattagcaaccaacatgctaaatggccggcacctagctctaagagcaattctgggagaatgaaaggaagtataaagtaacccataatctgcttggcaatagttaagtcaatctattcttcagtttttcttctggcctttaaggtcaaacacaagaggcttccctagtttacaagtcagagtcacttgtagtccatttaaatgccctcatccgtattctttgtgttgataagctgcacatgactacatagtaagtacaggaacagtaaagttaaaacgggatgtctccattgatctgccaaatcgttataggaggaggcatttgtctgggactaggaaaatctggagtttttacaccatactgtttaggagtccttttggatttaaactggactaaaacaagtgtataactaaactaacaagattaaatatccagccagtacaagtattttttaaggcaaataaggatgattagcttaccctgagataacacatcagtaagaacattaacaatgtctcatgatgtaaaaaatattaaagatatcaatactaagtgacagtatcactctaatataatatggatcagagcatttattttggggaggaaaacagtggtgattaccggcattttattaaacttaaaactttgtagaaagcaaacaaaattgttcttgggagaaaatcaacttttagattaaaaaaattttaagtatctaggagtatttaaatccttttcccataaataaaagtacagttttcttggtggcagaatgaaaatcagcaacttctagcatatagactatataatcagattgacagcatatagaatattattatcagacaagatggaggaggtacaaaagttactattgctcataatgacttacaggctaaaattagttttaaaatactatattaaattctgaatgcaattttttttttggttcccttggagaccaaaaatttaagttaaactgttgctggccagtcctaagtgtaaaatgttaaacagccaggagaaagttaagaaattgaagccagttcctgttgccatgatttccccaaatgaaatactgccttggcctagagtttgaaaaactaattgagcctgtgcccggcctagaaaacaagcgtttatttgaatgtgaatagtgtttcaaaggtatgtagttaccgaattccttaccaaacagcttaaattcttcaagaaagaattcctgcagcagttattcccttacctgaaggcttcaatcatttggatcaacaactgctactctcgggaagactcctctactcacagctgaagaaaatgagcacacccttcacactgttattacctatcctgaagatgtgatacactgaatggaaataaatagatgtaaataaaattgagttatcatttaaaaaaaaaaaaaaagggcggccgctaaagagta

SEQ ID NO: 152482 - DNA, 390 bp, Homo sapiens
gcagcccttttcccgacccctacggaaagacgagttcaggggccgtcctggcgaggtcaaaacatttagtctggtcttttcagggctgggtcagttagaacctaaacaaactagagacctggttgcaacccctcaggctctgctgatgctgtccccctttgttcctgcagcgtggaccctgccagcagccaggccatggagctctctgatgtcaccctcattgagggtgtgggtaatgaggtgatggtggtggcaggtgtggtggtgctgattctatccttggtcctagcttggctctctacctacgtagcagacagcggtagcaaccagctcctgggcgctattgtgtcagcaggcgacacatccgtcctccacctgtggcatgtggag

SEQ ID NO: 152483 - DNA, 491 bp, Homo sapiens
  misc_feature (1)...(491): n = a,t,c or g
gcaatttgcagtgtgccaggcntgtgccaagtattttgcttcgatgatttcacgtcatcttcaaaacaacctcatgagcgtggaccctgccagcagccaggccatggagctctctgatgtcaccctcattgagggtgtgnggtaatgaggtgatggtggtggcaggtgtggtggtgctgattctagccttggtcctagcttggctctctacctacgtagcagacagcggtanaaccagctcctgggcgctattgtgtcagcaggcgacacatccgtcctccacctggggcatgtggaccacctggtggcanggccaatggcaaccccgagccaactgaactcccccatccatcagagggtaatgatgagaaggctgaagaggcgggtgaaggtcggggagactccacttggggaggctggagctgggggtggtgttgagcccagccttgagcatctccttgacatccaangcctgcccaaaagacaagcat

SEQ ID NO: 152484 - DNA, 410 bp, Homo sapiens
gaatcagcaccaccacaccttgccaccaccatcacctcattacccacaccctcaatgagggtgacatcagagagctccatggcctggctgctggcagggtccacgctgcaggaacaaagggggacagcatcaagcagagcctgaggggttgcaaccaggtctctagtttgtttaggttctaactgacccagccctgtccatctttctattagactcctggtagacaaggatcgtatgtatttctcttggtactgaagtgtccaatataatgccccagtagttgctcaaagaattatctcatgaggttgttttgaagatgacgtgaaatcatcgaagcaaaatacttggcacagtgcctggcacacgtgaccgcacggtgaggaggggtcccgcaccctttttcctcgtgc

SEQ ID NO: 152485 - DNA, 506 bp, Homo sapiens
tcgccagcctctcaacattgtcatcattaccctctgatgatgggtagttcagtggttcggggtgcctttggcttgccaccagttggtccacatgctccaggtgtaggccgaatgtgtcgcctgttaacacaatagcgcccaggagctggttgctaccgctgtctgctacgtaggtagagagccaagctaggaccaaggctagaatcagcaccaccacacctgccaccaccatcacctcattacccacaccctcaatgagggtgacatcagagagctccatggcctggctgctggcagggtccacgcgtgaccgcacggtgaggaggggtcccgcaccctttttctgaggcgaaggttccgcttttggatggtcctattccctcggcgttggactggggtccatgggcccacccgaaccgaagggctgcctggccccagcctccgtgataagaccagttgtcccggccagtgaggagtagggtcggctaagggggtcacaaaccgtc

SEQ ID NO: 152486 - DNA, 1274 bp, Homo sapiens
aaatgagaccctgaacgcgtcccgaccgcccggaatcccggtcgacccacgcgtccggagaccggaccctgaacagaatcgcatattgccagtttttttcccgacccctacggaaagacgagtccaggggccgtcctggcgaggtcaaaacatttagtctggtcttttcagtgtgccaggcactgtgccaagtattttgcttcgatgatttcacgtcatcttcaaaacaacctcatgagataattctttgagcaactactggggcattatattggacacttcagtaccaagagaaatacatacgatccttgtctaccaggagtctaatagaaagatggacagcgtggaccctgccagcagccaggccatggagctctctgatgtcaccctcattgagggtgtgggtaatgaggtgatggtggtggcaggtgtggtggtgctgattctagccttggtcctagcttggctctctacctacgtagcagacagcggtagcaaccagctcctgggcagctattgtgtcacctggcgacacatccgtcctccacctggggcatgtggaccacctggtggcaggccaaggcaaacccgagccaactgaactcccccatccatcagagggtaatgatgagaaggctgaagaggcgggtgaaggtcggggagactccactggggaggctggagctgggggtggtgttgagcccagccttgagcatctccttgacatccaaggcctgcccaaaagacaagcaggtgcaggcagcagcagtccagaggcccccctgagatctgaggatagcacctgcctccctcccagccctggcctcatcactgtgcggctcaaattcctcaatgataccgaggagctggctgtggctaggccagaggataccgtgggtgccctgaagagcaaatacttccctggacaagaaagccagatgaaactgatctaccagggccgcctgctacaagacccagcccgcacactgcgttctctgaacattaccgacaactgtgtgattcactgccaccgctcacccccagggtcagctgttccaggcccctcagcctccttggccccctcggccactgagccacccagccttggtgtcaatgtgggcagcctcatggtgcctgtctttgtggtgctgttgggtgtggtctggtacttccgaatcaattaccgccaattcttcacagcacctgccactgtctccctggtgggagtcaccgtcttcttcagcttcctagtatttgggatgtatggacgataa

SEQ ID NO: 152487 - DNA, 1026 bp, Homo sapiens
ttgataccactgcaggttcgggaacgtaattcccggtgcgacccacgcgttcgagagaccggaccctgaacagaatcgcagattgccctcccttttccctacccctacggagagactagtgcaggggccgacctggcgaggtcaaaacatttagcctggtcttttcaggcgaggacttccccatccaggcacagggccggtccaatccccctttaatttcccatgactcctcgcgtcctgaagccccgcccccagttccccagccccgccccgaagtttgaggggtgtggacggtttgtgacccccttagccgaccctactcctcactggccgggacaactggtcttatcacggaggctggggccaggcagcccttcggttcgggtgggcccatggaccccagtccagcgccgagggaataggaccatccaaaagcggaaccttcgcctcagaaaaagggtgcgggacccctcctcaccgtgcggtcacggtacggacagggtagatcacaggctgagggacagagcaaagacccctgaggccggacacctggggtcctgccgggcccctccccacgagagttccctgtgtctgtgccaatcgttttcgtctttctttgccgcagattcttttcctgtaaatcatggataatgacattaaccttcttaccatcaggggttagttgtgggtgtgataaataattactaccgttattaagcaattgcaatttgcagtgtgcccggcactgtgccaagtattttgcttcgatgatttcacgtcatcttcaaaacaacctcatgagggctgggtcagttagaacctaaacaaactagagacctggatgcaacccctcaggctctgctgatgctgaccccctttgttcctgcaacgaggaccctgccagcagccaggccatggagctctctgatgtcaccctcattgaaggagagggtaaatgaggtgatggtggtggcaggtgtggtggtgctgattctagccttggtcctagcttggctctctacctac

SEQ ID NO: 152488 - DNA, 506 bp, Homo sapiens
gacagagacgccgagttctacaagttcctgcaggagaatgaccagagccagctaaacttcagcgactcggacagctctgaggaggaagaggagtcgttccactccctgccatatgtgctggaggaagccagcgttccgagcagctgtggccaccaccaaggggaccaggaaagtgctgaggccaacaaattccaggtcacggacagtgctgtgttcaatgctctggtcgtgttcaatgctctggtcaccttctgcatcagagaccttactggctgtctccagaagctgctgattggaaaggtggcaaaggacagcagcaggatgctgcagccgtccagcagcctgctctgggggaagctccgtgtggacatcaaggcgtacctgggctcggtcatacagctggtgtcctgtgtggcagagacagtggtgttggcggccgtgctatggcacatcagcgtgctggtgccctgcttcctgaccttccccaagcagtgctcaagagaatg

SEQ ID NO: 152489 - DNA, 2931 bp, Homo sapiens
tttcgtaagtggggtgcacgcttcgggttggtgtcatggcagctgcggggagccgcaagaggcgcctggcggagctgacggtggacgagttcctagcttcgggctttgactccgagtccgaatccgagtccgaaaattctccacaagcggagacacgggaagcacgcgaggctgcccggagtccggataagccgggcgggagcccctcggccagccggcgtaaaggccgtgcctctgagcacaaagaccagctctctcggctgaaggacagagaccccgagttctacaagttcctgcaggagaatgaccagagcctgctaaacttcagcgactcggacagctctgaggaggaagaggggccgttccactccctgccagatgtgctggaggaagccagtgaggaggaggatggagcggaggaaggagaagatggggacagagtccccagagggctgaaggggaagaagaattctgttcctgtgaccgtcgccatggttgagagatggaagcaggcagcaaagcaacgcctcactccaaagctgttccatgaagtggtacaggcgttccaagcagctgtggccaccacccgaggggaccaggaaagtgctgaggccaacaaattccaggtcacggacagtgctgcattcaatgctctggttaccttctgcatcagagacctcattggctgtctccagaagctgctgtttggaaaggtggcaaaggatagcagcaggatgctgcagccgtccagcagcccgctctgggggaagcttcgtgtggacatcaaggcttacctgggctcggccatacagctgatgtcctgtctgtcggagacgacggtgttggcggccgtgctgcggcacatcagcgtgctggtgccctgattcctgaccttccccaagcagtgccacatgctgctcaagagaatggtggtcgtatggagcactggggaggagtctctgcgggtgctggctttcctggtcctcagcagagtctgccggcacaagaaggacactttcctcggccccggtcctcaagcaaatgtacattacgtatgtgaggaactgcaagttcacctcgcctggtgccctccccttcatcagtttcatgcagtggaccttgaccggagctgctggccctggagccgggtgtggcctaccagcacgccttcctctacatccgccagctcgccatacacctgcgcaacgccatgaccacccgcaagaaggaaacataccagtctgtgtacaactggcagtatgtgcactgcctcttcctgtggtgccgggtcctgagcactgcgggccccagcgaagccctccagcccttggtctacccccttgcccaagtcatcattggctgtatcaagctcatccccactgcccgcttctacccgctgcggaatgcactgcatccgtgccctgacgctgctctcggggagctcgggggccttcatcccggtgctgcctttcatcctgggagatgttccagcaggtcgacttcaacaggaagccagggcgcatgagctccaagcccatcaacttcttccgtgatcctgaagctgtccaatgtcaacctgcaggagaaggcgtaccggggaggcctgggttggagcagctgttacgacctgaaccctgggagttacctgcacagccaggcacactgcatcggcttcccggagctggtgctgcctgtggtcctgcagctgaagtcgttcctccgggagtgcaaggtggccaactactgccggcaggtgcagcagctgcttgggaaggttcaggagaactcggcatacatctgcagccgccgccagagggtttccttcggcgtctctgagcagcaggcagtggaagcctgggagaagctgacccgggaagaggggacacccttgaccttgtactacagccactggcgcaagctgcgtgaccgggagatccagctggagatcagtggcaaagagcggctggaagacctgaacttccctgagatcaaacgaaggaagatggctgacaggaaggatgaggacaggaagcaatttaaagacctcttttgacctgaacagctcatgaagaggacgacactgagggattctcggagagagggatactgaggcccctgagcactcggcatggggtggaagacgatgaagaggacgaggaggagggcgaggaggacagcagcaactcggaggatggagacccagacgcagaggcggggctggcccctggggagctgcagcagctggcccaggggccggaggacgagctggaggatctgcagctctcagaggacgactgaggcagcccatctggggggcctggtaggggctgccgggctggtggccagtgtttccacctccctggcagtcaggcctagaggctggcgtctgtgcaaattgggggaggcagtagacacgggacaggctttattatttatttttccagcatgaaagaccaaaacgtatcgaagaactgggctgggctgggctggtgtggcctgctgaaagccccacagctgtgggctgctgcaagtcagctccgcgggggagctgacccgtgacgtccagcagaccgagaccagtcccagttcccagggggaggcctgcaggcgcctgggcgccttccaccacctgctgccctccgttctgcagacgctcgtccatgctgcaccagagctgctgctgtcagctcccccaagttctcttggaaatatgtgttcgctttcgctttggaagtcacattttcttttaaaattttttgttttgcatccgaaaccgaaagaacataaagcggtgggaggcagggccattgtgttgagtggtggctcctggagatttgtgtggccccacccctacccccggcaacctcaacacagaggctgggaagggtcgggggcccctggaagtagagccaaggtccccggacgcgtggg

SEQ ID NO: 152490 - DNA, 1383 bp, Homo sapiens
  misc_feature (1)...(1383): n = a,t,c or g
acacgcgcaccttgtcaccttgtcaccaatttcctgcccgggatcccagagctacccttcttggagcccacaggggaataaagtgaaacacctcaggctccaaccctcccaacccaaggctccctcctggagggagagaaaggatggaggacatcaggcagcccttggctggtccctgcgaacccgttgaagactgccatagatgtcctctttcggttacaggaccctgactgtgggccctcttcaccctgatcttgctgtccagggatcggatgagaaggtatttcgaggtacacggtgaggccaaaggaagctgggcggttgagcccaaagggttccctcgaggttcaactgcaggcaccacctgttaaccagccttgaagtggggtgggtttgggagacctctcttaggattaaggtttttgctgggacgaacaggttcagttgggaaacaattacttgggtctcaaacattttcccattgacacggtcctccaattgccacttcaccttggtccgggaagcaagaagtcaatgaattccaacgtcagcgtggtaccagcctccaaggcaggtcatcctgacactgcaacccactttggntggctgtggggcaagtccttcaccattgagtgcagggtgcccaccgtgggagcccctggacagccttcaccctctttcctgttccgtgggcaatgagattcttgcactatggaggacctttcggggaagggcagcccctgctccgcagggaggcccacagccacattcaaacagcacgggctgacagaagggggttggcccaccgcaaactttctccctccctggctgtgctgggacttgatgtcttcgcggtggcaaacatctttcacaaaacactcagcccccgaagatgttggaagatctatgaaacctgtgtccggaccagcccagattggtcatcattagtcaccggtggtgtcggtgttgcctgtcccctgttcgtgacatctgtccctgctctgccttcatcttcggcccagcacttgcgcccagcaagcgggatgggcacctacggggtgcgagcggcttggaggaggctgcctccaggccttccggccaatagcaacccatggagtggcatggccacacaccacggtggtcactggaactcagtgtgactcctcagggttgaggtaccagccctggctgaaggactgtgacaggcagcagagacttgggacattgccttttctagcccgaatacaaacacctggacttagccctgtgcccacagtgtctcctcctgggataacaatggccagggaggggagccaccatgggggacccctctccctagatgcctccctccccaccctctccttcacagggtggcacgaggcc

SEQ ID NO: 152491 - DNA, 1841 bp, Homo sapiens
  misc_feature (1)...(1841): n = a,t,c or g
attttcacgggcagccgctatttggtcacacagaggttggatggaggatttttccctactagaattaccctttttctatactatcctccaagatctcagtatatttaaaggcttgtttaatttctcttctcaccttttttaaattttagcatgactggtttttcacagaagaaggtgctgaagagcctcttgtaagtattgtctgtcagcatttgtactcagtagtttcatttgggacacaagatcctggcgcgccaacaatgtcaacttcctgctttgctattgtccgctttgcgccccggaagcaggtctctagctcagtttctgatctaatgaatatacaagtacggtgcttattttgcagttaattatgcgtaaacaatgtaaacacattaagcacaggtgctttacttagtaatgtgtcttttactaaatgttgtttaaattttaaagaaagtatctttgaagagatgatgaagagatctttgtttattaaccatagacaacagtgcaggaggaaagcacagtagactcccagccagtgccaaacatagatcatttactcaccaacattggaaggacaggagtctccccaggagatgtatcagattcagctactagtgactcaacaaaatctaagggttcttggggatctggaaaggatcagtatagcagggaactgcttgtgtcctccatctttgcagctgctagtcgcaagaggaagaagccgaaagaaaaagcacagcctagcagctcagaagatgaactggacaatgtattttttaagaaagaaaatgtggaacagtgtcacaatgatactaaagaggagtccaaaaaagaaagtgagacactgggcagaaaacagaagatcatcattgccaaagaaaacagcactaggaaagaccccagcacgacaaaagatgaaaagatatcactaggaaaagagagcacgccttctgaagaaccctcaccaccacacaactcaaaacacaacaagtcaccaactctcagctgtcgctttgccatcctgaaagagagccccaggtcacttctggcacagaagtcctcccaccttgaagagacaggctctgactctggcactttgctcagcacgtcttcccaggcctccctggcaaggttttccatgaagaaatcaaccagtccagaaacgaaacatagcgagtttttggccaacgtcagcaccatcacctcagattattccaccacatcgtctgctacatacctggcttagcctggactccagtcgactgagccctgaggtgcaatccgtggcagagagcaagggggacgaggcagatgacgagagaagcgaactcatcagtgaagggcggcctgtggaaaccgacagcgagagcgagtttcccgtgttccccacaagccttgacttcagagaggcttttccgaggaaaactgcaagaagtgactaagagcagccggagaaattctgaaggaagtgaattaagttgcaccgagggaagtttaacatcaagtttagatagccggagacagctcttcagttcccataaactcatcgaatgtgatactctttccaggaaaaaatcagctagattcaagtcagatagtggaagtttaggagatgccaagaatgagaaagaagcaccttcgttaactaaagtgtttgatgttatgaaaaaaggaaagtcaactgggagtttactgacacccaccagaggcgaatccgaaaaacaggaacccacatggaaaacgaaaatagcagatcggttaaaactgagacccagagcccctgcggatgacatgtatgagtanaagnggcaaagtgtanaattntnngggggggg

SEQ ID NO: 152492 - DNA, 1137 bp, Homo sapiens
ggatcctgaagctgacagcattcgggccgagatgtctcgctccgtggccttagctgtgctcgcgctactctctctttctggcctggaggctatccagcgtactccaaagattcaggtttactcacgtcatccagcagagaatggaaagtcaaatttcctgaattgctatgtgtctgggtttcatccatccgacattgaagtttgcctactgaagaatggaaaggagaattgaaaaagtgggagcattcagacttgtctttcagcaaggactggtcttttctatctctctgccgtacactgaatttcacccccaactgaaaaaagatgagtatgccctgcccgtgtgaacccatgtgactttgtcaccagcccaaagatagtttaagtgggatcgaggacatgtaaagcagcatcatggaggtttgaagatgccgcatttgggatggaatgattccaaatttctgcttgcttgcttttttaatattgatatgcttataacacttacacttttatgcaccaaaatgtaggggttataataatgttaaccatgggccatgatcttcttaaataattctactttgagtgcctgtctccatgtttgatgtatcctgagcaggttgctcccacaggtagctcctaggagggcctggcgacttagaggtggggagcacgacgaattctcttatccaacatcaacatcttggtcagatttgaactcttcaatcttcttgcactcaaagcctgttaagatagtttaagcgtgcataagttaactttccaattttacatactctgcttagaaatttggggggaaaatttagaaaatataattgacaggaatatttggaaatttgttataatgaatgaaacattttgtcatataagagttcatatttactttcttatacatttgtataaagtaaggccatggtgtgtggtgtaatctggtgttattttttgttccacaagttaaataaatcataaaacttgaaggaaaaaaatggaaaataggtaatcacaaaagaaaaaaatggtcgcgtttccacaatccctatgtaactttccttaatacaattttgaacccccttaaagggcactgggttctccggggtagtccctcgccctaaaaaatcgcgc

SEQ ID NO: 152493 - DNA, 617 bp, Homo sapiens
cggcacgagagctcacctggggccgcccaagcacccggatacagcagcagctgggccagctgacactagaaaaccttcagatgctgccagagagtgaggatgaggagagctatgacacagagtcagagttcacggagttcacagaggacgaggtgagtctgtgaactccttcggcgctctaactaatgaggtgccattcccttcaccctcccaggcccctagagctgctccttatcagaggggtatctacataatgagtctctcaaatttctgtgcataaccagtatcccaagaatgtacctgccccccccctttttttaatagcttactctttttttaaagagaagaattaaaggcgaactccctcagcctgtaaagttcattatatttgggctatggagaatggagtccaagagttatttccagtagtggcctccccatcccggtagcttggcagagctccgctcccggaagcttaacgtgtcttttttccccttggtttcagctgccctatgatgactgtgtgtttggaggccagcgtctgacgttatgagcgcaaaggggctgaaagaacatggacttgtatatttgtacaaaaaaaaagttttatttttcta

SEQ ID NO: 152494 - DNA, 1432 bp, Homo sapiens
aaagtccctgggcgcctgccacgaacactcagctcataataacctcgcggaaaacaccgcgggctcggcctccagaaaccccagccttgcgcaatcccccgcagcccgcgcctccctgggccccacgcggtgcactcaccacccctggggtttttccctctcttccccacaggttcctgcacttggccatcatccatgaagaaaaggcactgaccatggaagcgatccgccaggtgaagggagacctggccttcctcaacttacagaacaacctgcagcaggtgcgccgcttgcctggcccgggttctctctgaccctgggacgtagctgatgtagcagagtcaccccacatcctttctgaattcatggccactgagcactatttacccttaccttttacttcacatcagcccacatcctagagagtgaatgaaattccactgatttggtgaggtctttatgacccacctggagcctctgctatttgccagccctccccacccccctgtctaggaggagcagcacccaaccaggagacacgggttgaggggaactcggggtgtgggtttggtccatggcttactttctctggtctctcttgcattcgtagactccactccacttggctgtgatcaccaaccagccagaaattgctgaggcacttctgggagctggctgtgatcctgagctccgagactttcgaggaaatacccccctacaccttgcctgtgagcagggctgcctggccagcgtgggagtcctgactcagtcctgcaccaccccgcacctccactccatcctgaaggctaccaactacaatggtatgtctgcctccctgccctgccccaccccctcggagggcaggtgacgtggagaaggggcaggtgggccaacttaaggagtccaggcaagagcttaaactcctaacatttggaaggttgagaaaatatgtgtgcaaagtgcctattggatgcctttataaagttctttcagaacccagactgtgggttcttaaaattcagaagataagactacttgttccataaaagaataggtgaaaggagtgagggttgaaacaggtgggtatacttttttccttttgttcttccaggccacacgtgtctacacttagcctctatccatggctacctgggcatcgtggagcttttggtgtccttgggtgctgatgtcaatgctcaggttggtgcttcctgcccccgacgcactgagtcaggctcctcgtgcttatgttgtgagcagaaattccaaatgcagccataagcatctcaaattccttttggtttcaagagccctgtaatggccggactgccctttacctcgcagtggacctgccaaatcctgacctggtgtcactcctgttgaagtgtggggctgatgtcaacagagttacctaccagggctattctcccta

SEQ ID NO: 152495 - DNA, 1868 bp, Homo sapiens
atggtacaactcagcccgcactaccgtggggacagtgaagatggaaggaagaggatggtccggcagaggacgaagccagttctctttttctggtctgactggcttggaaattccccgagcctgaccccgccccagagaaatccccagccagcgtttatagggcgccgcggcggcgctgcagagcccacagcagtccgtgccgccgtcccgcccgccagcgccccagcgaggaagcagcgcgcagcccgcggcccagcgcacccgcagcagcgcccgcagctcgtccgcgccatgttccatggcggccgagcgcccccaggagtgggccatggagggcccccgcgacgggctgaagaaggagcggctactggacgaccgccacgacagcggcctggactccatgaaagacgaggagtacgagcagatggtcaaggagctgcaggagatccgcctcgagccgcaggagtgtgccgcgcgggtcggagccctggaagcagcagctcaccgaggacggggactcgttcctgcacttggccatcatccatgaagaaaaggcactgaccatggaagtgatccgccaggtgaaagggagacctggcttttcttcaacttcaagaccaacctgcagcagactccactccacttggctgtgatcacaaaccagccagaaaattgttgaggcacttctgggagctggctgttgatcttgagctccgagactttcgaggaaataccccccctagagccttgcctgtgagcagggctgcctggccagcgtgggagtccttgactcaagtcttgcaccacccccgcaacttcaactccatcctgaagggctacccaactacaatgggccacacgtgtctacacttagccttctatcccatgggctactgggggcatcgtgggagctttttggtgttccttggggtgcttgatgtcaaatgctccaggagcccctgtaaatggcccggattgcccattcacctcgcagtgggacctgcaaaatcctgaacctgggtgttcactcctgtttgaaagtgtgggggctgatgttcaacagagtttacctacccagggctattctccccctacccagcctcacccggggccgccccaagcaccccggatacagcagcagctgggcccagctgacactagaaaaccttcagatgctgcccagagagtgccggatgaggagagctatgacacgagagtccagagttccaccggagtttcaccagaggacgagcttgcccctatggatgactgtggtgtttttggaggcccgcgttctgacgttatgagcgcaaaggggctgaaagaaacatgaccttgtatatttgtacaaaaaaaaaagttttatttttctaaaaaaagaacaaagaaggaaaaaatttaaaggggtgtacttatatcccacactgcacactggcctggccccaaaacgtcttattttgtggtagtattcagcccttcattttgtttgcttttgtggaacttttttgttagggggacgagaaaagatcatttgaaattctgagaaaacttctttttaaacctcaccctttgtgggggttttttgggagaaggttatcaaaaatttcatgggaaggaccacattttataatttattgtggcttcgagtggactgacccccagtgggtatcctggtgacatggtaacagcccaggagtgtttaaggcgtttcagtggatgtgggggtggaaaagtttactacctgttcaaggttttgtgttaccctcctgtaaatgggtgtacataatgtattgttgggtaattattttgggtacctttatgatgtatatttaattaaaccagatttttacaaaaaaaaaaaaaaaaag

SEQ ID NO: 152496 - DNA, 2114 bp, Homo sapiens
ttttttttttttttttttaaaggatgtatatttaaatgagacagtgacagcagcattgttacaactgggcatccctcaagccaacctggtcccatggtgtgggaccaaccatggtggggctttcacaaaggggttgggggcacccggctttttcttgttgtgccacagacccacagaaagaaccatacgtgattccgtttaccggctgtgtcacccagaaggggcaggtggctggagatgctgggtggcaggtaaaaataaaaggggcccaaccctttgtccagcaaataccagcacagtttttctatggacacagtgatttgtaacttgaataatgtgaagttgattacacagatttcggaatggcttaatatccatatgacagaaatgtgatgcattcatgagacgtgtgcagactttggggtgttgggaaacagcatttggcctttaacctcctcctcagccccaaagaggaaggggaaacaggacaggaacccacactgttgatccaacctcacatcacattctctgcacgcactccgacatgttccctgctcaccgttccacctgaggtagggtcaggacccctgcccccattttccagatggggaaaccgaggcagagcagacaataagaaccttgcctaaagccaccacagtggggagtggacaccatccccttcctgatgccggaggacaaagaggagaccctgccgtctctcccactcctggaatgagcccacytgagccaggtggcctttctgctgactgaggtgtctcctcttgggtttcctggtcaaaggggaccaataaccaagcagtggcattctctgccctctgcccaccgtgtgccaaccatgtgcaccaacagccaagcacagtccagggtgtgggggaaaaggacagacaggagcacccccactgcccaaggcagaaggctgggaaaccacgtcctgacacgtcctctcctgaggcccctcgtggaccgcaggatctgtaaagtgcaaacaccaaagccaagtgtcccctcacccagagctgtaggtttcctctgctgtccaggggcctctgtcccgtggagtgagggacctcccacacgcctgccctgatcttcctgaatgtgctcagtcgagcgaatactctcagctctcttgacctcaggccctcccacaaaaggccattggctgggtcatttctgagctatctggagcacctccacagggagcaggacagagctcctcaggtaaatctggttccaagaaatgccaccagaccactgcaggatcccatcgcctaactggaacctcccccagcacacagcccctgctgcacacctggaggccaggacaccctcctcaggctggggcccacagcatcctagcttggagcaccaggaaaggtgggctgggccaaagcaggagcacccagcagggaaaagctcctatggccccttccctgctgttgtatagaatcagcaggtgaccccactgtactgaccatccgatgaggcctttgaacctcaggccagggagaggcaggtctgcaggtgacatctgtgaacagtcccagctggggacaaccagaaatccccaaggccacgagtggctgaaagggatggagcccccaggcagagccgaaaccccaccgcaggtgagactcggcccttggctgagtgtgtgcagccgcatcctcaggtgtcactcaacactcctctgaagctctgtccgggtcttggcctgatgagcttccagggtggttatgactggagctgaggaatttctagggcccggatgccctggtccaggggtgtggagggctctgtgccatgggggaggggagatgtccccccagctccctgcccatggagttctgcattgggggaaggatgggggccacgcaaggacccctcacagcagcacacccaggtgacagccaggtgcagccgccccgagtcccagcaagcacctgggagacagcgggccttgacactgcccacccgctctggcccagcaggggtggagggggccactgccgcaccccatgggtctccggagcagaaggaacaacttgatgttggcagggtgtggcctggcggtccaggcggggtgcccagcg

SEQ ID NO: 152497 - DNA, 446 bp, Homo sapiens
  misc_feature (1)...(446): n = a,t,c or g
atttgcccttgctacgccattcttnnnnnnnntctgtggccaggtttacaggaattaaaactgctattttggttggtggaatgtccacgcagaaacagcagaggatgctgaaccgtcgtcctgagattgtggttgctactccaggccggctgtgggaattaattaaagaaaagcattatcatttgaggaaccttcggcagctcaggtgcctggtagtggatgaggctgaccggatggttgagaaaggccattttgctgagctctcacagctgctagagatgctcaatgactcccaatacaacccaaagagacaaacgcttgttttttctgccacactcaccctggtgcatcaggctcctgctgtcccagccactgtttacggagagccagaaaaccaagtatcccactcagtctggcaagccgcccctgcttgtactacttcctgn

SEQ ID NO: 152498 - DNA, 1647 bp, Homo sapiens
  misc_feature (1)...(1647): n = a,t,c or g
atgggaatgccgggatgtgtgacacggcatggacggatcaagacggttttgacaaacatgaatgggcctggcagttttactcgggcctgtaaagacctgcacggcgttgagtcgtggaacggaaagatggcgagaggacttgatgtcatggccttccaagagcaaggcggttttaggccctgtgcggaactgaaatttagtggcgctcgagtcgcgtaccctatgctgccaatgccgtggaatcgacttcgttttgaaccaatttcatcggggggggctaactctatcaccgtgccattacggcgggcggtagtgttgccgcgatgtagcggcggcaggtgtaaggattccgctcgtgtaaggcacaataccggactgcattttgcgagttccgggagtggcctgccgtcctggatcccgaaagagcgggcgggttgccctactgttgccgaggtgtcacggcgtcgtgtccgtaccgtaaggttgctggtggcccacagggacccgtacgatctacgggtttctgggaaggtcccacgtacctcggagatttatgtccaccgaagtggtcgaactgctcgagctaccaatgaaggcctcagtctgatgctcattgggcctgaggatgtgatcaactttaagaagatttacaaaacgctcaagaaagatgaggatatcccactgttccccgtgcagacaaaatacatggatgtggtcaagggaaggaaagttttcccaaaacccttggggcctggagtcaaagcccaagccctcgactctgagaggatcccgctctttcccatgtacgttctccaacatgggcggttggggcttggccctttaaggcgagtttccttggccttggttcgcccacccgggatggtgggatctatccttggggaaaaggacgatgtcacttatgcaataaagcccacttgctggccggggcttgacattattccttcctgtctggctctgcaccgtattgaaactgagttaatgggcaaatttgatgaaggtaaactgcccaccgatccacacctgatgctccgactggccattgaaactgttgctcatgactatgatgtcatagttattgacagcgcgcctaacctgggtatcggcacgattaatgtcgtatgtgctgctgatgtgctgattgttcccacgcctgctgagttgtttgactacacctccgcactgcagtttttcgatatgcttcgtgatctgctcaagaacgttgatcttaaagggttcgagcctgatgtacgtattttgcttaccaaatacagcaatagtaatggctctcagtccccgtggatggaggagcaaattcgggatgcctggggaagcatggttctaaaaaatgttgtacgtgaaacggatgaagttggtaaagcagcctgtgctgaagtttccaagaggggangtccggcctccaactcgctgcgggtccccgccgtctccgcgcaacccccactggtggcgcccgaaaccgctacacggcctcccgacctccccgcatgtgtggcccacaaggcggcggcgttcaccctcgaaccccccgtgccgtccatctccgtcgcgtcttcggcccgccggctgcgtaaaactcacacgctccagcggggccctcggcctccataa

SEQ ID NO: 152499 - DNA, 3077 bp, Homo sapiens
  misc_feature (1)...(3077): n = a,t,c or g
ctgcagctgaggtacagcggcggtttctgaggttcttcactcgcgactgacggagctgcggtggcgtctccacacgcaaccatgaagttgaaggacacaaaatcaaggccaaagcagtcaagctgtggcaaatttcagacaaagggaatcaaagttgtgggaaaatggaaggaagtgaagattgacccaaatatgtttgcagatggacagatggatgacttggtgtgctttgaggaattgacagattaccagttggtctcccctgccaagaatccctccagttttcttcccaaaggaggcacccaagagaaaggcacaagctgtttcagaagaagaggaggaggaggagggaaagtctagctcaccaaagaaaaagatcaagttgaagaaaagtaaaaatgtagcaactgaaggaaccagtacccagaaagaatttgaagtgaaagatcctgagctggaggcccagggagatgacatggtttgtgatgatccggaggctggggagatgacatcagaaaacctggtccaaactgctccaaaaaagaagaaaaataaagggaaaaaagggttggagccttctcagagcactgctgccaaggtgcccaaaaaagcgaagacatggattcctgaagttcatgatcagaaagcagatgtgtcagcttggaaggacctgtttgttcccaggccggttctccgagcactcagctttctaggcttctctgcacccacaccaatccaagccctgaccttggcacctgccatcccgtgacaaactggacatccttggggctgctgagacaggaagtgggaaaactcttgcctttgccatcccaatgattcatgcggtgttgcagtggcagaagaggaatgctgcccctcctccaagtaacaccgaagcaccacctggagagaccagaactgaggccggagctgagactagatcaccaggcaaggctgaagctgagtttgatgcattgcctgacgatactgtaattgagagtgaagcactgcccagtgatattgcagccgaggccagagccaagactggaggcactgtctcagaccaggcgttgctctttggtgacgatgatgcttggtgaagggccttcttccctgatcagggagaaacctgttcccaaacagaatgagaatgaggaggaaaatcttgtataaagagcagactggaaatctaaaacaggagttggatgacaaaagccgccaccgtgtaaggcatatccaaagcgtcctctgcttggactggttctgactcccactcgagagcttggccgtccaggtcaaacagcacattgatgctgtggccaggtttacaggaattaaaaactgctattttgggtttggtggaatgtccacgcagaaaccagcaagaggatgctgaacccgtcgtccctgagattgtggttgctactccaggccggctgtgggaattaattaaagaaaagcattatcatttgaggaaaccttcggcaagctcaggtgcctgggtagtggatgaggctgaaccggatggtttgagaaaggcccattttggctggagcttctccacagctgcctnagagatgcctccaatgactccccaatacaacccaaagagaacaaaacgcttgttttttcttgccacactcaccctgggtgcatcaggctcctgctcgaaatcccttccataaagaagcacaccaagaaaatggattatacagcccaactttgacctccttatgcagaaaattgggcatgagggggcaagccccaaggtcattgacctcacaagggaatgagggccacggtgggagacggttaacagagaccaagattcccttgtgagacttgattgagaaagactttctacttgttactactttcctgatgcagtattccagggccgcagcttagtgttttgccaacagtatctcctggcatcaaacgcctcttctgggctcctcaaagttccttggatatcatggcccttggaccctggcatggcctggtatggcaccaggaaggcagagggctcagaaacctggggagcattttgccccgtctgggaagactgtgttctcttgggcaacagatgtgggcagctcgggggtctgggatattcctaaagtcccagcatgttcatccctttaccagggtcccacgtaccttcggagatttatgtccaccgaagttggtcgaacttgctccgaagctaccaattgangggcctcaagtcttgattgctcatttggggcctgaaggatgtgatcaactttaagaagatttacaaaacgctcaagaaagatgaggatatcccactgttcccccgtgcagacataaatacatgggatgtggttcaaggagcgaatccgttttagctcgacagatttgaggaatctgagtattcggaacttccagggcttgcctgcacaactcttgggattgagcaggcagcagctgccctgggagattgagctgggaggaagacatgtattaaggggagggaaaagcttgaccagcaagaagaacgtcggagacaaaagcagatgaaggttctgaagaaggagctgcgccacctgctgtcccagccactgtttacggagagccagaaaaccaagtatcccactcagtctggcaagccgcccctgcttgtgtcttgccccaagtaaggagcgagtctgctttttgagctgtctctcccaaggcaggaaggaagaaggaaggacaaaggaagcccgaggaggcccacagccgggaacagccacagccaagttacaagtgcaatttaactgccctggtcaagtgtgtcagtgactgcacattggtttctgttctctggctaatttgcaaaacctttccccacccttgtgtttcactccaccaccaaccccaggtaaaaaagtctccctctcttccactcacacccatagcgggagagacctcatgcagatatgcattgttttggagtaagaaataaaagcagcagattaattaaacagtaattgcagtgtttataggcttcatatgtgtgttaaacttaatatatcataaattaaaaccaatggtcagagccaaaaaaaaaa

SEQ ID NO: 152500 - DNA, 494 bp, Homo sapiens
atgcctcaggatcagtcatcacttcgggaatttgggcctcgaggcctagaattcggactatcgctccagcgagacgccgtcaagcagctttgtagtttttaagagaagaaaaaggaggagaaagtcacacctggccagcctgaagagagatgacaacatgaacacatctgaggatgaggacatgttccccatcgagatgagctcggatgaggccatggagctgctggagagcagcagaactcttcctaatgatatacctccattccaagatgatattcctgaggaaaacctctccctggctgtgatttaccctcagtcagcctcataccctaattcggatagagagtggtcacccactcccagtagcctggtagattgcaaaaggactgcccctcatcttgcagttgcggccgagggaggtctgtctagttcttgccctccacagtcttccctgttccatccttcggaaagtccttccggttcccgaccttcaa

SEQ ID NO: 152501 - DNA, 563 bp, Homo sapiens
caccatgcccagctaattttttgtacttttagtagagacagggggaaatttttttggtttgtttgttttttgagatggagtcttgctctgtcacccaggctggagtgcagtggtgcaatctcggctcactgcaacgtccacctcccgggttcaagcaattctcctgccttagcttctggagtatctgggattacaggtgcgcgccaccatgcccagctaatttttgtatttttagtaaaggtggggtttcatcatgttggcgaggctgggcttgaactcctggacctcaaatgatctgcccgccttggtctcccaaagtgctgggattactcgtgtgagccaccacacccggccaaaggtgtttttttgttttgttttgttttgttttgttttttttccagcaaacttgtttagaggaagacttagtccaaggaataactccatcctctctttgcctcgaatgttacaaactctttgcttaactttttttttttttttgagatggagtctcactctgtcacccaggctggagtgcagtggcgcaatctcagctcactgcaacc

SEQ ID NO: 152502 - DNA, 5390 bp, Homo sapiens
ccgggccgacgatttcgtcgcgcggcgccgctctggtgcagaccatgaattacgtggggcagttagccggccaggtgtttgtcaccgtgagaggagctctacaaggggctgaatcccgccacactctcagggtgcattgacatcattgtcatccgccagcccaatggaaacctccaatgctcccctttccacgtccgctttgggaagatgggggtcctgcgctcccgagagaaagtggttgacatagaaatcaatggggaatctgtggatttgcatatgaaattgggagataatggagaagcattttttgttcaagaaacagataatgatcaggaagttatccctatgcacctggccacctcccccatcctgtcagaaggagcttcgagaatggaatgccagctgaaaaggggctctgtggacaggatgaaaggcctggaccccagcacgccagcccaagtgatcgctcccagcgagaacgccgtcaagcagctctgtagtaaagaagagaagaaaaaggaggagaaagtcacagctggacagcctgaagagagatgacaacatgaacacatctgaggatgaggacatgttccccattgagatgagctcggatgaggccatggagctgctggagagcagcagaactcttcctaatgatatacctccattccaagatgatattcctgaggaaaacctctccctggcttgtgattttaccctcagtcagcctcataccctaattcggatagagagtggtcacccactcccagtccttccggttcccgaccttcaacacctaaaagtgattcagaattggtcagcaagtccacggaaaggacagggcagaagaacccagaaatgctttggctgtggggagagctgccgcaggctgctaagtcttcttctccacacaagatgaaagagtccagcccattgagcagtagaaaaatttgtgataaaagtcactttcaggccattcacagcgaatcttcagacacttttagtgaccaatcgccaactctggtcggtggggcacttttggaccagaacaagcctcagacagaaatgcagtttgtgaatgaagaagacctggagaccttaggagcagcagcgccactcttgcccatgatcgaggagctcaaacccccctctgccagtgtagtccagacagcaaacaagacggattctccttccaggaaaagagataaacgaagccgacatcttggtgctgacggcgtctacttggatgaccttcacagacatggaatcctgaagtggcggccctgtattttcccaaaaacggagatccttccggactcgcaaaacatgcaagcgacaacggagcccggtcagccaaccagtccccgcagtcggtgggcagctcgggcgttggacagtggcgtggagagcacctcggacgggctgagggacctcccttccatcgccatctccctctgcgggggcctaagcgaccaccgggagatcacggaagatgcattccttggagcaagctgttttcatatcaacaggttttgggcaaccccgctatttatcggtgacccccaattttgtggtaaagattgggagtaaatattataactggacaacagcagcacccctcctcctgggcaatgcaggccttccagaaacctttgccaaaggccactgtggaatctatcatgagggataaaatgcccaaaaagggaggaagatggtggttttcatggaggggaagaaacaccacaatcaaggaggaaagtaagccagagcagtgcttggctggcaaggcccatagcaccggagagcaaccgccgcagctcagcttggccaccagggtaaagcatgaatcatcctccagtgatgaggagcgcgcagctgccaagccatcaaacgcagggcacctccctcttctgcctaatgtcagctacaagaagactctccggctgacttccgagcagcttaaaagcttgaagttgaagaatggccccaacgacgtggttttcaagtgtcaccacgcagtaccaaggcacgtgccgctgttgagggcaccatctatctgtggaactgggatgataaaagtcatcatttctgatatttgatggggacaattaccaagatgagatactcttggccacattttgcccacccttgggaaggattggacccatcagggcatcgctaagctgtaccataaagtgagccagaatggatataaatttctctactgttctgcccgtgccatcgggatggcggacatgacgcggggctacctgcactgggtcaacgagaggggcacggtgctgccccaggggacccctgctgctgagtcccagcagcctcttctctgccctgcacagagaagtgattgaaaagaagccagaaaagttttaaagtccagtgtttgacagaccatcaaaaacctgtttttccccaacacagaacccttttatgctgcttttggaaaccgaccagctgatgtgtattcatacaagcaagtaggagtgtctttgaatagaatatttaccgtcaaccctaaaggagagctggtacaggaacatgcaaagaccaacatctcttcgtatgtgagactctgtgaagtagtcgaccacgttttcccgttgctgaaaagaagccattcttcagactttccctgttcggataccttcagtaacttcaccttttggagagagccactgccaccttttgaaaaccaggacattcattctgcctcagcgtaaaatgtcccaagcagcctcttgccagcagtgcagagcctggttgtcacccattaaaggataggtctccccggagtgcccagctccacctgggagcctggcgcgtcatcattggcctgacagcagagagaattgagaagcatttctcccctgccccaccccggggctgacatttctaagcacgataggaagggagcactttctaggctaggagttgggtgcatttgtaccgtgaaaagcattcctcagttgtggcttaatgccagttacgacgctgcctttccggcctgctccagcaagtagctactggttcacgtgcagattggggctgtgaaacctaagcagaaggcggctgtctgagggctgtccccgcctaggacagggtcaatcgaggaatgccagatgtgcacggtttttggcaaagtagggggcacatttccattatagcaatgttagtgccaccaccttctgaacacagtggggagggctgtgaaggctcatgtgacctggatctgaggtctcctgatagaaatctggacgccaccgggtccaggcctggcctcagacttggccttgtggatgggccccttacagtatttgctgactagtctcatttttaggtgataagtttttcctttaattcctttggttaaaggatagtctatttcattggcatatctccccccaagtttttgtggctcaaggctggaatatttatgccttaatatatctatggcagacatttaagaatgcgctttatctagctcatggtaacttttgcaacgccttagattaaaatgacagtaaatattactaaggcagtattttgaatgagtttgacactgccggcttccttccatccagggcgggtggtgctgacagtgtggacttgagcacactttatgccaaatgataatgatactgacttctgttgggagctctccaaagaaactgggtgggtttaagaaaataggttccaagaaggtccactataatccctttagatattatgtattgttttactctgattaggttactgtgataggcatttattcatattctttctataccactgtcattaatatattaaaaagatgtatgtgttagactatcgaaagggccttattctctctttctcatagactgaccttcttttggaatttctgagtcatttattttccttagctttttccactcaaattaagggcaagcgaaaaagtaataatttggcattctttaagcctacagaatgtgattctttcacttgtttattacactggctcggtggacagacaattttgaaaagtgaaagaattattttggtaaaagattttgctttactttttcgaagcattatttttttaaaagagtgttttactcccaacggattggaaaccatttttccctattttaaaatttccatcggtttaggaaatcaccagggggccaaaaaaatgggaacgggttgaaatgaaattttactctttcctgtgaaagaaaatccagcagagttgttgccctccgttgtagtggggggcccccggtagcattggatgcctttgcccaaatggttcagtgtggacacagcaaaggcaaacagactctgccactcgattcgcagaatgttctgtagaaatccggatgtgcatgtgcagaattcccttttgcaggtataaaatagtaataaaaatagtcctgcctgaggttgcagtgagccgagcttgcactactgcactccagcctgggtgacagagtaagactccatgtcaaaaaaaaaaaaaaaaaaaaaaaaagtcctgccttaactaactcctctgcgcttgttcactagtaacctaaagaggctatattcattctttatgcaatgagggtatttttgagtgaattttaactgctctgaactaagtataagctcatgggcctgcaaaggttcagacggtttctcctttgcacccaggaggaactttggctgcgagaatggggggatgtttccctcatggcagttggcatccaggcagccctctgcagcagcacaccctgcaggcggagttttcagaggatgcaattttggatcccgaattttgatgtaccttaaacttccacatcactgcaccctgaaacagagcatgctttccagaaagtcacactctcagatctgtgtcaagttcaatgtgagccctggcaaggctggcatattaacacctgccttctggcttctgaaagtgagatttgtatatgggctgcactcacgcatatacgagttggtttatctttgtgtacatgactataacccagtgatgctgaggtcatgtgctggaatgctgtatttggaccacacatttcaaagttgccctatggaaatgaatcctacttagtgacaagtcatcaaatgtttgtcacatgtgatgaagacaaatatgtatacctggcatagagaaaaatatatacctggtacattggagaaaaataattacactttcaaagagaattccctttgcaattttatgtttggatcaccactgtaagcacactttatttgcatttgatctgtatttgtatatgctgatgcaatgataaaaatcactgtaatacttcattgtgttgtactggatgcaaagctagaaaatattgcaataaatgagaccgatgaaagac

SEQ ID NO: 152503 - DNA, 614 bp, Homo sapiens; identical to SEQ ID NO: 152447
  misc_feature (1)...(614): n = a,t,c or g

SEQ ID NO: 152504 - DNA, 1543 bp, Homo sapiens
cttttcctgtggcagcagccgggctgagaggagcgtggctgtctcctctctccgccatggcgtgtgctcgcccactgactatcggtgtactccgaaaagggggagtcatctggcaaaaatgtcactttgcctgctgtattcaaggctcctattccgaccagatattgtgaactttgttcacaccaacttgcgcaaaaacaacagacagccctatgctgtcagtgaattaagcaggtcatcagactaagtgctgaagtcttggggtactggcagagctggtggctcgaaattcccagaagttcgaggtggtgggactcaccgctcttggccagggtgcttttgggaaacatgtgtccgtggaggccgaatgttttgcaccaacccaaaacctgggccgccgttggaatccgtagagtggacacaaactcaaaatcgatacgccaatctgttctggccctggctggcctcagccctaaccagcaactgggtcatgtctaaaaggtcatcgtattgaggaagttcctgaaacttcctttggtaagttgaagataaagttgaagggttacaagaagaaccaaggaagctgtttttgctccttaagaaactttaaagcctggaatgatatcaaaaaggttctatgcctctcggcgaatgagaggtgggcaaaggcaaaatggagaaaccgttcgccgtattccaggggcagggggcccgtgcatcatctataatgaggataatggtattcatcaagcccttcagaaacattcctgggaattactctgcttaaatgtaagcaaagctgaacattttggaagccttgctccctgggtgggcatggtggaacgtttcttgcatttgggacttgaaagttgcctttccgaaagtttagatgaattgtacggcacctggcggtaaagcccgcttcccctcaaagaagtaactaccattctttcccattgcacaagattgattaatacagattcttagcaggaatcttgaaaagccccagagatcccaaagagcccctccgggccaccgcggtaaacgagaagatcccattcgcagagttcctaaagaagaaccccactgaaaaacttgagaatcatgttgaagctaaaccccatatgcaaaggaccatgctgccggaacacccattcttcgcccaggcccaggaatcacaaagctccggggtggataagggcaagttgttgcaccagcggcacttacaagccaaatcagatgagaaggcggcggttgcaggcaagcagcctgtggtaggctaagacaggaaagaaaggctgcctgttggtttttaaaaaccagaagaagcctctggtggggaaaaaaggcagcagctaccaagaagccagcccctgaaaagaagcctgcagagaagaaacgctactacagaggagaagaagcctgctgcataaactcttaaatttgattattccataaaggtcaaatcgattttggacagcttcttttgaataaagaacctgattatacaggcagtgagaaacatgaaaaaaaaaaaaaaaaa

SEQ ID NO: 152505 - DNA, 2932 bp, Homo sapiens
cccccctcgagttttttttttttttttttactgagtgaagaaacacacaaattttatttagaaaatgaatgaccatgtttgcaataaactcccaaaatatccgccataagatggccataatattctgatgatcaaggagcacacatatacaaaagttattggattactgcaattctcagaggcacaaaacctgacatggtgtgatatagtatataatcagtcacgggggggggaaaagaacattaagtctttaaaaaggcttaggaagacataaacagtaaatctttgtttttctaccttcctttggacagtgttatatttcactttcttctttgcaaaatgtttccaaattcatttgctcaggatttatttaagataataacttaaaaccactaacagttggtttatgctatatgcatatcatgcatgttctactggttcaaggacaaaattaaaacaagatcttctctgtaaagcaaatatatttattatgcactttcatatacacagggattttttgagtaatatcataccaagggataaaataaaacttttacaatgtgaaattcaatgtacatttttggctatttacataccctcaaacccaagggaaaaataaaaagaaagcatttgtttgcaactaccatttgctgagaaagtgtaaatggaggacattaagcaaaacaaatatttgcatagcccaaaacaatattgaggaaaagtatttacttctgttttttaaggtatcaaactatttttggtgagaattccagtgagggtggggggtgaaaaacaaagaacaaaaattattcggctgtactttggcagtacgcactgatttcaggtcatttttccttcccaaaacctttccttagaaacattccagatttttatttcattactggatttttatcactttccttattataaactcatgatatttagggaatagacacagacggaatgttataaaaatgttataagcacatgcccatccatagttgtgtagtggcaacagctgatttataaaatttaaagattttaatttcaaaaatatctattaaggagttttatatttggaggacaatttttacttttttaatggagcagaaycccattttcatttatagtattaaatccccsacagahacaaataagcaaggcagggcatctccagcacccatcctatcatccttatcataactcaaagtcattaatgttctattccaaaacatactttatataaatacatcccgaggaatacttacttttgaaaatcgtatttttccaataggttctcttcgtaccaattgcttcaagtgtatatagtatggatatgaacacagttagctctttgaaaaacataagtcccttatgcaatgtcatatcttcgccctttggacacaaggtgcaattttgtaaaaacaataaaattaaataaatacaatttcaataattcaaagttacataaaaaccctggcagctttcagggttctctttctaaagaaaattacatgtaatagaaattagagcttcatcctctacagtaatgtaaatgtactgtatttgagatatgagtaaagttggttctaataatagtatgtgttcatatttattaatagactcattaacacttttaaggctactttgcaagagtcccattaattttatttactaaatgtcccatagggacaagaattcaatacttgaaacattcacatttgagttattaatattgccatgtcaccttaatatcaattgaacttatcaacttatctcgtagtcctcactatgacttatagatgacagacaaaatgagttttgctgactttaaaaaataaaagcaagaaaagccttacaataagattcaagtgaaacatttatcataattatacatttctatttccacgaacaatgtatcacatgtgtccttcatatatgaagatgacattactgacctttgttattaggacatattctaaagattttgttctagaagtagcaatggttttgtgctgaatctccaaattctctttcctcattcctcatcaacagtacatgaaaagaacagaatttctgggttctataagattaacaggcccattctaagatcaaatccacaaccttggcttctaaactgttatgacaacttttccagacatataaacgacccatctaagctacagctccactggatttaagagtaaggagactaaggctgtgggacacatgctcatttgaaccaattttaccttccttgtcatgaatttctctcttaaccctggcatccagccctcctgcatgcaattgtacaaagaagaaaacaggaaagagtatgaggatagaaaagtgcaaatccatcactattaagtaacaataaaaagtacacatgtgctatgattgacaggtgagtggtgtcatctgtgaagggcagcacattttatattcatccagaatattcatccaaccaaaccattaaaattaatccaattgattttgagtggggctattttggtcatgcagcaatttacaaaatagaaaccgctgagagagaagccagcaaaattaatttatttagccaggaggaagaggtcagtttagtcaatgaattattcagggatcaaaaatctacccttagatagacaggtgcatttctctctgcacacacatgtgactgaggcatggctttgtccctgagaattttcatgcctcaggaatgatagtctgtcttcttagaggtggaatgacaaagtgaatggaagatgaaattgtatcccagcggatgaaataggactttgttctgcctacagactggttggttgtttgttctgacatgtttagccagagatgagaagaattctactgggaaaatccagatttaaactacttaaagcagctccctaaactactataaaatattttttttaaactg

SEQ ID NO: 152506 - DNA, 290 bp, Homo sapiens; identical to SEQ ID NO: 146116
  misc_feature (1)...(290): n = a,t,c or g

SEQ ID NO: 152507 - DNA, 1283 bp, Homo sapiens; identical to SEQ ID NO: 146117

SEQ ID NO: 152508 - DNA, 1013 bp, Homo sapiens
gagactcccaacacaggggaagtctccaggacctccacaccattaacaagatgagccttgtgctcccttgggctctagagaggaagcccctctgagccctcagcccctctttcctccctctcctaaagtaatttgatcctcaggaatttgttctgccctcatctggccctggccagctctgcatttgacaaatgccaggaagaggaaactgttgagaaaacggaactactggcggaaaggcgagggctcactgagaacccatcccggttacccccgatcaccgctggtcttcgctcggacaccatgaaccacattgttgcaaaccttcttctctcctgtcaacagcggcccaggcttcccaactacgagatgctcaaggaggagcacgaggtggctgtagctgggggcgccccaaaaaccgtgcttacccgaatgtccacctgtgatccactatccgcaggcgagacctccgtggcctgaccatgttcgtctggtcccgtgttcaaacaccctcttcaatgaacccctgcatgccgtgggcttcataagcattcgctctactccgtgaaaagtctaagggacaggaaagatggttggcgacgttgaaccggggccccaaggcctaatgcctccacccgccaaagtgcctgaaaaatctgggcccgtgattttggggcatcttcatgaaccaattcttgctcatcaatcatccccccccaagtgttgggtcgtccagggcctaatggatagatcaaggaaggcatcactgaagggcaaggaagctctgccccgttgaacctgtaatcccaccgtactccaactttccattcctcggcctgcccccagaggccaggaagttctgcccttgaactgtattccacttactccaccttccattcctcgccctgtccccacagccgagtcctgcatcagccctttatcctcacacgcttttctacaatggcattcaataaagtgtatatgtttctggtaaaaaaaaaaaaaagtcgagc

SEQ ID NO: 152509 - DNA, 2352 bp, Homo sapiens
agaaggggaacaaaaaaaaaaatatctgaattttgaaaaaccacaaagctacaactctgactctctcttttttttgagacggagttttgctcttgttacccagggctggagtgcagtggcgtgatcttggctcactgcaacttccggtctcccggggttcaagtgattctcctgcctcagcctcccaagtagctgggtttataggtacccgccaccagacccggctaattttttagttttagtagagacggggtttcaccacgttgggccagggctggtcttaaatgaccctcttatttttaacttggatacctgctattctgccaaaagacaatttctagagtagttttgaatgggttgatttcccccactcccccaaactttgaagccagtgtctagcttactaaaaaaagagttgtatataatatttaagatgctgagtatttcataggaaagctgaatgctgctgtaaagggctctttaagtctttttttttttttaatccccttctaatgaatgaaactaggggaatttcaggggacagagatggggatttgttgtatgataaaactgtatgtagtttttagtcctttctgtttttgagaagccagtggttgggggcatttttaagatggctggctactcttgttttccctcatgataataaatttgtcataactcagtaacatgaacttgcccctagaggtagttgttaataattttgaaatattaaggtcttgccaagcttctgatgattcacaccgtgtactactgattattaagcaggacagacgtgagctttctgttgcaaataccgttggaggagaaagtaatttctaaatatacagagaggtaactagactatatatgtagcatcctgtgcctcaccttcatattaatatttgataaagattttaatttatgtaaaacttctaaagcagaatcaaagctcctcttggggaaatggcaagtctttaggataggcaagaccctgtatgaatagtagcaaagcattaccgcatggtaggagaacacactcgattaaaaatgttaagctatctgaagagataaaatgtgcaagtcttcaggatggcaccaaaccaaagggttaatgcctcctgggggcacatttcttagaggggcttgctgagtgtgtaaatataatccgacttttgtttgtgttacatgacttctgtgacttcattgaaaatcctgcacaattcagtttcagctctgggattactttcagttgacctttggtgaaggtttttaacctgtgtagaatgggtgtttgacttgttttagccctattaaatttttattttctttcactcctgtattaaaagtaaaacttacctaaaagaaaagaggtttgtgttcacattaaatggttttggtttggcttcttttaagtcaggctttctgaacattgagatatcctgaacttagagctcttcaatcctaagattttcatgaaaagcctctcacttgaacccaaaccagagtactcttacctgcctcttttctaaatgttcaggaaaagcattgccagttcagtcttttccaaaatgagggagaaacatttgcctgccctggtaataacaagactcagtgcttattttttaaactgcattttaaaaattggatagtataataaccaattagggagtaagccacccttttatagggcaccctgtagtttttatagttcttaatcctaaaccattttatatttccttccttttggaaaaaaccctaccatgctaccaagcccacccatatgccacagactaataccagtggagttggagttgggctctccccaccagtctttgagggtgaattacaaaaaagtccagcccattatcatcctccctgagttatttgaaatgatttttttggtaccatttttggctgcagtattggtggtagaatatacctataatatgggatcattctctacttcctgatttatttatttattactagacctccaaccccagtcttctttttccccttccacctctctttgcctgtaggatgtactgtatgtagtcatgcactttgtattaatatattagaaatctacagatctgttttgtactttttatactgttggatacttaataatcaaaacttttactagggtattgaataaatctagtcttactagaaaataaaaggagctgttttgtggctttgtttgacaggtcttcagtaagaataatgtttttggctttcacatatactcagtttaagtgcttagtattaataacaagccatgaagggaataaattcctcttccctgagacatagactttggaataaaagacattttaactgaaaaaaaaa

SEQ ID NO: 152510 - DNA, 537 bp, Homo sapiens
  misc_feature (1)...(537): n = a,t,c or g
ttgaaatagaaagcctgatggtccttcgcacggaaccccgggncgacccacgcgtccgggccgcagaagcgagatgacgagatgtaacctcatcgtttcggaaagcgtcgcaataagaccgcacacgttgtgccgccgctgtggctcctaaggcctaccaccttcagaagtcgacctgtggcaaatgtggctacccgtgccaagcgcaagagaaagtataactggagtgccaaggctaaaagaccgaaataccacccggaacctggtcgaatgaggcacctaaaaattgtatacccgcagaattcagggcatgggattcccgtgaaggaacaacaccttaaacccaagaagggcaagctgttgcaagcatccaagttcatctttaaggaatgttcaacggatttagttcatggcaattaaatgttctgggtgtaaagaatacatatctggttgtggagtttggatcataatacaagagaagcacagggcaaagacactgcataacctcaagaactaagaatggaaggactggccagg

SEQ ID NO: 152511 - DNA, 1035 bp, Homo sapiens
ccaaagtggctttaaagcaccaatgagtccatggcttgtgtaagaaatgattaggccttccatctagagaaatagctcctttttaaacagttgtctcttttaaacagggtttagtatttaagtgaggttgcaacagtgtcaaatggaaagcgaaagtgaaattctctccttcagcataaaagctgatccacaaacaagaggagcaccagacctcctcttggcttcgagatggcttcgccacaccaagagcccaaacctggagacctgattgagattttccgccttggctattgagcactgggccctgtatataggagatggctacgtgatccatctgggctcctccaaagtgagtaccccggggctggctcctccggtgtcttctcagtctctgagcaacagtgcagaggtgaaacggggagcgcctgggaagatgtggtgggaggctgttgctatcggggtcaacaaacagcttgggaccatggagtaccaagcccacgggccctggaagggtgatcattcagttctgcgaaggagatggtttggttcagaagattgaagttacagtattgtgaagcaggaactgtgaagcactttgttcacccagcttgaggtatgggcaagttcccgctgttaaacaggttggaaaagggccaaggtttgaagtcggtgtttggccacggcgcttggaatcctggttgttgctggatgctcttttgcgattaggagataccaaaaaaaaagcgacagcctgaagcagccacaaaatcctgtgttagaagcagctgtgggggtcccagtggagatgagcctcccccgatgcctccagcagcctgaccctcgtgccctgtctcaggcgttctctagatcctttcctctgtttccctctctcgctggcaaaagtatgatctaattgaaacaagactgaaggatcaataaacagccatctgccccttcagaaaggacttctaccatgtttttatagacttctgaatcacaaaggaggaaggtaacattgagtgaacactcactggg

SEQ ID NO: 152512 - DNA, 423 bp, Homo sapiens
atgggaatcaggctcctctgtcgtgtggccttttgtttcctggctgtaggcctcgtagatgtgaaagtaacccagagctcgagatatctagtcaaaaggacgggagagaaagtttttctggaatgtgtccaggatatggaccatgaaaatatgttctggtatcgacaagacccaggtctggggctacggctgatctatttctcatatgatgttaaaatgaaagaaaaaggagatattcctgaggggtacagtgtctctagagagaagaaggagcgcttctccctgattctggagtccgccagcaccaaccagacatctatgtacctctgtgccagcagtttatatggcgcgacctatggctacaccttcggttcggggaccaggttaaccgttgtagaggacctgaacaaggtgttcccaccc

SEQ ID NO: 152513 - DNA, 584 bp, Homo sapiens
cccacgcgtgcggtacagaggggtcattacggacccgcagcccctcatggagcaacccggcctcggtgactccagatactggctgagcagccgcctgagggtctcggccaccttctggcagaacccccgcaaccacttccgctgtcaagtccagttctacgggctctcggagaatgacgagtggacccacgatagggccaaacccgtcacccagatcgtcagcgccgaggcctggagtaaagcagactgtggctttacctcggggaactaacagcaaggggtcctgtctgccaccatcctctatgagatcctgctagggaaggccaccctgtatgctgtgctggtcagcgcccttgtgttgatgggcatggtcaagagaaaggatttctgaaggcagccctggaagtggagttaggagcttctaacccgtcatggtttcaatacacattcttcttttgccagcgcttctgaagagctgctctcacctctctgcatcccaatagatatccccctatgtgcatgcacacctgcacactcacggctgaaatctccctaacccagggggaccttagcatgcctaagtg

SEQ ID NO: 152514 - DNA, 1230 bp, Homo sapiens
acacctgcctgatgctgccatgggcccccagctccttggctatgtggtcctttgccttctaggagcaggccccctggaagcccaagtgacccagaacccaagatacctcatcacagtgactgataagggagatgttcctgaagggtacaaagtctctcgaaaagagaagaggaatttccccctgatcctggagtcgcccagccccaaccagacctctctgtacttctgtgccagaagttttgagcagggctacgagcagtacttcgggccgggcaccaggctcacggtcacagagaagaggaatttccccctgatcctggagtcgcccagccccaaccagacctctctgtacttctgtgccagcagttcttcccaggggcgactctccccggggtttaactatggctacaccttcggttcggggaccaggttaaccgttgtagaggacctgaacaagctgttcccacccgaggtcgctgtgtttgagccatcagaagcagagatctcccacacccaaaaggccacactggtgtgcctggccacagggtatcttccctgaccacgtggagctgagctggtgggtgaatgggaaggaggcgcacagtggggtcagcacagacccgcagcccctcaaggagcagcccgccctcaatgactccagatactgcctgagcagccgcctgagggtctcggccaccttctgggcagaacccccgcaaccaatttccgttgccaagtccagttctacgggctctcggagaatgacgagtggacccaggatagggccaaacccgtcacccagatcgtcagcgccgaggcctggggtagagcagactgtggcttcacctccggtaaagtcttaccagcaaggggtcctgtcttgccaccatcctctatgagatccttgctaggggaaggcccaccctgtattgcttgtgctggtaagcgccccttgtgttgatggccaatggtcaaagagaaaggatttctgaaggcagccctggaagtggagttaggagcttactaacccgtcatgggtttcaatacacattcttcttttgccagcgcttctgaagagctgctctcacctctctgcatcccaaatagatatccccctaatgtgcatgcacacctgcacactcacggctgaaatctccctaacccagggggaccttagcatgcctacgctgactaaaccgaataaaaatgttctggtctggcctgactctg

SEQ ID NO: 152515 - DNA, 2108 bp, Homo sapiens
atggccaacttgctcacagagggcactcagtcagaccaagaactccttgtttctcatcctgttttttatgattacaaaactcttgcttccaccctggaagataactgctatagatgcctgtatgtaaatggtgctgtctccagcaactggcatgctgaagaagaattgattcacggggtataaatgttggggattggaagtggggatgaaatggcacttgttgatacaggagcagagaggtgaggccgactgctgaagacagctcgccaccctccttgcctccactccaatccaggggctggggccacattctttgccttcatttatcctcagatcaggtgagatcgacaggaggtgttgatggcagtgccagcaattattgctaatccgtttgcatccttatgcatagatctgaattcagactttgtgaatttccagaggtgtgggtaatataatagaattcagtgagtgggcatggctgatcttgtgcaaattaaaagttatggggcataagaatagcaaaagttgaacttcttttaaaaagggaaagtaccctgaggagccagtattgggttgagggctctttcagtatgcccaggttgggcagcacttgaggaacccgcaggaacgggcctgtttgtttaccaaaaagggagatttgacttcagctgccccttgggtgcatctgactgactatgacttgctgaggagattcccaaggaccctttaatggccaggggcttaacctcttccatgtggcagttgaggacctctgggagggaagtgttcatccctctgggctttgtgtggtactcaattatggtgcagtgcgggcatgaaatgaagacaccccaaatagggcttacagatacgatatgttttaaaatgttcgtattttaacaaaaacatactgacactgtttggaaatggcaacagggaagatagcgaaaatgaataacttaacattacgaaaagatggaacaaggtacatgttcccaaggcaggtggcctgtgaacttccttcgaagtgaaggcatccccctccagccacctttcagcctgctaggttaggacgacccgccgcccaccctcccaggacctccagccctgcaactgcctttcctctcttttaaataattcttcattgagttctaatatgtaaaaaaaaaaagtttactgtaaagtttgcaaataaggaaattttttttaaaagtcctcagtaatcttaccagtaacaattgttatgggcacatttgcttttggaagatttcttttgtatgcatgggataagtacatttttaaacaaaaatgggattatgccataaattctattttgggactttaatatatagggaacaccttttttaatgatgacaggatgttcccttgcatggctgtatcaatttaaacaatcttgtttcaatgggcatacagggaattttctagtttttttttcctcttaaaaaaaaatacttgcgatgactttccttgtaactcaaactttttcacggctgttgttatctctttgggaatgctgaaaacatacatttcgagaaggaaatgactgttaaactcttaagacttcaggttcatattgctaaactgcccagcagggagggattttttcaattagggttctcactggtgaggcaaacctgatgccttcccctcttcctcagaaccggctttatcacattgaaaacctttgctcctccgacggatagagtctgctttccctgtggatgtgagcattgctttgtctgctggtgactgaacatctctaccttgtgtcaattggccatttgtggtgtgtgtgtgtgtgcgtgtgtgtgtgtgtgtgtgtgtatgattttctaattcctagtcatttttctattgattgttttgcaaaagccatttacatcttaaggatattgataatcttttgttatatttgatgcaaatatttttttccagtttataggttgccttttaattttgtgtttcaggtagataaaagttaaacgattttcttaggttagtttatcactgtggtttctgaacttgttatgtgtagatcttttccaccccaagagtacataaatattaatccatactttcttaaaaaa

SEQ ID NO: 152516 - DNA, 393 bp, Homo sapiens; identical to SEQ ID NO: 133045
  misc_feature (1)...(393): n = a,t,c or g

SEQ ID NO: 152517 - DNA, 376 bp, Homo sapiens; identical to SEQ ID NO: 133046

SEQ ID NO: 152518 - DNA, 1425 bp, Homo sapiens; identical to SEQ ID NO: 133047

SEQ ID NO: 152519 - DNA, 1353 bp, Homo sapiens
atggtaggagctgctgacacagctgtgagcataatggtcctggctcttgtggggctagatgaatctgaatttagagacaaactcactccaattactatttttatggaatatcggttggattatagaacagctgctgatacaacaggcttgcaacccattcttaaccagttcacgcctgctaacattagtcgacagtctggatttgtattgttaacttgtagtgatcaaaagaagatctatattggggatgacaaccctctgacattgattgttaaggctcagaatcaaggagaaggtgcctacgaagctgagctcatcgtttccattccactgcaggctgatttcatcggggttgtccgaaacaatgaagccttagcaagactttcctgtgcatttaagacagaaaaccaaactcgccaggtggtatgtgaccttggaaacccaatgaaggctggaactcaactcttagctggtcttcgtttcagtgtgcaccagcagtcagagatggatacttctgtgaaatttgacttacaaatccaaagctcaaatctatttgacaaactgagaaacaatggtccaagttcattcagcaaggcaatgctccatcttcagtggccttacaaatataataataacactctgttgtatatccttcattatgatattgatggaccaatgaactgcacttcagatatggagatcaaccctttgagaattaagatctcatctttgcaaacaactgaaaagaatgacacggttgccgggcaaggtgagcgggaccatctcatcactaagcgggatcttgccctcagtgaaggagatattcacactttggaaattgaggcaatttgttatgactggtacgtagggtctgtgataggcaagatacgacatgtccttggtctcatgaagcttatgttctatagcttacttactttgtgtagtcatagaataagtaaacaatggggaaatccagatagtgataaagatgatggattttttagaaggcaagatattgcaattgctgctccatatgggggtgaagataaaaaaggaattgtttatatcttcaatggaagatcaacaggcttgaacgcagtcccatctcaaatccttgaagggcagtgggctgctcgaagcatgccaccaagctttggctattcaatgaaaggagccacagatatagacaaaaatggatatccagaggaactggcagtttcagcaggcctgaagcggaaaatgtgctcagtggttgagaaacggcatggaggtcaatatggcctagtagaacagaacatgaagcaaaataaccccgggtattcacccaaatttgaaataaaggtcaccttttag

SEQ ID NO: 152520 - DNA, 649 bp, Homo sapiens; identical to SEQ ID NO: 133048

SEQ ID NO: 152521 - DNA, 423 bp, Homo sapiens; identical to SEQ ID NO: 133050

SEQ ID NO: 152522 - DNA, 3852 bp, Homo sapiens
atgtgtggaggagtgtttgccacagaggaactggcagtttcagcaggcctgaagcggaaaatgtgctcagtggttgagaaacggcatggagatttccaggtggaacttcttttggataaactcaagcaaaagggagcaattcgacgagcactgtttctctacagcaggtccccaagtcactccaagaacatgactatttcaagggggggactgatgcagtgtgaggaattgatagcgtatctgcgggatgaatctgaatttagagacaaactcactccaattactatttttatggaatatcggttggattatagaacagctgctgatacaacaggcttgcaacccattcttaaccagttcacgcctgctaacattagtcgacagtctggatttgtattgttaacttgtagtgatcaaaagaagatctatattggggatgacaaccctctgacattgattgttaaggctcagaatcaaggagaaggtgcctacgaagctgagctcatcgtttccattccactgcaggctgatttcatcggggttgtccgaaacaatgaagccttagcaagactttcctgtgcatttaagacagaaaaccaaactcgccaggtggtatgtgaccttggaaacccaatgaaggctggaactcaacatcttttatcaccttgtacccagttttctatgcaagtatttctttttcactacacagcttcctcatcagtggtggcattagattctcataggagcaaaccctattgtgtgaaccctgctgtgaagtgtgcatgcaagggatctaggttacatgcttcttatgagaacctaatacctggtgatccgagttggacagtttcatcccgaaagcatccccctctatgtccagggaaggaaagccggatgtttcttctcgtgggagctcccaaagcaaacaccacccagcctgggattgtggaaggagggcaggtcctcaaatgtgactggtcttctacccgccggtgccagccaattgaatttgatgcaacaggcaatagagattatgccaaggatgatccattggaatttaagtcccatcagtggtttggagcatctgtgaggtcgaaacaggataaaattttggcctgtgccccattgtaccattggagaactgagatgaaacaggagcgagagcctgttggaacatgctttcttcaagatggaacaaagactgttgagtatgctccatgtagatcacaagatattgatgctgatggacagggattttgtcaaggaggattcagcattgattttactaaagctgacagagtacttcttggtggtcctggtagcttttattggcaaggtcagcttatttcggatcaagtggcagaaatcgtatctaaatacgaccccaatgtttacagcatcaagtataataaccaattagcaactcggactgcacaagctatttttgatgacagctatttgggttattctgtggctgtcggagatttcaatggtgatggcatagatgactttgtttcaggagttccaagagcagcaaggactttgggaatggtttatatttatgatgggaagaacatgtcctccttatacaattttactggcgagcagatggctgcatatttcggattttctgtagctgccactgacattaatggagatgattatgcagatgtgtttattggagcacctctcttcatggatcgtggctctgatggcaaactccaagaggtggggcaggtctcagtgtctctacagagagcttcaggagacttccagacgacaaagctgaatggatttgaggtctttgcacggtttggcagtgccatagctcctttgggagatctggaccaggatggtttcaatgatattgcaattgctgctccatatgggggtgaagataaaaaaggaattgtttatatcttcaatggaagatcaacaggcttgaacgcagtcccatctcaaatccttgaagggcagtgggctgctcgaagcatgccaccaagctttggctattcaatgaaaggagccacagatatagacaaaaatggatatccagacttaattgtaggagcttttggtgtagatcgagctatcttatacagggccagaccagttatcactgtaaatgctggtcttgaagtgtaccctagcattttaaatcaagacaataaaacctgctcactgcctggaacagctctcaaagtttcctgttttaatgttaggttctgcttaaaggcagatggcaaaggagtacttcccaggaaacttaatttccaggtggaacttcttttggataaactcaagcaaaagggagcaattcgacgagcactgtttctctacagcaggtccccaagtcactccaagaacatgactatttcaagggggggactgatgcagtgtgaggaattgatagcgtatctgcgggatgaatctgaatttagagacaaactcactccaattactatttttatggaatatcggttggattatagaacagctgctgatacaacaggcttgcaacccattcttaaccagttcacgcctgctaacattagtcgacaggctcacattctacttgactgtggtgaagacaatgtctgtaaacccaagctggaagtttctgtagatagtgatcaaaagaagatctatattggggatgacaaccctctgacattgattgttaaggctcagaatcaaggagaaggtgcctacgaagctgagctcatcgtttccattccactgcaggctgatttcatcggggttgtccgaaacaatgaagccttagcaagactttcctgtgcatttaagacagaaaaccaaactcgccaggtggtatgtgaccttggaaacccaatgaaggctggaactcaactcttagctggtcttcgtttcagtgtgcaccagcagtcagagatggatacttctgtgaaatttgacttacaaatccaaagctcaaatctatttgacaaagtaagcccagttgtatctcacaaagttgatcttgctgttttagctgcagttgagataagaggagtctcgagtcctgatcatatctttcttccgattccaaactgggagcacaaggagaaccctgagactgaagaagatgttgggccagttgttcagcacatctatgagctgagaaacaatggtccaagttcattcagcaaggcaatgctccatcttcagtggccttacaaatataataataacactctgttgtatatccttcattatgatattgatggaccaatgaactgcacttcagatatggagatcaaccctttgagaattaagatctcatctttgcaaacaactgaaaagaatgacacggttgccgggcaaggtgagcgggaccatctcatcactaagcgggatcttgccctcagtgaaggagatattcacactttgggttgtggagttgctcagtgcttgaagattgtctgccaagttgggagattagacagaggaaagagtgcaatcttgtacgtaaagtcattactgtggactgagacttttatgaataaagaaaatcagaatcattcctattctctgaagtcgtctgcttcatttaatgtcatagagtttccttataagaatcttccaattgaggatatcaccaactccacattggttaccactaatgtcacctggggcattcagccagcgcccatgcctgtgcctgtgtgggtgatcattttagcagttctagcaggattgttgctactggctgttttggtatttgtaatgtacaggatgggcttttttaaacgggtccggccacctcaagaagaacaagaaagggagcagcttcaacctcatgaaaatggtgaaggaaactcagaaacttaa

SEQ ID NO: 152523 - DNA, 3210 bp, Homo sapiens
acgctgcgtggacgggagcagtggtaagcaaaggaccgtctgcgctgctgtccccgccccgcgcgctctccgccgtcgtccctggcggtcgctccgaagctcagccctcttgcctgccccggagctgtcccgggctagccgagaagagagcggccggcaagtttgggcgcgcgcaggcgcgggccgggcactgggcgcctcgctggggcgggggaggtggctaccgctcccggcttggcgtcccgcgcgcacttcggcgatggcttttccgccgcggcgacggctgcgcctcggtccccgcggcctcccgcttcttctctcgggactcctgctacctctgtgccgcgccttcaacctagacgtggacagtcctgccgagtactctggccccgagggaagttacttcggcttcgccgtggatttcttcgtgcccagcgcgtcttcatcagtggtggcattagattctcataggagcaaaccctattgtgtgaaccctgctgtgaagtgtgcatgcaagggatctaggttacatgcttcttatgagaacctaatacctggtgatccgagttggacagtttcatcccgaaagcatccccctctatgtccagggaaggaaagccggatgtttcttctcgtgggagctcccaaagcaaacaccacccagcctgggattgtggaaggagggcaggtcctcaaatgtgactggtcttctacccgccggtgccagccaattgaatttgatgcaacagggcctatcggatgcgcgacatcacgagtgacgcgtagtcattttcccacgtcccgtccctgccccctcctagtgggacgcagtgggcgcgcacgcgcagctccgcttccgggagccgctcctcgctacccactatgctctgcgacatcgacctgtcgcaaaggccgcgtttgcggggccaatgagcgactcgctttccgtgcgggccagaacccctgacggtattcagctgcgcgtaagtctggccggtgccatctgtctccgcaatgccccccaagaaacaggctcaggccgggggcagcaaaaaggcggagcaaaaaaagaaggagaagattatcgaacccctgatgacgctagctctctcattactatagtgacgctgctggcgcccccgcacgctgggctttgcctctccgcccacacgcccgtgttcacccacccatgcacccgggtgcgaaatgacccctcgggactggcacagggttttatccttcgctagtcctctcagaattgaggagattttccaaggttatgacaaaactttcggtttgaagaataagaaaggagcaaagcaacagaagtttatcaaggctgtcacacatcaagttaaatttggtcaacaaaatccacgtcaggtagcacagagtgaagctggaaaaggaaattgaagaaggatgacaagaagaaagaattgcaggagctaaatgagctgttcaaacctgtagttgctgctcaaaaaattaagttaaaggtgcagatcccaagtctgtagtattgtgcattcttcaagcaagggcagtgtactaaaggagataagtgtaagttctcccatgacttgactctgggagagaaaatgtgaaaagcgaagtgtttacattgatgcaagagatgaagaacttgaaaaagagacaaagtcttcccttatccaggctgatactatggataattgggatgagaaaaagctggaagaagtagtgaacaagaagcacggtgaggcggaaaagaaaaaaccaaaaactcaaatagtgtgcaagcatttcctggaagctattgaaaacaacaagtatggctggttttgggtatgccctggagggggtgatatttgcatgtatcgtcatgcacttcctcctggatttgtgttgaaaaaagataaaaagaaagaagagaaagaagatgaaatttcattagaagatctaattgagagagagcgttctgccctaggtccaaatgttaccaaaatcactctagaatcttttcttgcctggaagaaaaggaaaagacaagtataagattgttaaacttgaacaagatatggaaagagaggaaagctgacttcaaagcagggaaagcacttagtgatccagtgggcgtgaagtgtttgaatttcgtcctgaactggtcaatggatgatgatgaggaagcagatgataccccgctacaccccagggaacaggtggtgattgaggttgatgattcagtgagtgtaaattgacatagattttaagcctggtacatccccaagagatgtagatggaaacaggtattactgtagccagtcttggaaagattcagcacatatacttcagattaaagatgaaaacaaattaagtgaagcttctgggaggtagggctgaaaatggtgaaagaagtgacttggaagaggacaacgagagggagggaacggaaaatgggagccattgatgctgttcctgttgatgaaaatcttttccctgggagaggatttgggatgaactagaagaagaatataaatgcacttgatttagaagaatgacaccaaacacatcgctgaaaaaattaagtcagctcagcacgagttgaaattgactacattaatttctttccacctagaatcaacaggatgtttatttcctatgctgattctggaggagttaacctcctgcaaaaaaggcatcttgtccctacatcttctcttctgactttggctacatctcatagtaagttcagagtagttcatgataaattgaaaatataatggtccattgccagaaaatggattggatgttgtaactgtccacccaagtaagaaggtgtatctgcctttccatcttttggttttcatttgggccatgtgcttattacccagaaaccaacaaaccttatatttaaaaataccccttcatttggacacagtttttaaatgagtgatttaatttccctctgtatttgtatgtttagaagactgccctaaaacatgagcactgtactttataaaaggaaactgcgtatgcagattccagtattgtgtatctttgggacaattagatgggcatttaaaatggaacttcttttatctgacaggatcagctacaatgcccggtgttaaattgtttaaaagtttcccttttcttttttgccaataaagttgtaaataaagaccatcatacattaaaatccaaaaaaaaaaacaaagggcggccgct

SEQ ID NO: 152524 - DNA, 489 bp, Homo sapiens
gagcgagcagcacagagacggctgaaagctgagctaggaattcccttggaagaggttcctccagaagaaattaattatttaacacgaattcactacaaagctcagtctgatggtatctggggtgaacatgaaattgattacattttgttggatggtgagcagcgtccctctcatgtgacacccacagttatgccggatgttgccagatgcccctaggggacagagtcaacccccaactgaggaccactgtcctacagagtcaggaaatattgtagggagaaaaaaataacaacaacaaaggcctgtgttaatgttaaatagatgagattatggaatgtgtatattaatgttaaaaattgtaccttgatcaatgtactttttataaacttgccatagatatctcagatttgaaacctcaagacagatttattattcttaaatgctgtatgataatgaagaaaaataaaaatttatttcttgcaaaaaaaa

SEQ ID NO: 152525 - DNA, 409 bp, Homo sapiens
gatgcctgaaataaacactaaccacctcgacaagcaacaggttcaactcctggcagagatgtgtatccttattgatgaaaatgacaataaaattggagctgagaccaagaagaattgtcacctgaacgagaacattgagaaaggtgctgctttgaaacagtctttcttgtaaagcgatttgtgtaggcatttccgatttgctgagaagagcactctgttcaaggaagtgcagtcttcagtaataccgtattttctcgttggttccagttcgttaaatagtgtggtcattagcatctgctttgctgtcttcctgttacagcgatttctcttcacttcatgcctgttactcggcttcttcagagttattctggattcatagaagagggactaggcctgacatacagcagcg

SEQ ID NO: 152526 - DNA, 2140 bp, Homo sapiens
gaccggcggttgtctgtggccggaggctgatcagtgttctagaacagatcagacattttgtaatgatgcctgaaataaacactaaccacctcgacaagcaacaggttcaactcctggcagagatgtgtatccttattgatgaaaatgacaataaaattggagctgagaccaagaagaattgtcacctgaacgagaacattgagaaaggattattgcatccgagcttttagtgtcttcttattcaacaccgaaaataagcttctgctacagcaaaagatcagatgctaaggttacctttccagggttgttttacggaatacgtgttgtagtcatccattaaggcaatccagccgagctttgagggaaagtgacgcccttgggagttgagggcgaggcagcacaggggacggcttgaaagcttgagcttgggaattcccttggaagaggttcctccagaagaaattaattatttaacaccgaattcactacaaagctcaatctgatggtatctggggtggacatgaaattgattacattttgtggtggagaaaaaatgtaacttttgaatccagatcccaatgagattaaaagctattgttatgtgtcaaaggaagaactaaaagaacttctgaaaaaagcagccagtggtgaaattaagataacgccatggtttaaaattattgcagcgacttttctctttaaatggtgggataacttaaatcatttgaatcagtttgttgaccatgagaaaatatacagaatgtgaatatgtaggtaaatgattacagaaaaatttatctgcttaacaaacttaggaatgactttttccttttaaatttagttctattcattaatttatccattaaatttagttctatcatttgggtactatcattaatgtattatatacactggatacttttaaaacttgtgtgggggaaaaaactaacttataattttgtatcacacaccctggatatgtgttctgtttctaagcgacatttgtgagagattattgtaaaatgagagcgagcaaataaaacttaatttaatctttgcagatacatacttatgggaaatttgaacaaatgagtgaaactctgtgtttttagtaggctgtgataaacatttccggagcacttgcagaggacttgctatttgccaggtgctttatgtatcattaaatttttctcatagttcagaaaaatgtgcaaaggaaactattgtctcgctccttcaaaacagtcttaattaactttcatattaggcaggattaaactaggcagagcagggttcaaggggaaatttaaatggatatgggaccctaatttgtatcatcctgagttgattgtggtgggttaatccatcctggaaacatgttgatacttacaagtcagcccactgcttttggaataagggatattggattaggttgaatcttcttgtaaatacgtatttaccacgttagcaaagtctgtgttttccagaattacagtgaagccacagaggtgttccataaaatggggaattgagtccccactcgggtaaagagttgccctaaaacttgaacacctgttggaccatttggggcctggaataaaaacccccctgtggtgggggtcctgtgcctgtgccattggccaggatgggtgaagccagccgtccccctccccatgtgaacaccccccacagttaatgcccggatgttggcccagatggccccctaggggaccagagtccaacccccccaacctgaggacccactgtccctacagagtcaggaaaatattgtagggagaaaaaaataacaacaacaaaggccctgtgttaatgttaaatagatgagattatggaatgtgtatattaatgttaaaaattgtaccttgatcaatgtactttttataaacttgccataggatatctcagatttggaaacctcaagacagatttattattattaacaccctgtatgataatgaagaaaaataaaaatttatttcttggcaaagttaaatgtttgttaaaattcaataggaatgactcattttatgggttaactttggggcaatttataatttcagacaagactgtttagcaagtattttattgaaaagtaaaaaaaattgcaatttaaaaaaaa

SEQ ID NO: 152527 - DNA, 449 bp, Homo sapiens
ggcattccagaccaggaggtgattggcacgggctatggcatcctggaccagaaggcctctggagtcaaatacaccaagtccatttcagatcccccagaccagatgacctatcttccttccagctctgagtcacttcccattgggacttgcggttaatcgaagtcactgagaccatttgcaagaggctcctggattatagcctgcacaaggagaggaccggcagcaatcgatttgccaagggcatgtcagagacctttgagacattacacaacctggtacacaaaggggtcaaggtggtgatggacatcccctatgagctgtggaacgagacttctgcagaggtggctgacctcaagaagcagtgtgatgtgctggtggaagagtttgaggaggtgatcgaggactggtacaggaaccaccaggaggaagacctgactgaattcctctgc

SEQ ID NO: 152528 - DNA, 1035 bp, Homo sapiens
atggattcaatgcctgagcccgcgtcccgctgtcttctgcttcttcccttgctgctgctgctgctgctgctgctgccggccccggagctgggcccgagccaggccggagctgaggagaacgactgggttcgcctgcccagcaaatgcgaagtgtgtaaatatgttgctgtggagctgaagtcagcctttgaggaaaccggcaagaccaaggaggtgattggcacgggctatggcatcctggaccagaaggcctctggagtcaaatacaccaagtcggacttgcggttaatcgaagtcactgagaccatttgcaagaggctcctggattatagcctgcacaaggagaggaccggcagcaatcgatttgccaaggttggattcgggattgtccttcatccgctctggggtcaggcctgcatgtatcttagtgtgtctgctggtacacaggcagaaatgctccacagttgctgcccccgtgggaacctaaagacactagaacggggagaactcagcaagatccacgatgtgcagaaaggtgggggtttaggcgaggtgtcagaggacacctcgggcatgtcagagacctttgagacattacacaacctggtacacaaaggggtcaaggtggtgatggacatcccctatgagctgtggaacgagacttctgcagaggtggctgacctcaagaagcagtgtgatgtgctggtggaagagtttgaggaggtgatcgaggactggtacaggaaccaccaggaggaagacctgactgaattcctctgcgccaaccacgtgctgaagggaaaagacaccagttgcctggcagagcagtggtccggcaagaagggagacacagctgccctgggagggaagaagtccaagaagaagagcagcagggccaaggcagcaggcggcaggagtagcagcagcaaacaaaggaaggagctgggtggccttgagggagaccccagccccgaggaggatgagggcatccagaaggcatcccctctcacacacagcccccctgatgagctctga

SEQ ID NO: 152529 - DNA, 1169 bp, Homo sapiens
tttcgtcaggcccagacgcaggcttcttctcctcgggtcttgggcctgcatcctctctctcccagagcctacgttagggggtgggaaaggactttgccataggtcgctgaggccaccatctgctctcttactggccaagggcgtaaaaagatagtcctcccattagctagagagcaaaccccacaaagcctattggctgcgccgtccgcgggccttggtccgctttgaaggcgggctgcggctgccagaggagggcgggcgggaggctagctgttgtcgtggttgctcggaggcacgtgtgcagtcccggaagcggcgaggggaaactgctccgcgcgcgcccgcgggaggaggaaccgcccggtcctttagggtccgggcccggccgggccatggattcaatgcctgagcccgcgtcccgctgtcttctgcttcttcccttgctgctgctgctgctgctgctgctgccggccccggagctgggcccgagccaggccggagctgaggagaacgactgggttcgcctgcccagcaaatgcgaagtgtgtaaatatgttgctgtggagctgaagtcagcctttgaggaaacccggcaagaccaaggaggtgattggcacgggctatggcatcctggaccagaaggcctctggagtcaaatacaccaagtcggacttgcggttaatcgaagtcactgagaccatttgcaagaggctcctggattatagcctgcacaaggagaggaccggcagcaatcgatttgccaagggcatgtcagagacctttgagacattacacaacctggtacacaaaggggtcaaggtggtgatggacatcccctatgagctgtggaacgagacttctgcagaggtggctgacctcaagaagcagtgtgatgtgctggtggaagagtttgaggaggtgatcgaaggactggtacaggaaccaccaggaggaagacctgactgaattcctctgcgccaaccacgtgctgaagggaaaagacaccagttgcctggcagagcagtggtccggcaagaagggagacacagctgccctgggagggaagaagtccaagaagaagagcagcagggccaaggcagcaggcggcaggagtagcagcagcaaacaaaggaaggagctgggtggccttgagggagaccccagccccg

SEQ ID NO: 152530 - DNA, 1233 bp, Homo sapiens
gcccggccgggccatggattcaatgcctgagcccgcgtcccgctgtcttctgcttcttcccttgctgctggtgatgctggtgctgctgccggccccggagctgggcccgagccaggccggaactgatgagaacgactgggttcgcctgcccagcaaatgcgaagtgtgtaaatatgttgctgtggagctgaagtcagcctttgaggaaaccggcaagaccaaggaggtgattggcacgggctatggcatcctggaccagaaggcctctggagtcaaatacaccaagtccatttcagatcccccagaccaagatgacctatcttccttccagctctgagtcacttcccattgggacttgcggttaatcgaagtcactgagaccatttgcaagaggctcctggattatagcctgcacaaggagaggaccggcagcaatcgatttggccaaggttggattcgggattgtccttcatccgctctggggtccaggcctgcaatgtaatcttagtgtgtctgctgggttgtgaagtgtgattttgaagatgaccacctggggatcttccttcattggcctcttcccattctttgattgccgtttgtgctcctcccctcttgagtgggcctcatttttcagggcacatgcatggaggggtctggggcctgtttcatgagggtcctgcttcaatctcagacacaggcagaaatgctccacagttgctgcccccgtgggaaccctaaagacactagaacggggagaactcagcaagatccacgatgtgcagaaaggtgggggtttaggcgaggtgtcagaggacacctgggggggagtgactgcccagtcccatctctgggtccacacagcacctcccacaacccccgctgggatgcccttgtgatgggcccatgtactcagtatgtgtacgagtgcttttctctctggagaatgagctgcttacaacaaggcccatagttcttactctctacatcttcaggtgcctggcacagtggtaagataggttgccacccacatttttctacctaaggtttccttgctagcaaagagataccattcataaactcctgggatacctaagggaatagtctcaagcagcagaaatttgtatgaattttgcactcagtaataaatctgtgtttgctttaataaaaagtgtttaagaattatttttcatagcagcagcaaacaaaggaaggagctgggtggccttgagggag

SEQ ID NO: 152531 - DNA, 1275 bp, Homo sapiens
tttcgtcggcggccgaggcgatgagggtgttggtgcggcgctgttggggtcctccgctggctcatggcgccaggcgtgggaggccgagtccccagtggcgagcactggcccgactcggctgggaggactgccgggactccagagtccgcgagaagcctccctggcgggtgctcttcttcggcacggaccagttcgcccgcgaggcgctgcgggcgctgcacgccgccagggaaaacaaagaagaagagttaatcgacaaactggaggtggtcacaatgccttccccatcaccaaaaggactgccagtgaagcaatatgctgtgcagtctcagcttcccgtatatgagtggccggatgtgggatctggagaatatgatgttggagtagtggcttcgtttggccgacttttgaatgaggctcttattcttaaatttccctatggcatattgaatgttcatcccagttgcctcccgagatgagcgtggcccagcccctgtaatccatacagtgcttcacggagacacagttactgggagtaacaattatgcaaattaggacctaaaaggtttgatgtaggcccaattctcaaacaagaaactgttcctgtgccacccaagagcactgcaaagggaattgggaaggcagtgttgttcaaggactggggtgccaacatgctcattttcagttttggaaaaatttggcctggaaagtctgagcaatggaaggcagcagccaatggagggggcgacttacgcccctaagatttctgctggtaccagttgtataaaatgggaggaacaaacttttagaacaaaaattcagactttaccgtgccattggaaatataattccgttgcagacgctctggatggcgaataccattaaacttctggatttggtagaagttaacagttcagtccttgctgatcccaaaaattaacgggaacaggctcttattccaggatcaggtaatataccacaaacagtcacaaatactattggtttattgcaaggatggttggattggtgttcgatcagtgaatgctcaagaaatcactaacagctactgacttctacaatggatatttgcacccctggtaccagaaaaattcccaagctcaaccaagccaatgcagatttcagactctcagacttccaacaaagaagaagcagaaaaaaaactgttgctatgcaacaatgcattgagtagttaggaagaagatggataaaaacctattacatatttgtaatttattaaaaaccttatttacaagg

SEQ ID NO: 152532 - DNA, 387 bp, Homo sapiens
tcgaagagctgcacgagaagtttgaccgtctgaagaaactgcaccaggacgagaagaataaactggaggataagaagaaatccctggatgatgaagtgaatgctttcaagcaaagaaagacggcggctgagctgctccagtcccagggctcccaggctggaggctcacagactctgaagagagacaaagagaagaaaaatttgggcttcctgtagacacccttttcctgcgcaacagagctgggcctccctttctctaatttcccccttaacatgcctggggggcatacaatccaacccgcgccctctcctctcttcctgccaaggtttatagaaacctgagaatctgagggtgatgtctggccgctggtcaagaagccaacagtca

SEQ ID NO: 152533 - DNA, 494 bp, Homo sapiens
  misc_feature (1)...(494): n = a,t,c or g
cagcaaacccttcagtttacaggagacatatgaggccaaaaggaacgagttcctaggggaactccagaaaaaagaagaggagatgagacagatgttcgtccagcgagtcaaagagaaagaagcggantcaaagaggcagagaaagagctgcacgagaagtttgaccgtctnaagaaactgcaccaggacgagaagaagaaactggaggataagaagaaatccctggatgatgaagtgaatnctttcaagcaaagaaagacggcggctgagctgctccagtcccagggctcccaggctggaggctcacagactctgaagagagacaaagagaagaaaaattaactctgctgtttgctgcatgctgcatgngacccagggtcctgtaatccatggctgtgtactgaatagtattccccgctacagctggactggactccatttagccttttaagccgaggttcctattttaactgacagctttcctttggggtgcc

SEQ ID NO: 152534 - DNA, 460 bp, Homo sapiens
gaagtgaatgctttcaagcaaagaaagacggcggctgagctgctccagtcccagggctcccaggctggaggctcacagactctgaagagagacaaagagaagaaaaataatccatggctgtgtactgaatagtattccccgctacagctggactggactccatttagccttttaagccgaggttcctattttaactgacagctttcctttggggtgccaggcagcgaggccccccacccctatcctgccatgtacttcaagctcacttcttctttttgagttccgcaacttgctcctgcctcccagccccactggcactgaccatgaccacctacttctattttttttttagagtttctttttttgatcacttactttcaaagcacacagtcaaacaaggttatgccaaatttccaggcctttttgaagtattgagaaggggaaggggatttctcacttc

SEQ ID NO: 152535 - DNA, 3451 bp, Homo sapiens; identical to SEQ ID NO: 134805

SEQ ID NO: 152536 - DNA, 4700 bp, Homo sapiens
tttcgtcccgccccccttcgtagaagcctatggctggggttgcaggaagaactggaactgggctggccatagggggaagcggcgcgttaaatccgccccctctccataccctactttcaaggggtgggcggtagaggggaggttggggttggagcagcggcgagggggcccctcccttgcacctccccccaccggacttggtcgcgcccgaagtgtaacactttctctttgtcggaggagctcctctgtttcctgtgcagtagctcccgttgcggcggcacccgtggcagccctggcggacgcaggagcgatggcagcgaccgatatatctcgccaggtgggtgaaggttgccgaactgtccccctggctggacatgtggggtttgacagcttgcctgaccagctggtgaataagtccgtcagccagggcttctgcgttcaacatcctgtgcgtgggagagacaggtttgggcaagtcccaccctcatgggacaccctgtttcaacaccaaatttcgaagggggagccagccacccacacacagccgggtgtccagctccagtctaatacctatgacctccaagagagcaacgtgaggctaaagctcacgatcgttagcacagttggctttggggaccagatcaacaaagaggacagctacaagccatatcgtggaattcatcgatgcacaatctcgaggccttacttcaaggaggacccaaaagttcggaagagtgctacagacctaccatgactcccgaatccatgtctgcttgtatttcattgcccccacgggtcattgcctgaagtctctggacctagtgactatgaagaagctggacagtaaggtgaacatcatccccatcattgccaaagcagatgccatttcgaagagtgagctaacaaagttcaaaatcaaaatcacccagcgagcttgtcagcaacggagtccagatctatcagtttccttacagatgatgagtcggtggcagagattcaattgaacccatgaacgccccaccttcccgtttgctgtcattggcagcacagaagaactgaagataggcaacaagatgatgagggcgcggcagtatccttggggcactgtgcaggttgaaaacgaggcccactgcgactttgtgaagctgcgggagatgctgattcgggtcaacatggaggatctgcgggagcagacccacacccggcactatgagctgtatcgccgctgtaagctggaggagatgggctttaaggacaccgaccctgacagcaaacccttcagtttacaggagacatatgaggccaaaaggaacgagttcctaggggaactccagaaaaaagaagaggagatgagacagatgttcgtccagcgagtcaaagagaaagaagcggagctcaaagaggcagagaaagagctgcacgagaagtttgaccgtctgaagaaactgcaccaggacgagaagaagaaactggaggataagaagaaatccctggatgatgaagtgaatgctttcaagcaaagaaagacggcggctgagctgctccagtcccagggctcccaggctggaggctcacagactctgaagagagacaaagagaagaaaaattaaactctgctgtttgctgcatgctgcatgagacccagggtcctgtttgggcttcctgtagacacccttttcctgcggcaacagagctgggcctccctttctctaatttcccccttaacatgcctggggggcatacaatccaacccgcgccctctcctctcttcctgccaaggtttatagaaacctgagaatctgagggtgatgtctggccgctggtcaagaagccaacagtcatgtggctcgcagatgcatcctgcatcccagtccccctcccagcacccccagccatcccccctgtcttcccccacatctttgccagaggtgtgacatggtcagggggcccatctgctactctttcccaccagctcccctgttccagttctggttgctgtttagtttcccctggaggtatttgcaacccacccatggctggggtaacccaccgaatcagcacagctggtccccttgggtctcctgttattcccagttcattagttcctcctgggggtccaccccaccctcatcctcaggagccacagccatttcttagagggtttcaaaaggacagcctttggcgccttttccttctaacctttgagtccagccctttccagttttcattcactcgaagtaactgcacttcaagctgcgctcaaaatcggcaacgcatttatttacaccaagcccttcccataaaacacaactgctgaagaaaatagcagacgtatcccctctctctaactctgggtatcccacagatgcaaaagggagaataaacctgaatattattaccagcctagagtcttgaatgatagccttaccgaattcttcttgcgaggtatttcagcatctcggcgggtaatttccggaagggctccatactgtcccaataaggtgaggccagtagcaggaataataaatcccactttgtaggctggaaaactgagctgtcaaaagaatcaagtgtttgggggtttgctctgatgagtcttctagttcatttggtgaatgtcatgatgatttttaacatgcattttgcatgcatcccccaataagaagagatgagactcggccggagagaagaaaaggcccttaactttctttccaatttaaggagttgagagtttaaaaatattccagccctaacgtttttatcatgggtcccatctgatagtggctttgggaacctctgtgaagtagagagccctcccttgtcagggttatgaggcacagtggcctttggtgtttggccagtgacagtgtgagagatggagttgacctggcaatgatctgtggctaaacatgccgttctctctgccctatcctttgcagtaatccatggctgtgtactgaatagtattccccgctacagctggtactggactccatttagccttataagccgaggttcctattttaactgacagctttcctttggggtgccaggcagcgaggccccccacccctatcctgccatgtacttcaagctcacttcttctttttgagttccgcaacttgctcctgcctcccagccccactggcactgaccatgaccacctacttctattttttttttagagtttctttttttgatcacttactttcaaaagcacacagtcaaacaaggttatgccaaatttccaggcctttttgaagtattgagaaggggaaggggatttctcacttccaattatagatcataataggaagcaaaaagaaaaaaatgaaaagcaaacatatgcacgcacttttcttgttgacaaagcaagaatgtaggtttgctgtgtaggtttggtgctctattgattgggtgagtgaccagagcaagtatgaaggttgatgctgccaaagcacaagcctttttgaagtattgagaaggggaaggggatttctcacttcaattatagatcataataggaagcaaaaagaaaaaaatgaaaagcaaacatatgcacgcacttttcttgttgacaaagcaagaatataggtttgctgtgtaggtttggtgctctattgattggtgagtgaccagagcaagtatgaaggtgatgctgccaaagcacaagccagtttcttgggaaaattcaagttacagtggagtatttttttgaagaccatatgcttggaggtagaaacaaaccaacgaccaaaaaaaaaaaaaaaaaaaaaatctgctcagatactcagccagtagctcagagagatgctgagttaggcctgtcaggtctccttgggaaaggcttcatatttgcaactttgatgattctatgtccagcttcagagctgctttcccagaaattcacgcttaaacaaccaaccggtaaccaccacttccccacaccgccgcctggtaattatttgcattacaaaccggagacgccctcatttgcatttgtgtacagattaactagttaaggcttgagaagctctgaataattcaaaagtattagacccacacagccttggagagaccttcagaaactaaggaggagttttatattaagggagacattttagtcagtaagacgatataacctacttactccgtaaggggaaatgaaggcccggagaagggaagggacttgaccgaggtcccacttctgtttcgaggcagaagccagactaattttcatgcctcctgactcccaatcagtttcacaaagggattcaatctgtttatatacgttacattcctggatacgaggtcttttgatgttcagagtaactgactagttagtattagaagaccctcgaggtttttttccacagaaaaacatctgaagatggattgggtgagggctggcaaaaccgaaggcatgcccgggccagctccttaacccaatgacccagtgatgctgcaaggctggaacggggtccaggagactgtgtgtaacaggtgccctaggtgacccttataatcagggaagtttggtgaacaaaaatccgaacccatgagtgaacataaattaaaaagttgatcaacctattaaaatgtgtatttcattgggtagcttttctcactgtagacagattttttccttcttcaatgaaaaggcttttaaattagtacaactgttactatttaaaaaaaaa

SEQ ID NO: 152537 - DNA, 621 bp, Homo sapiens
atggtgcggacgcagtgtctgctgggactgcgcacgttcgtggccttcgctgccaagctctggagcttcttcatttaccttttgcgggggcagatccgcacggtaattcagtaccaaactgttcgatatgatatcctccccttatctcctgtgtcccggaattggctagcccaggtggtaatagacaaacattctgtccggttttttgtacgtaagaggccccatgtggatttcttcctggaagtggtgagccagtggtacgagctggtggtgtttacagaaagcatggagatctatggctttgctgtggcaggtaaactggacaatagcagaagcatccttaagaggagatattacagacagcactgcactttgcagttgagcagctacatcaaggacctctctgtggtccacagtgacctctccagcattgtgatcctggataactccctaggggcttacaggagccatccagacaatgccatccccatcaaatcctggttcagtgaccccagcgacacagcccttctcaacctgctcccgatgctggatgccctcaggttcaccgctgacgttcattctgtgctgagccgaaaccttcaccaacatcggctctggtga

SEQ ID NO: 152538 - DNA, 587 bp, Homo sapiens; identical to SEQ ID NO: 133139

SEQ ID NO: 152539 - DNA, 1478 bp, Homo sapiens
gtggaattcggcggagctgggccgcgggggccccggggccggcggtgccggggtcatcgggatgatgcggacgcagtgtctgctggggctgcgcacgttcgtggccttcgccgccaagctctggagcttcttcatttaccttctgcggaggcaggatccgcacggtaattcagtaccaaactgttcgatatgatatcctccccttatctcctgtgtcccggaatcggctagcccaggtgaagaggaagatcctggtgctggatctggatgagacacttattcactcccaccatgatggggtcctgaggcccacagtccggcctggtacgcctcctgacttcatcctcaaggtggtaatagacaaacatcctgtccggttttttgtacataagaggccccatgtggatttcttcctgggaagtgggtgagccagtggtacgagctggtggtgttttacagcaagcatgggagatctatggtctctgctgtgggcagattaaactgggacaatagcagaagcattctttaaggagggagatatttacagacagcactgcactttggagttggggcagctacatcaaggaccctctcttgtggttccacagggacctctccaggaattgtgatcctgggataactccccaggggcttacaggagccatccagggtacgggggaaggtgacaatgccatccccatcaaatcctgggtttcagtgaccccaagccgacacagcccttctcaacctgctcccaatgctggatgccctcaggttcaccgctgatgttcgttcccgtgctgagccgaaaccttcaccaacatcggctctggtgacaagctgctccccctccacctgagttggggtggggggggaaaagggagggcgagcccttgggaatgccgtctgatgccctgtccaatgttaaggactgcctgggcaagggtctgcccttcccaaccctctctggccttggggagcccctaaactcctcttagtactactggatggacacatgggcccaggggctctgaaagcagcctcactcctttaacttcgtgttcacactcccatggaaacccccagactgggaacacaggcgggaagccctaggagagcccgaatcaggggttggtgaagaggcaggactggccaggagtgacagacatacgggtgatcccaggaggctcaaagagaagccaagtcagctttgttgtgatttgattttttttaaaaaaactcttgtaccaaacttgatctaaattcttcactcctgctccaaagggctgggctgtgggtgggatactggggatttttgggccactgggattttccctaaatttgtccccccctttactctccctctatttttctcgtccttagacgtccctcagacgctgtaaccaggctttgtgtcttttttcccttttctctcttttaccccatgcattacaactttgaaaccaaaaaaaaaaaaa

SEQ ID NO: 152540 - DNA, 1160 bp, Homo sapiens
  misc_feature (1)...(1160): n = a,t,c or g
ctttccgctcggctgttttcctgcgcaggagccgcaggggccggtaggccagcccatggcgcccaagccggaaatggccatgggtcttgaacgccccacttccaccaagggactggcaagcgggcggcgtggcccacgtgtttcaaaccagccgggccgggtaagatccgccagacgtaaaggccccgcaaagcccaaaggcgccgccgcatcgctccgcgcccccgcgtcggggtcccaatccggcccaatcgtgcgctgccccacgggttcgggtccacacgaaggttgcgcgccggcccccggcttccagccttgaggaagctcagggtggccggcattcacaagaaaggtggcccggaccttcggcattttctgtggatccgaggaagccggaccaagtcccacggagttccttcaaggccaaacgtgcagcggctgaaggagtaccgctccaaaactcatcctctttccccagagaagccctcggccccccaagaagggagacaggtctggctgaagaactgaaactggcccacccagcttgacgggaccggtcaatgcccgtccggaacgttcaaatagaaggagaaagctcgagtcatcactgagcaagcagaagaatttcaaagccttcgctagtctccgtatggcccgtgccaacgccccggctcttcggcatacgggccaaaaagagcccagggaagccgcagaaccaggatgttgaaaagcccacaataaagnccctgcctggggactttggaatcaagtcgggcagtcatgctgggtctccacgtggtgtgtttcgtgggaacaactgggcctgggatggggcttcactgctgtgacttcctcctgccaggggatttggggctttcttgaaagacagtccaagcccctggataatgctttactttttgtgttgaagccctgttggttgtttggttagtgactgatgtaaaacggttttcttgtggggggggtaccaaaggctgacttcagagtggacttgtgttttttctttttaaagaggcaaggttgggctggtgctcacagctgtaatcccagcactttgagattggctgggagttcaagaccagcctggccaacatgtcagaactactaaaaataaagaaatcagccatgaaaaaaaaaaaaaa

SEQ ID NO: 152541 - DNA, 1163 bp, Homo sapiens
ccgctttccgctcggctgttttcctgcgcaggagccgcaggggccggtaggccagcccatgggcgccccagccgggaatgggcatgggtcttgaagcccccacttccaccaagggactggcaagcgggcggcgttggccacgtggtttcaaccagccggccccggaaagatccccagacgtaaaggccccggcaaagccaagggcgcgccgcatcgctccggcgcccccgcgtcggggtcccaatccggcccatcgtgcgctgccccacggtttcggtaccacacgaaggttgcgccccggccgcggcttcagcctggaggagctcagggtggccggcattcacaagaaaggtggcccggaccatcggcatttctgtggatccgaggaggcggaacaagtcccacggagtccctgcaggccaaacgtgcagcgggctgaagggagtaccgctccaaactcatcctctttccccagagaagccctcgggcccccaagaagggagacagttctggctgaagaactgaaactggcccacccaggctgacccggaccgggtcatgccccgtccggaaccgtctataatgaaggagaaagctcgagtcatcactgaggaagagaagaatttcaaagccttcgctagtctcccgtatggcccgtgccaacgcccccgctctttcggcataccgggcaaaaaagagcccaaggaagccgcagaaaacagatgttgaaaagcccacaataaagccctgcctggggacttggaatcagtcgggcagtcatgctgggtctccacgtggtgtgtttcgtgggaacaactgggcctgggatggggcttcactgctgtgacttcctcctgcccaggggatttggggctttcttgaaagacagtccaagcccctggataatgctttactttcttgtgttgaagccctgttggttgtttggttagtgactgatgtaaaacggttttcttgtggggggggtaccaaaggctgacttcagagtggacttgtgttttttctttttaaagaggcaaggttgggctggtgctcacagctgtaatcccagcactttgaggttggctgggagttcaagaccagcctggccaacatgtcagaactactaaaaataaagaaatcagccatgaaaaaaaaaaaaaaaa

SEQ ID NO: 152542 - DNA, 1292 bp, Homo sapiens
actatagtcactatgctgtgcaatagatctcaaaagcttattcctcttaactgaaacctactaccctgtgacatgtggggaacatctctctattccccagccccagtccctaaatgttgaatacacaatggggaaaaaatagtcttcaatgaatggtggtgggaaaattgtatatccacatgcagaagaataaaattggacccttacctcctaccatatataaaaaccaactgaaaatcgattaaagacttaaactgtaaaactactaaaagaaaatatagggagaaagcttcacaacgttggtctgggcaataatttttggatttgacctcaaaagtagatgcaaccacagtgaaaataaacaaatgaaattgcataaaataaaaaatgtttctgcacagcaaaggaaataattaatggagtaaagagacattttacagattgggagaatatatttccaaactattggtggggctcataaacggataccctaacatataatgatttgacaggtggtactaaaaaagactcgaggtctctctgacctcctcctcaacctgtgtttcttagtcctctgttttcccacagcacaggaggaaggtctctgaagttcctttatctgctttaagttcagactcaccaaataagaaaacagataattctggtgccttccatgggttctcattaactgaagccatatatgaggagaaagaatgaagtctcttaacccccacctggataagatttttcctcacaaaccattgtcttctctggcaagccccagtaagactttggtcccaggccatttatgtgattctttcaccccatttaagttctccccaaattatttactcttcccccaaaatcacccccacacttccccccatctcccctctccccctaaggacaagggtatatcacccatctataccccccattgccttggtggggtgatcactctgattctctgcatgcatttttatagatttgtttgccatttatcctattaatctgcattctgtcaattgtggcaagttatcagcatatttttttaacttttaattattcttaatggaaagacacttctgtatacactggaaatctcaggaaatttcttttttccttaagcttaattgaaatgtttacttttcagtaaaatttcaagcttgagtaatgttcatgcctgcttttcattgaaatagaatgaaaaggttgcacaatattattttcatgaaattacttctagtataattctgaataaacactttgaaaggcagtgaactgtaaataaa

SEQ ID NO: 152543 - DNA, 505 bp, Homo sapiens; identical to SEQ ID NO: 134342

SEQ ID NO: 152544 - DNA, 487 bp, Homo sapiens; identical to SEQ ID NO: 134343

SEQ ID NO: 152545 - DNA, 492 bp, Homo sapiens
atgaagatgaaaaaggatttatttcctgttgggagagaaattgctggaattgtattagatgttggaagcaaggtatcattctttcaaccagatgatgaagtagttggaattttgcccctggactctgaagaccctggactttgtgaagttgttagagtacatgagcattacttggcccgagtgattgatgtatctaatgggaaagttcatgttgctgaaagctgtttggaagaaacaggtggcctgggagtagatattgtcctagatgctggagtgagattatatagtaaagatgatgaaccagctgtaaaactacaactactaccacataaacatgatatcatcacacttcttggtgttggaggccactgggtaacaacagaagaaaaccttcaggtgaagaaacagaagcacagagatgttgatacagactcaaggacgcagcaagtggcggagcaagaatcacactcaggcagtctctctcctttctga

SEQ ID NO: 152546 - DNA, 526 bp, Homo sapiens
  misc_feature (1)...(526): n = a,t,c or g
cggacgcgtgggtgatgaaccagctgtaaaactacaactactaccacataaacatgatatcatcacacttcttggtgttggaggccactgggtaacaacagaagaaaaccttcagttggatcctccagatagccactgccttttcctcaagggagcaacgttagctttcctgaatgatgaagtttggaatttgtcaaatgtacaacagggaaaatatctttagtattccaagtgccttgcaagtattcatttaaacattaaaacagccttttgagatgtaagtactgttatcatccccatttcacaggtgaagaaacagaagcacagagatgttgatacagactcaaggacgcagcaagtggcggagcaagaatcacactcaggcagtctctctcctttctgaacagagatgagccctaagatacctggaagattttgtttttaacctcacattaaggaaagcacacatcaccttgaaaggttgcacacttactcctactgatggtgccatntgcacacgaaaaca

SEQ ID NO: 152547 - DNA, 712 bp, Homo sapiens
tatacgtgctaaaattgtttttaactaaaaatgccatatgtagtgttgaaatgaaaactagacactatttcattcgcatccattgagataataggggtgagcacttatgataagcaccaggcttgacttgctgctcttgtcacttgtccttggaaatttaggctctattacaccaccaactctcaaatcatttccctgttgtagagctaaacttgacgtcctacagaatttctctaacttaacatgttgagtctctgagagtgcaaaacttgaaacaagagaaagtggcctgcctggcatcctctgcttattgaatggttttatttaattctcctttacattgccaccttaacaatcctttcagctacgtatcttaaaggatgtgatggagaagttatcaactggtgttttcagacctcagttggatgaacccattccactgtatgaggcaaaagtttccatggaagctgttcagaaaaatcaaggaagaaaaaagcaagttgttcaattttaattttcttctttctcagacctcagtcggatgaacatattccagtatttgaagccagaattttctttggaaattgttgagaaaaaccaaggaagataaaacaagttgcatttttaagcacgtttctctgctaagacaagatgctcagttgacacatttgaaaagtggtttgaaaaattcttgtgcaaatgatcaagataa

SEQ ID NO: 152548 - DNA, 2211 bp, Homo sapiens
  misc_feature (1)...(2211): n = a,t,c or g
atgccccgggcagccatcgcgcagacccccgcgccgacccccgcccccgctgcagccgcccgtggtccaggccgccgccttgcagccctctcctcacctcatctccgggcggcggaacatgacgggagatgtagttccgagaccggttgccatggcgttctggacagcctcgcgagtccgaccccgcccttcaggagtgacgagcggcctgaccaatgggagcagggggcgggctctctgacgaaggactggaaggtggcggtggtgaaggtgcaggccgttggggcggctcagaggcaggtgagccccgggaaacgcgtcctgtgtcttgggaaacgggcctttaagcgaaaggtggagagatgccccacagaaccgtgcagccctggggaggatggtggttcgcgtcgaaccctaacctgggacttgttcgggcccaggcctagcttagctgaggccgctgagggccacttctttcttcctcatcactttgctgttttcggaaagcagttagtagttattcgctgtatgtggcttttgagccagatcggccctcttcattatgctaaacggcggaatcatctggagcgagatgtgactatgaaaggcttatatttccaacagagttccacagatgaagaaataacatttgtatttcaagaaaaggaagatcttcctgttacagaggataactttgtgaaacttcaagttaaagcttgtgctctgagccagataaatacaaagcttctggcagaaatgaagatgaaaaaggatttatttcctgttgggagagaaattgcctggaattgtattagatgttggaagcaaggtatcattctttcaacccagatgatgaagtagttggaattttgccccctggactcctgaaagacccctggacttttgtgaaagtttgttaagagtacatgagccgttacttgggttcataaacccagaaaaggtcacatgggacggaagcagcaggaagcatttcggggatgggagtgcgtgcctattacagcttcttgcatttatctttcttcatcttctctcctgggggaaatcagtgcctgataatggatggagccaagtgccatttgsgtacaatagctattcagttagcacatcatagaggagccaaagtgatttcaacagcatgcagccttgaagataagcagtgccttgaaagattcagacctcccatagcccgagtgattgatgtatctaatgggaaagttcatgttgctgaaagctgtttggaagaaacaggtggcctgggagtagatattgtcctagatgctggagtgagattatatagtaaagatgatgaaccagctgtaaaactacaactactaccacataaacatgatatcatcacacttcttgggtgttggaggccactgggtaacaacagaagaaaaccttcagttggatcctccagatagccactgccttttccctcaagggagcaacgttagctttcctgaatgatgaagtttggaatttgtcaaatgtacaacagggaaaatatctttnttaacaatccttccagctacgtatcttaaaggatgtgatggagaagttatcaactggtgttttcagacctcagttggatgaacccattccactgtatgaggcaaaagtttccatggaagctgttccagaaaaatcaaggaagaaaaaaaccaagttggttccaattttaattttccttcctttcctcagacctcagtcggatgaacatattcccagtatttgaagcccagaattttctttggaaattgttgagaaaaaccaaggaagataaaacaagttgcatttttaagcacgtttcccctgctaagacaagatgcctcagttgacacatttgaaaagtgtttgaaaaattccttgtgcaaatgatcaagataattctataattaacatcttaagggaatttttctaaaaaccttttcattgtttctatatattttgcccctgctataaaattccttccatgaagaaaactgcctctttcagcaaaagtcacactactcttgataaaagctgttgcaggcctttgctaagctatcaaagtaacgtattaattttgtattcaactcccgttctcaacaccttcattaagtctttgctgtcataatttaagcatttgagtatattttgaagtcttaaaagacttagcccataggcccttaaaaaaaaaaaaaaaaa

SEQ ID NO: 152549 - DNA, 1473 bp, Homo sapiens
gccctcccaaagtgctggggatgacagatgtgagccactgtgcctggccagttgtcttgactttaatattaccacgaatggtgattatttgaaaagttgtctgaagtcattatagcagttggtttccttagtcactttttctaagtcctgaaaatgttaatagtctagttttcagggagcttttaaaagcatgtttcagttttaactgaaagaacttctcacttgctgaaaattgttttttcctccctcacttttgtttacccttgcaacaggcatcttccttgacttgatgcacctgaagaaacctgggggctttgacatatccttgttctacagagatatcatcagcatagcagaggatgaggacctcagggttcactttgaggaatccagcaagctagaagacctgttgcggaaggttcgcgccaaggagaccaggaagcgagcactcagcaggtgtgcactcagcccgggtcagctgcctacactgcccttaaatcagaagcaggctgggcgcggtggctcacacctgtaatcccaacagtttgggaggccaaggcaggcggattgcttgagcctaggagttgagaccagcttgggcaacatggcaagaccctctctctacctaaaaaaaaaaaaaaaaaaaatcagaagcaatgcactgctacacattgcttaacaaaccagaagcaatacattgctctgacctgactggctacttaactcgactatgccactgcctcactgtcttcctctaaaatagtttatttcaggatagcagaagctatttgctgctttatctctggcaagagctggcatgatatttctctaaagtaacacagccctccatttcgtgggggtagacagttatggtctaagagtatccttagctgtactcactagtacagtcatgtgttaattaatgatagggataccttcttagaattgcgtcattaggcgattttgtcattgtgcaaacatagagggtacttcacacacccagagagtacagcttgactacacacctgggctgtgtggttagcctgttgctcttaggctacaaacctgtatagcatattaccatactgtttactgtaggcaatggtaagtatttgtgtatctaaatgtatctaaaggtatagaaaaggtacaataaaaatatgatataggccagacacggtggctcacgccttgtaatcccaccactttgggatgccgaggcgggtggatcacaagttcaagagattgagaccatcctggcctacatggtgaaaccttgttctctactaaagatacaaaaattagctggacgtgatggcgcgcgcctgtagtcccagctactcaggaggctgagaatcgcttgaacccaggagtcagaggtggcagtgagccaagatcatgccactgcactccagcctggtgacaaagtgagactccgcctcaaaaaaaaaaaaaaaaaaaaaaaaaaaaaaa

SEQ ID NO: 152550 - DNA, 2773 bp, Homo sapiens
aaagtatgcagccagtttttcttatgatatacttgatatcccgtgtaataatggaaaaacgaggacggtgagaaatctggcaggctggcagatatttccataattcagttctttttggatctgtgagcctaatccgattcggcggctccattgggacccgtggcgacggcggccacgacggccctcgggcacccggcagcggcttggaccttcccgtacccgacgggagtgcgaagcggagggagagggggggaccgagcccgggcccgggctgaggggtgggggagaggccgccctgcgctgctcgcgcccccacacccgctaccggcaacgactactgtgaggtgacagagaggggacagggagggcccacacggaagagggggcgggggcagggatgcacttttatgacgtagagggcgttgattgggaccgagtacagggcccgcgcatgcgtggattgtcgtcttctgtccaagttggtcgcttccctgcgccaaaggtaagcgggccgttatccatttgtgttgttcgccagctaggcctggcctcgtcccgcttcgctcggtcagtgccattcggtgtgtggaagaaagaccttccctgcctatctctgctgtctcagagtgaagatgagttgacaccttttgacatgagcatccaggtaagactaccttttaatttaagacaaatttaaaaacagtattggctgggcatggtggcggctcatgctggtaccgagaaagacaaaaattcagtgaattttaaaaatatttacgtcttacaggagctggataatccaggtcagtaatattttaagatcagcttttcccttatatatgagaatatcagtactctgatcaaagaggacatgggccacggatctgactactcactcagtgaagtgctgtgggtctgtgccaacctctttagtgatgtccaattcaagatgagtcataagaggatcatgctgttcaccaatgaagacaacccccatggcaatgacagtgccaaagccagccgggccaggaccaaagccggtgatctccgagatacaggtgggcatatttccccgttctcttaaattggcacttaattattgtttttttattttttatttttttagatcatcagcatagcagaggatgaggacctcagggttcactttgaggaatccagcaagctagaagacctgttgcggaaggttcgcgccaaggagaccaggaagcgagcactcagcaggtgtgcactcagcccgggtcagctgcctacactgcccttaaatcagaagcaggctgggcgcggtggcttcaagcctcctccaataaagctctatcgggaaacaaatgaaccagtgaaaaccaagacccggacctttaatacaagtacaggcggtttgcttctgcctagcgataccaagaggtctcaggtaggtagagatgccttttgttgttgttgtttttgagacagggtctcattgtgtcgcccaggctggagaggtttgatgctcatgggtttcaagccgttggtactgctgaagaaacaccattacctgaggccctccctgttcgtgtacccagaggagtcgctggtgattggtaagtagcgtggaccatggatgagtgactctaacacacagtgcagtttacggagcagcgctttgtaatacacaccccgcaggaacatccctccttattttgtggctttggtgccacaggaagaagagttggatgaccagaaaattcaggtgactcctccaggtatgtggcagagatatttccagggcttctgaaccttgcccatactttggaatcatccatggactcctcagggaggaggcactgtccggctagctctggatgtatcaaaaaagctggagactggaaccaactgccgccaggtaaagggtctttgctggggcaatacaggtaggaacagtaaatacaggagggccgcaaccacagttttgctttctgcagtttcagttacccatagtgcaactccagagcaaggtggggcaagatgaaggctatcgttgagaagcctcgcttcaccatacagaaggtgacagctttgagaacccccgtgctgcagcagcacttcaggaacctgaggggccttggccttggatttgatggagccggaacaagcagtggacctgacattggcccaatgttgaagccaatgaataaaaagactgggctccttggtcggatgagtctaaaggagcctctctaccccaaccagattacaatccttgaagggaaaagttacccaaagaggaaaaacacgaataaatgaaagggtctgggaaagaaaaaaaggcccaaagggtggaagtaattcaagaaagagggagcttgaagaccccacatcaagaaaggggtacgctggggcaaagttcactgtgccccatgctgaaaagaggcttgccggggcttacggggctgaaagagtgggctgaaagaagcaggagctgctggaagccctcacccaagcacttcccaggacttgaccagaggcccgcgcgtccagctgcccttcccgcagtgttgccaggctgccctggccttgtcctcagccagttaaaatgtgtttctcctgagctaggaagagtctacccgacataagtcgagggaacttatgtttttgaggcttttctgttgccatggtgatggtgtagcccctcccactttggctgttccttactttgcggcgtggatgaagagccctaagtttgtactataaaaaaaaaaaaaaaagggcggccgct

SEQ ID NO: 152551 - DNA, 1675 bp, Homo sapiens
gttttttgttttttttttttttttaatgggagccaaaatgtttagagaaagcttctgggtgtgcctttcagattttgaacaagctgccttgtctaaacatcaatttctactactctgtagccttaaaatgtgctctatttagatccacaggacccttctactggtgatatgaaaaacagaatacagaaattaagagaatcactttttactcaacaattaggggaagtaagtcaaagccctcctcttgcgacagcagatttcctgcggggccacctggttcagcgcctttgataaggggataagggtgatcaaaagcactcacggaaaacagttccattccaggtatggaaatgtccagaaattccctttggcccattttctccctgactctttgcctaggtccccctgggtttccttgggcagcacttcttggatggaggacagggtccaccaactttctcaagacattgaggtcttgagacacaagaaaccacagacttcaaccctgaagggcctaactctgtccatatgtctgtcctttgaatacttcctgtccctgcctaaaaggaaacccaaattgtttctaggatactggtgaagttgtagtgaggggcttaatgcagttaataatctaaaagccagcagaaaaccaaaatgcctcagccttaaatggttgtttcttttttattttccataatgaatagactcacaggcattttacccccttattagtaaaattgtgaagagaaagaagatgacacacttttggacgctgtattttatgtatttatttttgagacagagtcttgctctccttcgcccaggctggagtgcagtggcacaatcacagctcactgtagctttgggcctgctgggctcaggcaatcctcctacgtcagccctccaggtacctggaaccacaggtatatgccaccatgcccagctttttaaaattatttttgtagagatgggggtctccctattctgttcaggctggtcttgaactcctgggtttaagcagtcctctcacctcggcctctcaaaatgctgagattacaggcatgagccaccacatgcagccaattgctatgtttttaaaactagatttatagacatattttttaaaagctagggcacttttccccttaactaaaagcactagttcagttcttcaggtaatttcattggaactcacctaagactggaattggaatgtttccatgttgctcattttttctacaggttatgatagaatctcattaaatcttgacatctctcccaggggaagaatatccacaggccagtggtgtgaatggggtatgagatgatagcatttactaaatcggtaatctcttttatgtatgttcttgttatattgaggttaagaggcaagatgattggcagcagaattcttcaggattttgtttgctgtggtatggattatattggagccccttaatctgaaggatgaaactgtgacttgatttatctaattagcttttaattacctatagctattttattttattctctcctatagttttggggaccactgtaaacgtctctcagatgacttgtatttttgtagtgctatgaaatttatttacacacttaaaaactgtatattcacttgaactctaacaatgtacatgtatatgtatatatttgctccaca

SEQ ID NO: 152552 - DNA, 1591 bp, Homo sapiens
  misc_feature (1)...(1591): n = a,t,c or g
gcggccgcggagctgggaaggccgagggcgccgggcacgtctgtgcagatttctttagagtcgaggtctgtcgcccgcgtcttcgtcggtggcagcagggctgactggccacggcggccatctgctagagcgcatttcttaccatgaaacgccacctcctccgaagtgcggagcgaacgcagccaaatctacacaaagactgacaagctggatccactcgacggaacccagggccaaaaaacggcggcgagcagcgcctcgggcccgcgattaccggttttctgagcaccggacagcgtgagccgtgccagccctgtctcgccatcccagccgaggagggcagcgcgatggctcttccctgccttgaaatcaaccccattgccagccgctttcgccggcagagcattttccgtggggtccatccggctccaaggcggcctgcgctggccacgtggaaagaaacacgcccactgcctacaggccacgcccttcctcccttcgcgcatgcgccccacccgtcctgaggacctccgaacctgcagggggcgatgaaagtaggcttgcgctccgcttgtagctgcttccgggtcagaggtcagacggtctagcgctgcgtgggccatggtgcagctccgaccgcgagcgtctcgcgccccggcgtcggcggaggcgatggtggacgagggccagctggcctcggaggaggaggaggcggagcacgggctgttgctcgggcagcccagcagcggcgcggccgccgagccccttggaggaagacgacagaaggggacgatgagtttgacgatggaggccccgaagagcatganctattcgccagcgccccaggcggaagcgagagaagaggagcggcgagtgcgggagaccgtgcgcagggataaaacgctcctgaaggagaagaggaagcggacgcggaggagctgttcatcgaacagaagaaaagaaaacttccttccagacactattttggagaatgttaaccacagcttcacagactaacatcaagaaattccgccaggaaacggtgaaagaaggttaatttgcaaaagaaaaatgaagacttgtgaaaaaggaaattgactccaagaaagttaaagtacaaaaagtacagtctggtcagcccagaataaaagctagcttcggccgtaaggctaaaaggaccaagattctggagagattcaagggcaacaagcagcacaagcctttcatacataattcattatatgggccaggaaccaaacaggactactgtaaataagttcctgtctcttgaccaacaagaggttaccagtgaaaagagactgctgtaccagttttttgaataatgacttggggaatccaaaaaaaaacaaaatgaccaagaggtttaaaagaacggtgggatgggtcaggaaaggatggaaaactaaggaagtaaatccaatgcttaaatgaaggaatctgttactttgttatgttataggatttatcttattaaatcattccttggatcatttttaaaggatccttttttaaaaatcataaacctatttgaggaagtgctcaaccacatttcattcttctggagtagaac

SEQ ID NO: 152553 - DNA, 533 bp, Homo sapiens; identical to SEQ ID NO: 149233

SEQ ID NO: 152554 - DNA, 1294 bp, Homo sapiens
  misc_feature (1)...(1294): n = a,t,c or g
cacaaaaagcctaattctattttttagcatacagtaaatgagaagaatggactctaaagtaatgatacctgagtggtaggagtacaagccctttctaagttttctctgaacatatattactcgtgtaggaagttatttttttaagtaataaatctagtctacctcatctcttctcccaggcctgagctgaagcctgtggacaaggaatcagaggtcgtaatgaagttccctgatgggtttgagaagttctcgccgccaattctgcagctagatgaggtggatttctactacgatccgaagcacgtcatcttcagtcgcctctctgtgtctgctgatctcgagtctcgcatctgtgtggttggagagaatggggctgggaagtctaccatgctgaagctgcttttgggggacctgggcacctgttcggggcatcagacacgctcacaggaatctgaagattggctatttcagccagcaccatgtgggagcagctgggacctaaacgttcagtgcttgtgggaacttgctgggcacgcaagttttcctggggcggcctgaggaggagtaccngtcaccagcttgggttcggtatgggcatctccggagaactgggccatgcgtcctctttgccagcctgtcttgggggccagaaagaagccgaagtggccttttgctcagatggactattgccctgccccaactttctacattctgggatgaacccacaaacccaccttggacatgggagagccattgaggctctggggccttgccttcaaacaatttcaggggttggtgtgattctggtgtcccacgaatgaagcgctttatcaaggctggtgtgccgggaagttgtgggtatgctaaggaaggcggcgtcacccgtgtggaaaggaaggattttgaccagtaccgcgccctcctccagggaacagtttccgccgcgaaggctttcctctagggccaccagggttgaggactcgcccagggacatgggactggtctctcagacccctggggccaccatgtaggccaccacttcagggtcgtngaacttccccccaactttggggacagcctttatttcccaaatgtctctatccttttgactggagcatcttctgcacaaccttgggagcccatccaagggttggtgaggactggtctcccgggggtgggggtctggggggtaccctctggggttatagattcccccactgccccagctctgactggaccccaagtggctgctatgtaaattaaatctctccccgcgtctcctttgcctcatgtc

SEQ ID NO: 152555 - DNA, 2223 bp, Homo sapiens
  misc_feature (1)...(2223): n = a,t,c or g
tgttgcgttcggagaggcgcagcatccacagggaagnaggcgcctccttccctggggttcctgagtggaacatggcgacttgcgccgaaatcctgcggagcgagttccccgaaattgacggacaagtcttcgactacgtgaccggcgtcttgcacagcggcagcgcggacttcgagtctgtggatgacctggtggaagctgtaggggaactattgcaagaggtgtccggggacagcaaggatgacgcgggcatcagggccgtgtgccagcgcatgtacaacactctgcgtctggctgagccacaaagccagggaaatagccaggtgctactggacgcccctatccagttgtcaaagataacggagaactacgactgtggaaccaaacttccaggactgctaaagagggaacagtcctcgacagtgaatgcaaagaagttagagaaggccgaggctcgacttaaggcaaagctgaggaagcgctcagagaaggacacgctcaagaccagcaaccctctagtcttagaagaggcatcagccagccaggcaggcagcagaaaggagagtcggttggaatcatctggcaagaacaaatcctatgatgtgcgaattgagaactttgatgtgtcttttggcgatagagtactgctggctggagcggatgtgaacctggcatggggccgccgttacgggctggtggggcggaatgggttggggaagacaacgttactgaagatgctggccacccggagtctgcgggttccagcccacatttccctgctgcacgttgagcaagaggttgctggagatgacactcctgccctgcagagttgtgctggagagtgacagtgtgcgagaggatttgctacggagggagcgggagctcacttgcccagattgctgctggcagggcggagggctctgaagctgcagagctggccagaaatctatgccaaactggaggagattgaggctgacaaggcacctgccagggcatcagtcattctcgctgggcttggctttacccctaaaatgcagcagcagcccaacccgggagtttctcaggttgcctggaggatgaggctggccctggccggggccctcctttgctaggccagatcttctgctgttagatgaacctacaaacatgctggatgtcagggccatcctgtggctggagaattacctgcagacgtggccctccaccatcctagtcgtctcccacgaccgcaacttcttgaatgccatcgccacagacatcatccacctgcacagccagcggatagatggttaccgggtgagactttgagaccttcatcaagagtaagcaggagcggcgtgctcaaccagcagcgtgaatatgaggcgcagcagcagtatcgccagcacatccaggttttcattgaccggtttcgctacaatgccaacagggcctctcaagtgcagagtaaactcaagatgctggagaagctgtctgagctgaagcctgtggacaaggaatcataggtcgtaatgaagtttccttgatgggtttgagaagctctccgccgcccattttgcagcttagatgaggtggatttctactacgatccgaagcacgtcatcttcaagtcgcctctctgtgtctgctgatctcgagtctcgcatctgtgtggttggagagaatggggctgggaagtctaccaatgctgaagctgcttttggggggacctggcacctgttcgggggcatcagacacgctcacaggaatctgaagattggctatgttcagccagcaccatgttgaagcagcttggacctaaacgtcagtgctggtggaactgctggcacgcaagtttcctgggcggcctgaggaggagtaccgtcaccagctgggtcggtatggcatctccggagaactggccatgcgtcctcttgccagcctgtctgggggccagaagagccgagtggcctttgctcagatgactatgccctgccccaacttctacattctggatgaacccacaaaccacctgggacatggagaccattgaggctctgggccgtgccctcaacaatttcaggggtggtgtgattctggtgtcccacgatgagcgctttatcaggctggtgtgccgggagttgtggggtatgcgaaggaggcggcgtcacccgtgtggaaggaggatttgaccagtaccgcgccctcctccaggaacagttccgccgcgaaggcttcctctag

SEQ ID NO: 152556 - DNA, 353 bp, Homo sapiens
  misc_feature (1)...(353): n = a,t,c or g
agaggagtacgtgatccccgggcactgagcctaagatgtcctaacctccacccagaaccccttcagtccctgctgggtgactcagggcgtcctaactcctccatgnnnnnnnnnnnnnnnnnnnnnnnnnnnnnncaggaaaggattgtccttgaggccccaggaagctctgccgccccctccctgtccctcatgccgctcctcagctccctcagctcctagagggggaagaggagagacccccaacaaggggacaggagggtcactgtgccaatcctgtcatcaccctcctgtggatgtacaggcagtgctcaataaatgcttcgaggctgatgagnnnnnnnnnnnnnngg

SEQ ID NO: 152557 - DNA, 2169 bp, Homo sapiens
ctccccgtgaagtcccatactacacaatattcatctggtgttgttgcctagagtttgtcccagcggagggttggcttcggatctgcagaggctttagcgacctgctccagccactgagcacactagccgtctgagacggcagctgagttgcactgtgcgacgcgacagagactacatttcccagcattccagcggcgcactcgggggaccacagatcccagcgcaccacagatcccagcgcaccacaaagaggcccggggactacaaatcccagcatcccctgcactcggttcctctgtaacttagactccagtgtgccgcgcagtgtgcgcaaattcacaaacccgcccgctgagttggtcgtttcggaatcccgagacttgaaacccaacgggaagacccttctcaccctcaaaagaagatgacagcccgcagtagagttaacttctgtttacatggaactcagacatctgcaaatcatgatttcaaggccagagaatggcaggggaactgaaaccctcatgtaatctcctggagcagtctattttactagccaaaggtaccagtgtgctcatccctcactgctctcataagccaggtcttaaaagctccctgagtgtatgtctttggagaacttctggagctgtgcaacgtgcatgagcttgcggaatgagctaatgctgcttatttgcagctgttgaacctgtttgcctatgggacatacccagattacatagccaacaaggagagcctgccataactgagcacagctcagcagaacaagctgaagcatcttaccatcgtgagcttggcatcaagaatgaagtgtatcccctactccgtgttgctgaaagacctggagatgcggaatctccgggaactagaagaccttatcattgaggctgtctacactgacatcatccagggcaagctggaccagcgaaaccagctgctggaagtggatttctgcattggccgtgacatccgaaagaaggatatcaataatattgtcaagaccctgcatgaatggtgtgatggctgtgaagcaggctctactgggcatcgagcagcaagttctgagagccaaccagtacaaagagaaccacaaccgaaacttcagcagcaggtagaagcagaggatgtttacattttgcctcaaagtggtaacgactgtagaggacttagatttgtcagcagtcttattggaggagtgaggtgtgtgcatctgaaacacaaaggagatgcagtggtgtgggaggccatcgaagagggagaggcactgccaggcaagtacagattgaagggtggcagatcagtgtgggctgcagcagtcagggcagtttgtatggaccaggttaccaacatcaagaagacactcaaagccaccgcatcctcctcggctcaggagatggagcagcagctggctgaacgggagtgtccccctcacgctgagcagaggcagcccaccaagaagatgtccaaagtgaaaggtctggtctccagctcgccactagggccggctggggcagctggcactcaccaggcctgggtcaggtggggaggggacaccaagggcccatttcctcccctctctacctgcagtgagttccagacctgcccgtcccctcaccagcgcctccccaccctgttggtactgttccagaaaaactgttactccccctcacccactccctccttccccagttgttcccttcagactcaggggctccaccaatgccatcccaaaacagggtcagacactgcccagcttccctccaggaggttcttgtctctgtgtaaagggcttgtctccctcccagtttttcttttgctcccacgtcattttgtcaggctggttataagccggaggcagctttaaccagcccccatggatgattgtgaaggaggcccctccccttgtgaggagggggcactcctctccagcccctggtaccacagtcctcacgatggtgcagtgatttctagccaggcgtcaagatgcgctgctttccctctcctgcctcatcccttgttggcagctccagatcaggccgtggagggacgtgatgctgggctgtgtttactaaacccacgggttttcagcctcttaagcccagctccgatctccaattagttgagagcgctgggttgactaacctctggtatctc

SEQ ID NO: 152558 - DNA, 413 bp, Homo sapiens
taaaaacaggaacattcagggagtgctcattattggattgtggtcaggaagcagttagcctaatcagtaagacttgtttacaaataagtagaaaacttcaatcagggtgagtttctaattgcatttctacttggcagatattgtttgtgaacagcagtataaaatgtgctccaagggaaattgtgattgtctgggttaatttccttttgtctctggcctgctaaaggatggcctggtgggaatccaacaattaccagtccttctgcctgccctctgaggagagcgagccagaggaccttgagaatggggaagagagctctgctgagctggattaccaagacccagatgctacttccctcaagtacgttagtggtgatgtcacccaccctcaggctggggccgaagatgctctc

SEQ ID NO: 152559 - DNA, 1302 bp, Homo sapiens
  misc_feature (1)...(1302): n = a,t,c or g
ggtaaagattattctaaagagcccagtaaggaagacagaaaatcatttgaacaactggtaaaccttcagaaaacccttttggagaaagctagtcaagagggccgatcactccgaaataaaggcagtgttctcatcccaggccttgtggagggatctaccaaaaggaagcgggaactgagtccagaagagctggaggacagacagaagaaaagacaagaagcagctgccaagagaaggagactcatagagggagaagaagagggcaaaagggaaggaggcttgaacataaggaaaaagatggcctgggttggggattcccaacattttacccagtccttcttgccttgccctctgagggagagccgagccagaggaccttgagaatggggaagagagctctgctgagctggattaccaagacccagatgctacttccctcaagtacgttagtggttgatgtcacccaccctcaggctgggggccgaggatgctctcattgtgcactgcgtagatgactctggccactggggcagaggtggtttatttacagctctgggaaaagcgatccgttgaagccaagaaaaatatatgagctggctggggaaaatgaaaagaccttgagtttgggaggtgtccttttatttcctgtttgatgataaaagattcaagatacaaagggcaagatttgttggccttgattgtggctcagcatcgtgaatcgttccaatgtcctgtccggcatttaagatggcagccctataagaagggcctgaagaagatatttttagcggcaaaaaaggnaggaaagtcaagtgtccaacctccccacgtattggacatgccacgtaaaggttttaaacgggtaggggtacctgaaccgaccttattcgggaaacatccgggcctgcaaagaggccatccccaaccttaccatatattatttcccctagaaggcaagtctgcctgtcccttccattcacagttcttcatccttccctccctcaaggacagctggtgcccttaagggattgggcccagccctcagatcctggtctttaagcaaccagcctaatatttaccccagaggtactgcaataggagtatttcaaaatggaatcaggatctggtggggcctcgagaaattgtctcttttctgagtttcagtttggttctcctggatgttttgctctgttttgatacctgtaatatagggaaacacaactttttttgggaaagccctttgaccccagcttgctagttgcataataataaattttctgttcccaaaaaaaaaaaaaaaaa

SEQ ID NO: 152560 - DNA, 434 bp, Homo sapiens
  misc_feature (1)...(434): n = a,t,c or g
ttgaaaggagtgctgctgaaactgtaaccaaaggaggcattatgcttccagaaaaatctcaaggaaaagtattgcaagcaacagtagtcgctgttggatcgggttctaaaggaaagggtggagagattcaaccagttagcgtgaaagttggagataaagttcttctcccagaatatggaggcaccaaagtagttctagatgacnnnnnnnnnnnnnnnnnnnnnnnnnnnnnnnnnnnnnnnnnnnnnnnnnnnnnnnnnnnnnnnnnnnnnnnnnnnnnnnnnnnnnnnnnnnnnnnnnnnnnnnnnnnnnnnnnnnnnnnnnnnnnnnnnnnnnnnnnnnnnnnnnnnnnnnnnnnnnnnnnnnnnnnnnnnnnnnnnnnnnnnnnnnnnnnnnnnnnnnnnnnnnnnnnnnnnnnntgcttcttacacccg

SEQ ID NO: 152561 - DNA, 431 bp, Homo sapiens
  misc_feature (1)...(431): n = a,t,c or g
ttgaaaggagtgctgctgaaactgtaaccaaaggaggcattatgcttccagaaaaatctcaaggaaaagtattgcaagcaacagtagtcgctgttggatcgggttctaaaggaaagggtggagagattcaaccagttagcgtgaaagttggagataaagttcttctcccagaatatggaggcaccaaagtagttctagatgacnnnnnnnnnnnnnnnnnnnnnnnnnnnnnnnnnnnnnnnnnnnnnnnnnnnnnnnnnnnnnnnnnnnnnnnnnnnnnnnnnnnnnnnnnnnnnnnnnnnnnnnnnnnnnnnnnnnnnnnnnnnnnnnnnnnnnnnnnnnnnnnnnnnnnnnnnnnnnnnnnnnnnnnnnnnnnnnnnnnnnnnnnnnnnnnnnnnnnnnnnnnnnnnnnnnnnnnnnnnnnnttacac

SEQ ID NO: 152562 - DNA, 560 bp, Homo sapiens
tctttcacctcggctgggcgcctagaaaagcctagaaacagctccttttttcttccgcctccgagtcttcgcgtcagcgtcctgcgcagggcccttggggcgaatcgcggtgcgcgtcggggcgaccgccctccctccctgggaggggcgagggggctagcggcgaccgctggggcgagcgcgcctgcgcgctgggtgattttttcacgtgtcgccagggccggactgcgagtctctttgcggcgctacactagagcagagtacgagtctgaggcggagggagtaatgggtggagagattcaaccagttagcgtgaaagttggagataaagttcttctcccaaaatatggaggcaccaaagtagttctagatgacaaggattatttcctatttagagatggtgacattcttggaaagtacgtagactgaaataagtcactattgaaatggcatcaacatgatgctgcccattccactgaagttctgaaatctttcgtcatgtaaataatttccatatttctcttttataataaactaatgataactaatgaaaaaaaaaa

SEQ ID NO: 152563 - DNA, 616 bp, Homo sapiens
cccacgcgtccgggcggagggagtaatggctgtgacaagcttttagaaagtttcttccactctttgaccgagtattggttgaaaggagtgctgctgaaactgtaaccaaaggaggcattatgcttccagaaaaatctcaaggaaaagtattgcaagcaacagtagtcgctgttggatcgggttctaaaggaaagggtggagagattcaaccagttagcgtgaaagttggagataaagttcttctcccagaatatggaggcaccaaagtagttctagatgacaaggtgtgtaaaccttaataattctaaaaagaagtcagatatttgcaattagttgtcctaactaatggtttttttcacttgcaggattatttcctatttagagatggtgacattcttggaaagtacgtagactgaaataagtcactattgaaatgcatcaacatgatgctgcccattccactgaagttctgaaatctttcgtcatgtaaataatttccatatttctcttttataataaactaatgataactaatgacatccagtgtctccaaaattgtttccttgtactgatataaacacttccaaataaaaatatgtaaatgaaaaaaaaaaaa

SEQ ID NO: 152564 - DNA, 886 bp, Homo sapiens
aataggaagactttggggagtggacacttagctgcagtccctttccccaaatctgttctttggagggaacaaaacaatcacaagagtatgttctaaatccaaaaaaactttaaatttttgtatgttgaaagaaggaaaatatgaccatttgtatatggcattttctgggtgctggctactgttgcaggtttatttcatatagttgataagttatgttaatatttaacagttataaagttagctttagttaactaaagttagcttttccagaatattttcttgaacttttacgttggagtcaggttttagtttaagccactgtgtattatttcaaagtgtaactacagtggtatttttgagtgaagatctgtaattctagtatgagtcgtatcacttagccacgaaatatatttttaatataattggatttggagtgacccatgtttcattagttgtagtgatttaaaagttaactgtttatgttgggtgaactagatatctttgctaaataaacatccttccttttttaagggtggagagattcaacccagttagcgtgaaagttggagataaagttcttctcccagaatatggaggcaccaaagtagttctagatgacaaggtgtgtaaacttaataattctaaaaagaagtcagatatttgcaattagttgtctccaccaagggtttttttcacctgcaggattatttcctatttagagatggtgacattcttggaaagtacgtagactgaaataagtcactattgaaatggcatcaacatgatgctgcccattccactgaagttctgaaatctttcgtcatgtaaataatttccatatttctcttttataataaactaatgataactaatgaaaaaaaaaaaa

SEQ ID NO: 152565 - DNA, 784 bp, Homo sapiens
aatttttttttttttttttttttttcatttacaatattttttatttggaagtgtttatatcagtacaaggaaacaattttggagacactggatgtcattagttatcattaggtttattataaaaggggaaatatgggaaattatttacatgacggaaaggatttcaggaacttcaagtggaatgggcaggcatcatgttgatgccatttcaaatagtgacttatttcagtctacggtactttccaaaaattgtaacaatctctaaataggaaaataatccttgtcatctagaaactacttttggtgcctccatattctggggagaagaactttatctccaacttttcacggctaactgggttgaatcatctccaccctttcctttagaacccgatccaacagcggactactggttgcttgcaatacttttccttggagatttttctgggaaggcataatggcctcctttggggtacaggtttcaggcaggcactcctttcaaccaatactcgggtcaaaagagtggaagaaacctttctaaacgcttgtcctgccattactccctccgcctcagactcgtactctgctctagtgtagcgccgcaaagagactcgcagtccggccctggcgacaccgtgaaaaaatcacccagcgcgcaggcgcgctcgccccagccgtcgccgctagccccctcgcccctcccagggagggagggcggtcgccccgacgcgcaccgcgattcgccccaagggccctgcgcaggacgctgacgcgaagactcgga

SEQ ID NO: 152566 - DNA, 2035 bp, Homo sapiens
aatacaacggggcgggagcagacttggctggctcatgcatcttaaaacaccagaaatgtgtcgaaagtaaagagcggatttctgctacttatagggcttttatgctaatgagggatggagagtacctcttagttaattggaagacaaactgcacagttgtcatccgtgggcagagctatgcaaatgaggtatgaaagtacagcttttctattggctatctgactagcatttgctaccgaccaatcaaaaagtcggatttactccccaggaactacctataaaagcggccatgctttacatatttcttgattttgtttgttttctcgtgagcttacgctgctggttttggtgattcttgtctgattgcaatgtctggacgtggtaagcaatgaggcaaagttttttgccaaagcgaaatcccgctcttctcgcgctggtctccagttcccggggggccgagtgcaccgcctgctccgtaaaggcaactacgcagagcgggtttggggcaggcgcgccggttgtacctgggcggcggtgttagagtatctgaccgccgagatcctgggagctggccggcaacgcggctcgcgaccaacaagaagactccgcatcatcccgcgccacttgcagctgggccatcccgcaacgacggaggagctcaacaaacttgcttagggccgggtgaccatttgcttcaggggcggcgtcccttcctaaacatccagggccgtgctttctgcctaagaagaccgagagttcaccacaaggccaagggcaaagtgattttgacaggtatcttgagcttccccggaaacgctattcaaacccaaaaggctccttttcagaagcccccctaccgtttcaaaggaagagctaacctcactgcttgtaggtagaaggaaaaaaggcactaaggttgcaaaagcttctcatttcagagagatgccaggatcctaagtgcctgccaaacttaccaattctaaggaataagtggatggatggcattactgattcctaccatacgggatggatttggcacccgcaaattgttttattaaaaacattctacatcatgggtggggagataagggggataaaatgaagagaaagaatattattgaggggaagtttttttgaatacaaaatgggtttaattttttaaataagtattacattcacagggttcaaactatttgaagtaaagagattatatataaagaatccatccctcaacttacccaggtggtcacttttctttttcttgtgtatctgcccagtattcattcctgctgatatcagtcaataatgaatgatacgtgttttcttcactttttttcattcttggcaggtaacagactgtgtaggacttttctgcacttgcccttttcataacaatctatcttgggagaactttcccctatggggaacataccagagcttcccggtacacagttggcatgttactggcattatggcaaatgccattaatattttaatgtaaccctgtccccactgttgggtagggcaccttgagttgttttaagtccttttgcctatccaaacagttctgggggtggattaacccctgatttacctgcaaaattggaaatgttcggctaattctgcttggaatggtggtaagtgaactgaaaattccagtcgactcttgggctagactcaacgtttcttaaaaactatgtggccgatcaccaaattagttattttgaaccttatatttcttcacctctaaaaatggagggtaatacctaccccttaagtgggctatgagaatgaagatcatgtgtatgaattgttggtgctctaaagaacagcacaaataaaattactttcaaatttaattttaattgaactatgtgtaatttcttaattttgaaataattttatttgtaatgtgcataatcttatttaatgtataatgtatacattgtaatagaaacagatttcccgaaattccagcctggcatgaggtaataaaaggtaatgcaaagggaaaaaaaaaaaaaaaaagtcgacg

SEQ ID NO: 152567 - DNA, 414 bp, Homo sapiens
ctctgggtgtggcggttgccgtagctgaaattggttgcaccatgtcggccttcgagaagcctcagatcatcgcccatatccagaagggcttcaactacacggtgtttgactattgaaaaggccaaacctattaaatgtggaacatttggtgcaacatctttacagcagagatatttagctactggagattttggtggaaaccttcatatatggaatttagaagctccagagatgccagtatattctgtaaagggccataaagaaattataaatgccatagatggcataggtggactaggaattggagaaggagcacctgaaattgtgactggcagccgagatggaactgtgaaggtgtgggacccaaggcaaaaagatgatcctgttgctaatatggaacctgtacaaggagaa

SEQ ID NO: 152568 - DNA, 383 bp, Homo sapiens
  misc_feature (1)...(383): n = a,t,c or g
cggacgcgtgggcggacgcgtgggaatttatcatttatctgaaatcacatgtagcagattgcatagtctgtaatcctctcagagggaaacttcttgtttaaacagctctatatggatttatacttttatatttataaatttataacttcatacaaatttataaacatttctttataaattgtaatttaatagattatctcagaaaaacctctctgagtgatgacccttccttaatactgggtgatgtgtgaannnnnnnnnnnnnnnnnnnnnnnnnnnnnnnnnnnnnnnnnnnnnnnnnnnnnnnnnnnnnnnnnnnnnnnnnnnnnnnnnnnnnnnnnnnnnnnnnnnnnnnnnnnnnnttttttctctttattttctgt

SEQ ID NO: 152569 - DNA, 444 bp, Homo sapiens
aaatttctttatggccctttacagaatatactggcatctctggagcttctaaattccatatatgaaggtttccaccaaaatctccagtagctaaatatctctgctgtaaagatgttgcaccaaactgttccacatttaataggtttggccttttcaatctcccgaagcagcttcaggtccccgtgctggatctcgtacagctgaatgacgccggtgccccgtgcgaagttgcccatggtcacaaatttggcgctgcagggcacccacttacagtcaaaccccgtgtagttgaagcccttctggatatgggcgatgatctgaggcttctcgaaggccgacatggtgcagccaatttcagctacggcaaccgccacacccagagcccccaaaatcggcaacctggaaccagactccaaacattggcaatttgtccctcccgctttc

SEQ ID NO: 152570 - DNA, 2732 bp, Homo sapiens
  misc_feature (1)...(2732): n = a,t,c or g
tgggcgcggaggaactaccccgcggatgagaagaaaggttttaaataggaaacattcctcagtcggcggtcagcttctgtggtctcgcgcggctcaagccatgctttgggggacgctgggcgaaggctctggcaaagaggaatgcagaccccaggatccgcactcgcccccaacggcagtccggatcctcgacccggcacccacctcccgaagcagcttcaggtccccgtgctggatctcgtacagctgaatgacgccggtgccccgtgcgaagttgcccatggtcacaaatttggcgctgcagggcgcccacttacagtcaaacaccgtgtagttgaagcccttctggatatgggcgatgatctgaggcttctcgaaggccgacatggtgcagccaatttcagctacggcaaccgccacacccagagcccccaaaaacggcaacctggaaaccagactccaaacattggcaatttgtccctcccgctttccgtattctgccccagatgccctggcatgttggctgtagttatccccggataatgccagatgcgctcctgcgatcgcacagaatgttccttcacaacagcacgaatttgtttatcgcctttacccactgcctttcgcacacatacatacggccccaaatcctgcaggtccccggcctgtgacgttttaggaaaggggcggagctgcaggggtggttggctgaggctggcttctgcgtggtgcagctgcgcacgtgtttcagccggcagcgctttaagatttccggggatggaatccgaaatggaaacgcagagcgccggggcagaggagggctttacccaggtcacccgcaagggtggccgacgggcgaagaaacgacaggctgaacagctgtccgcagcaggagagggcggggatgcgggccgcatggacacagaggaggccaggccggcgaagaggcccgtcttcccacccctctgtggggacgggctcctgagtgggaaagaagaaacaaggaaaattccagtcccagctaacagatacacaccattgaaagaaaactggatgaagatatttactcctattgtggaacatttgggacttcagatacgctttaacttggaaatcaaggaatgtagaaatcaggacttgtaaagaaaccaaggatgttagtgactctgacaaaagacagactgattttgtgaaagacttttattctcggactttcaggatggaaggaatgacacttgaccctcatcaggttggaatgacctcttcctagaagtcttttgaaattacagatgttaaacccctaaaggggagaccatctatccagggcaataggaagaatcgctgggcaaaggagggaaaaaccaaattcaccatagaggaatgtgacacggacaacgatagttttggctgatgtgaaagttcacatccttgggctccttccaaaatatcaagatggcaagaactgccatttgcaacctaatcttgggaaatcctccttccaaggtttatggcaatattcgagctgtggctagcagatcagcagatcgattctgatttcaagtcagagactttctaacttgcctttgggactctggtgaaaaatactttacagtggcatatccccagaacccagctgaacaattccagtcatttgaagcctccgtcccttcttccattctcagccagaagcttaacctgaaaagaaagatttaaggggattcacaattcaacaggttttaggataatttaaatttcaaaaattgaatggtatactttacacattaggtataatttatcatttatctgaaatcacatgtagcagattgcatagtcttgtaatcctctcagagggaaacttcttgtttaaacagctctatatggcatttatacttttatatttataaatttataacttcatacaaatttataaacatttctttataaattgtaatttaatagattatctcagaaaaacctctctgaatgatgaccccttccttaaatactgggtgatgtgtgaatatttgtttgttggccagaccagggtctcactttgtcacccagggctaggagtgcagtgggtgcaatctcaggctcactgcagccctctgccctccctgagttccaagtgatccctccctgcttcagccctcccctagtagctgggactacaggtatgcacccaccatcccnggcctaattttttgtattttttgtagagatggggtttcgcccatgttgacccaggctggtcttgaactccctggccctcaagggatccgtccgcctcagcctcccaaagtgctgggattacaggcataagccactgcgcctggccttgatgtgtgaatattttagaggtcataagcagtggttttggcccataccgtattataccatatacatcagtaagagctcatcttggaacctgttttgcagtttcaaaaattaaagacctacatcacacggttgatgtgaagaaagctttatttttcaaatgagtatttaatgaaagtatacataaccaatgttgggtatacagatgcttctcaacttatgatgggtttaggtccagataagcccactgtgagttgaaaataccaaaagtcaaacatcatagcttagcctaccttaaaagggctccgaacactacattagcctacagttgggcaaaatcgtctaatacaaagcctattttataataaagtatgttgaatatctcatgtaaaaaa

SEQ ID NO: 152571 - DNA, 1691 bp, Homo sapiens
ccctttttagcgtcttctttccttaaagataaaagaaaactcaaatttgtttacattaggctttcttagcatataaatatatttccaaaataaattacatgttgtgtaaactttctccatgatgaaatagtcaaggaccagaatctgtaatatttttatgtaagattacttgtcaagactactacaagtcagtatgaactaccttcccataaagatttttggtatttgtacttatttatgaactttacttgagacagaatatggttaaaattaggaacatctactttgaatgaggtttatttttctattttgaatttgccttatgtatattcaaaggcttatggaaatactgtaaaggaacattaggaaaaggacaaataggctataaccatctatcttaaaatcagacccttagtataagcacctctttttcttttcctctttgacaatttagtctcttatttaggtccatgtaattaatttcattccattattttttagctgtttattctaaaaaacaaaaattttcagccactcccattttatttctccccatggacagggtccctatataggcagtacttaacacagtgccttgcaccatagtaggccattcagtaaatacttacatgccatgaatgaataatgtattttcagtgtaacaaatttattataaaagtgtagttcgactcttcttggtcttggagtttgagagtacagaattacagggaatgaagagaggtataagtagatattttaatggaaatgaagtataaattaataacttgacttacccctccataagttactgctaactggagataccccttgtatgccccaacctgtaaaggaaaaaagttctatttctatatttataggacattcttctcactcaaggaacatataagaaatatgtaggtttcaatcagttgctctcaaccctgactgcattttagaatcatttggagagtttttaaaaatatcccatgcctgaatcttgattcccattttcatgtaatttgagacaagacctggtcatcagtattttttttaaagttctccaggtaatttgaatgtgcaggaaggattcagaatcactggtttaatttgttattgaaaacagtaccagtattaaatgtgtttcctcttccttcttttctgtatgtatgtgtggtttttgattttttgttgttgttgttgttttgtggccaccctttgcactagaccatcccttttattggtggtattggcctatattcccattgacaaatgcaatttttaattatttatttaatataggagtattttactgtttaatatttaaacaatgtttaatgtatttcattattaaactagtattatagtttgtttttttcccatgtctccataacttttactaacatttgtttttagcagcacaacagtaatccatataaaaacaactaattcataatgaggaaaatctcataatttttaaggcagaaagaagtattaatttttgatctgccatgtagaatgagacaaatacagtttgcttatgaaaggaaagtggcatacttttaaattggtctacacagaaaagtaaaagtaaactattcatttaaataagattcattatctaataaatattgagggaatatttttcctaaataaaaatttttctgactgctaacaaaaaaaaaaaaaaaaaa

SEQ ID NO: 152572 - DNA, 256 bp, Homo sapiens
  misc_feature (1)...(256): n = a,t,c or g
gagccctggccgaaccgcgatgagaagctggtcttgtcgcccttgtggtggaggaggcctgggggcagccagggtcgcagtgagcccgggagctccaggctcggccccgccccaccntgggcctcacgcacccgtgtaggagaggccccagctgtcctcatccctgcccagcaggctgcagaacgtgtggcggtatttgtccaggtccacatccgacgtcccgatgcccaccatctaggaactgtggccaaacaca

SEQ ID NO: 152573 - DNA, 2848 bp, Homo sapiens
atggccagacgcccccggaacagcagggcctggcacttcgtcctgagtgcagcccgccgagacgcagatgcccgggccgtggctctagcaggctccactaactggggctacgactctgatgggcagctcctgcaggtcacatgcctgagcctcacaggctcgtggctgtgggatgcaggcgtgcctgcgggctcggcagtgttcgacacatgtgctgcttgtcctgtgtcaccaaatgggcctgcagtctgttgtgggcaggagcacagcgactcggactccgaccccgagtactccacgctgccgccatccatccccagtgcggtgcccgtgaccggcgagtccttctgtgactgtgctgggcagagcgaggcctccttctgtagcagcctgcactcggcccaccggggcagggactgccgctgcggagaggaagacgagtatttcgactgggtctgggatgacttaaataagtcatcagccaccctgctgagctgtgacaaccgtaaggtcagcttccacatggagtacagctgcggcacagcggccatccggggcaccaaggagctgggggagggccagcacttctgggagatcaagatgacctctcccgtctacggcaccgacatgatggtgggcatcgggacgtcggatgtggacctggacaaataccgccacacgttctgcagcctgctgggcagggatgaggacagctggggcctctcctacacgggcctcctccaccacaagggcgacaagaccagcttctcatcgcggttcggccagggctccatcattggcgtgcacctggacacctggcacggcacactcacctttttcaagaacaggaagtgtataagaatcaaagaggcctggagcccccttacgcggctgccgcaaccctgcctgccctgcatgcagatggccctgaggaaaggcaatgtgagctttggtggccgacggtccagggttcctacctgtcccccgacggcggtgccccggtcccctcccgcagcacccgaccaaggcctggatgcaggcaggaggcctggccctggcgctgctgctgctgtcctgggtggcactgggcccccgcagcttgaggggaacaagcccccgaaacgcgggggtaagccgagggccccagcgtgcccgcccgcttgtgtctgcagctacgatgacgacgcgaatgagctcagcgtcttctgcagctccaggaacctcacgcgcttgcatgatggagtcccgggcggccacccaagccctgtggctggacggcaacaacctctcgtccgtccccccggcagccttccagaacctctccagcctgggcttcctcaacctgcagggcggccagctgggcagcctggagccacaggcgctgctgggcctagagaacctgtgccacctgcacctggagcggaaccagctgcgcagcctggcactcggcacgtttgcacacacgcccgcgctggcctcgctcggcctcagcaacaaccgtctgagcaggctggaggacgggctcttcgagggcctcggcagcctctgggacctcaacctcggctggaatagcctggcggtgctccccgatgcggcgttccgcggcctgggcagcctgcgcgagctggtgctggcgggcaacaggctggcctacctgcagcccgcgctcttcagcggcctggccgagctccgggagctggacctgagcaggaacgcgctgcgggccatcaaggcaaacgtgttcgtgcagctgccccggctccagaaactctacctggaccgcaacctcatcgctgccgtggccccgggcgccttcctgggcctgaaggcgctgcgatggctggacctgtcccacaaccgcgtggctggcctcctggaggacacgttccccggtctgctgggcctgcgtgtgctgcggctgtcccacaacgccatcgccagcctgcggccccgcaccttcaaggacctgcacttcctggaggagctgcagctgggccacaaccgcatccggcagctggctgagcgcagctttgagggcctggggcagcttgaggtgctcacgctagaccacaaccagctccaggaggtcaaggcgggcgctttcctcggcctcaccaacgtggcggtcatgaacctctctgggaactgtctccggaaccttccggagcaggtgttccggggcctgggcaagctgcacagcctgcacctggagggcagctgcctgggacgcatccgcccgcacaccttcaccggcctctcggggctccgccgactcttcctcaaggacaacggcctcgtgggcattgaggagcagagcctgtgggggctggcggagctgctggagctcgacctgacctccaaccagctcacgcacctgccccaccgcctcttccagggcctgggcaagctggagtacctgctgctctcccgcaaccgcctggcagagctgccggcggacgccctgggccccctgcagcgggccttctggctggacgtctcgcacaaccgcctggaggcattgcccaacagcctcttggcaccactggggcggctgcgctacctcagcctcaggaacaactcactgcggaccttcacgccgcagcccccgggcctggagcgcctgtggctggagggtaacccctgggactgtggctgccctctcaaggcgctgcgggacttcgccctgcagaaccccagtgctgtgccccgcttcgtccaggccatctgtgagggggacgattgccagccgcccgcgtacacctacaacaacatcacctgtgccagcccgcccgaggtcgtggggctcgacctgcgggacctcagcgaggcccactttgctccctgctga

SEQ ID NO: 152574 - DNA, 1970 bp, Homo sapiens
tcaggtccggcggcagcgcttcctctggcagggccgaggctcgcgactgctggggtgggcggaggtcgctgcctggggatcggacactggagccttgcggcggctgcaactcatgctcaggacccagcccagcttgttgtgtagcacctgcttgaggcccggcggcagcggcagaccctccagcgtgtctcccgagtctggccgcagctggcgcaggcggtggcagcacaggtactggagggaagtggcgctggcacaggagcgggtgaccttcatgctgctccgggccgccgtggagcacaccatcgggtagaatctcttgttctgcagcttggtggctgccacacctggaagggaggggcccagcctatacacttcctgttcttgaaaaaggtgagtgtgccgtgccaggtgtccaggtgcacgccaatgatggagccctggccgaaccgcgacgagaagctggtcttgtcgcccttgtggtggaggaggcccgtgtaggagaggccccagctgtcctcatccctgcccagcaggctgcagaacgtgtggcggtatttgtccaggtccacatccgacgtcccgatgcccaccatcatgtcggtgccgtagacgggagaggtcatcttgatctcccagaagtgctggccctcccccagctccttggtgccccggatggccgctgtgccgcagctgtactccatgtggaagctgaccttacggttgtcacagctcagcagggtggctgatgacttatttaagtcatcccagacccagtcgaaatactcgtcttcctctccgcagcggcagtccctgccccggtgggccgagtgcaggctgctacagaaggaggcctcgctctgcccagcacagtcacagaaggactcgccggtcacgggcaccgcactggggatggatggcggcagcgtggagtactcggggtcggagtccgagtcgctgtgctcctgcccacaacagactgcaggcccatttggtgacacaggacaagcagcacatgtgtcgaacactgccgagcccgcaggcacgcctgcatcccacagccacgagcctgtgaggctcaggcatgtgacctgcaggagctgcccatcagagtcgtagccccagttagtggagcctgctagagccacggcccgggcatctgcgtctcggcgggctgcactcaggacgaagtgccaggccctgctgttccgggggcgtctggccatggtggaaagaatcggtgcccagccagggctccagaacgcttcaggagcccgtacctcaccccaggatctgagcagctcaataaaacccaggtagatcattggacccgggtgggaggtggtaccgcaggccgcgttgaccggaaagtaggtccgtgtcatcgtctgcgccggaacctgcgggaccggatcgagagctcctccggcaagctgattggctgggacagcaggattaggcctgtcaagaagagccacgggcgggcacgcactgcccattggttggaaggcccttcgctctagctgggaggctgacggcccgcgggcgtaagcggactgcagccgcgagctccagtggggacgatccgttcgccagatcagcgccgtgggccctcctgagtagtgggagccgcatttatcttctaagagacctcgagtccgataccaaaaggaaaacattcctcggacagcaaggtcttgcagcacaactgagaggttgttgccgtccagccacagggcttgggtgccgcccgggactccgtcaggcaggcgcgtgaggttcctggagctgcagaagacgctgagctcatccgcgtcgtcatcgtagctgcagacacaggcggccgggcacgctgggccctcggcttcccccggcgttccggggtctgctccctccaggctgcgggggcccagtgccacccaggacagcagcagcagcgccagggccaggcctcctttcctcagggccat

SEQ ID NO: 152575 - DNA, 2041 bp, Homo sapiens
ccaccccccccctgaagtgtgcttgaaagtaagggccagagaaacaagggacagaggaaagggcctgtcccagcccaagaaggcagttccactgggaagtcagtcaggtccggcggcagcgcttccctctggcagggccaaggctcgcgaactgctggggtgggcggaggtcgctgccctggggatcggacactggagccttgcggcggctgcaactcatgctcaggacccagcccagcttgttgtgtagcacctgcttgaggcccggcggcagcggcagaccctccagcgtgtctcccgagtctgggccgcagctggcgcaggcggtggcagcacaggtactggagggaagtggcgctggcacaggagcgggtgaccttcatgctgctccgggccgccgtggagcacaccatcgggtagaatctcttgttctgcagcttggtggctgccacacctatacacttcctgttcttgaaaaaggtgagtgtgccgtgccaggtgtccaggtgcacgccaatgatggagccctggccgaaccgcgacgagaagctggtcttgtcgcccttgtggtggaggaggcccgtgtaggagaggccccagctgtcctcatccctgcccagcaggctgcagaacgtgtggcggtatttgtccaggtccacatccgacgtcccgatgcccaccatcatgtcggtgccgtagacgggagaggtcatcttgatctcccagaagtgctggccctcccccaagctccttggtgcccccggaatggccgctgtgccgcaagctgtaactccatgtggaaaactgacctttacgtttgtcaacaactcagcaggttggctgattgactttatttaagtcatcccaagacccaatcgaaaatactcgtcttccctctccgcaagccgcaatcccctgccccggtgggccgaagtgcaggctgctacagaaggaggcctcgctctgcccagcacagtcacagaaggactcgccggtcacgggcaccgcactggggatggatggcggcagcgtggagtactcggggtcggagtccgatgtcgctgtgctcctgcccacaacagactgcaggcccatttggtgacacaggacaagcagcacatgtgtcgaacactgccgagcccgcaggcacgcctgcatcccacagccacgagcctgtgaggctcaggcatgtgacctgcaggagctgcccatcagagtcgtagccccagttagtggagcctgctagagccacggcccgggcatctgcgtctcggcgggctgcactcaggacgaagtgccaggccctgctgttccgggggcgtctggccatggtggaaagaatcggtgcccagccagggctccagaacgcttcaggagcccgtacctcaccccaggatctgagcagctcaataaaacccaggtagatcattggacccgggtgggaggtggtaccgcaggccgcgttgaccggaaagtaggtccgtgtcatcgtctgcgccggaacctgcgggaccggatcgagagctcctccggcaagctgattggctgggacagcaggattaggcctgtcaagaagagccacgggcgggcacgcactgcccattggttggaaggcccttcgctctagctgggaggctgacggcccgcgggcgtaagcggactgcagccgcgagctccagtggggacgatccgttcgccagatcagcgccgtgggccctcctgagtagtgggagccgcatttatcttctaagagacctcgagtccgataccaaaaggaaaacattcctcggacagcaaggtcttgcagcacaactcgggactcattgtccatggagagcgcactcgccttcctcggggagatggtgcttcgcctccttcctgcacttccagccccactgccccacccggcatgctcatgctgactgtgctttgctgacaatctgcttaggagctgcctcagtttgctgagaagtgaaatgttcttgggggaaccctcagggttgttgtcccggttcctgacactaaggcctgcatttaccat

SEQ ID NO: 152576 - DNA, 1659 bp, Homo sapiens
tggcactaggggcagccactcagcccttcgagctgtaggggaggcgctgcgcccccggccccagccgatcgggggctcctggcgctagcctcgcctccagagcgccgcaggagtccctcctgccgtctgacttgagtccctgctgctgcagtgcacgcccccctttcggcagccagggtggggcccagacccaacctggcccctcctgcccccaccccgcctttgggtcgctgacccccaggctgtggtgagggtctgagagctggtaccacggagcctgggcaacctcctccgcccacccatgcccaccccgcatgaggctgagaagcagatcacagggccagaggaggcggaccggcccccttcaatgtccagtcatgatacagcctctccagcggcccccagccgaagccccatgctgcctgtgctggtgctgatgttgtaactgctcctggaaccaacagcggcggcgcgcgtggcaagcctcccgggagagcaaactgcagcccctcacccatctgcgaagtatgtgccacgccaagtcctgaggaggtgcagagctgggcgcagtcttttgacaagctgatgcacagccttgcgggactcagcgtgttccgggcgttcctgcggacagagtacagcgaggagaacatgctcttctggttggcctgcgaggagctgaaggccgaggccaaccagcatgtggtagacgagaaggcgaggctcatctacgaggactacgtatccatcctgtcccccaaggaggtgagcctggactcccgtgtgcgggagggcatcaacaagaatatgcaggagccgtccgcacacacgttccgacgacgcgcagctgcagatctacacgctcatgcaccgggactcctacccccgcttcctcagctctcccaccttacccgtgccctgcttgctgcaggggccattcacagtccttccttcccgaggccttaggccgccccccagcagcacagaccccgccgcctcctacggccgactctgggttcccttcaggtgttggtgtcggcagggctgtcagggcacatgcctggccggctggggtccccacccgcggaagacggtccttagacccagttgggaagtgctgtgtctcctgggtctgcccacccgtggccaagcaggaactccaggtgcagggcgggcctccaggtgcagggcgggccagaagccccctcatcggcccgcagctggctggcccagtgctcctggctgggggctcttgcgtggtgagagtaaggggtccccccaggagccatgctggacccatgagcctcgttggggcctcctccacaggcagccgatgggccccagacaagcctttggtggggaacagaacctccgcatcgtgtagttttgtgacataaggagacctcttacttgagctgtctgtaccccagaaatcaaacacagaacctcagaaccagatttaggacctcagaatcctgcactcaaggtggcaggacccaatttctgttttatatgtctcatgaactttaaacctggaaacatgtccttactaggtgttttatcaaaaaaaagttttcatatttatctctatccctaaccccccaaaaataggatgtcttattattgaagatatttttaaagcaaaaaaaaaaaaaaaaa

SEQ ID NO: 152577 - DNA, 488 bp, Homo sapiens
  misc_feature (1)...(488): n = a,t,c or g
cgggtaggcctgccgggnccncccaccctggggncctgnnnggcccgcagnaccacaggnatgaanaccggncgcactacgcgttcgggggttcggctcggctacttgcataatccgtttagctaaaatgtaatttcagattggacaagtactgtggaggaactgcaatgtctggtggagaacaaaaaccagagaggtactatgtgggtgtggacgttggaacaggcagtgtccgtgcagctctggtggaccagagtggggtcctgttggcttttgcagaccagccaattaagaattgggagccccagttcaaccaccatgagcagtcctccgaggacatctgggctgcgtgctgtgttgtcacaaaggggattcccatcgaaacgtcatcatgtggctggaccatcgagcagtcagtcaagttaacaggatcaatgagaccaagcacagtgtcctccagtacgtcgggggggtgatgtctgtggaan

SEQ ID NO: 152578 - DNA, 401 bp, Homo sapiens
agcttcactcattgatgcccatgcaggaggactaggagtgattggggcagatgtgagagggcacggcctcatctgtgaggggcagccagtgacgtcacggctggctgtcatctgtggaacgtcttcttgtcacatggggatcagcaaagacccgatttttgtaccaggcgtctgggggccttatttctcagccatggtacctgggttctggctgaatgaaggtggtcagagcgttactggaaaattgatagaccacatggtacaaggccatgctgcttttccagaactacaagtaaaggccacagccaggtcaccggattgaaactgtctcaggaccttgatgatcttgccattctctacctggccacagttcaagccattgctgtaagatactgtgatgc

SEQ ID NO: 152579 - DNA, 566 bp, Homo sapiens
ctcattctcatctgcaaaaatcttcttccttagatcttattaggaggaataagatattactgggaaaaggcttaacaactacagttaacaccagttgccattccctaaatgtacaccagaccttccaacactgcccagttggggaggtaccactaacatacagaggagatgcttcaagaggtgaagagacaggtctgagtccagctttaaacccttctccttgtgattctgaagccatggactttctgtatcttagatcaacaaagacccaatttttgtaccaggcgtctgggggccttatttctcagcccatggtacctgggttctggctgaatgaaggtggtcagagcgttactggaaaattggatatcctttccaccaatacacctcatcccataacaatcctggggaacaccaactccattttgaagactcagttgcagcatcagaagcctttcctgatcacatctccccacatccccaaaacaccccagaccagcagaaccgaccaagcctccttcctttgtagcccatcttctgactctctacagattctgtcactgtaa

SEQ ID NO: 152580 - DNA, 519 bp, Homo sapiens
gttgcagatctgacactaaagggcatggtcaccggattgaaactgtttcaggaccttgaatatcttgccattctctacctggccacagttcaagccattgctttggggactcgcttcattatagaagccatggaggcagcagggcactcaatcagtactcttttcctatgtggaggcctcagcaagaatcccctttttgtgcaaatgcatgcggacattactggaagcaatggcaaaaatgagcaaagttgggaaagttgtgttcccgagactacaggataaaaaatactatgataagaaataccaagtattcctgaagctggttgaacaccagaaggagtatttggcgatcatgaatgatgactgaacagggcttgcaggtgctgatgccagaagcttctgtgccattgcattaaagacttgtcatttgatccatgttcaagacccttgaggtattgtttcatcatttctgtattgtctttcaataaagaaaacaaacatgtgcaaaaaaaaaaaaaa

SEQ ID NO: 152581 - DNA, 1950 bp, Homo sapiens
ttccgggacgacccacgcgtccgggcgcggctacgtgcagaatccgtctatctaaaatttaatttcagattggacaagtactgtggaggaactgcattgtctggtggagaacagaaaccagagaggtactatgtgggtgtggacgttggaacaggcagtgtccgtgcagctctggtggacccagagtggggtcctgttggcttttgcagaccagccaattaagaattgggagccccagttcaaccaccatgagcagtcctccgaggacatctgggctgcgtgctgtgttgtcacaaagaaagttgtacaagggattgatttaaaccaaattcgaggacttgggtttgatgccacgtgttctctggttgttttggataagcagtttcacccattaccagtcaaccaggaaggggattcccatcgaaacgtcatcatgtggctggaccatcgagcagtcagtcaagttaacaggatcaatgagaccaagcacagtgtcctccagtacgtcgggggggtgatgtctgtggaaatgcaggccccgaaacttctgtggctgaaagagaacttgagagagatttgctgggataaggcgggacatttctttgatctcccagacttcttatcgtggaaggcaacaggtgtcacagcacggtctctctgctccctggtgtgtaagtggacatattcagcagagaaaggctgggacgacagtttctggaaaatgattggtttggaagactttgttgcagataattacagcaaaataggaaaccaagtgctacctcctggagcttctcttggaaatgggctcacaccagaggcagcaagagaccttggccttctccctgggattgcggtcgcagcttcactcattgatgcccatgcaggaggactaggagtgattggggcacatgtgagagggcacggccttcatctgtgaggggcagccagtgacgtcacggctggctgtcatctgtggaacgtcttcttgtcacatggggatcagcaaagacccgatttttgtaccaggcgtctgggggccttatttctcagccatggtacctgggttctggctgaatgaaggtggtcagagcgttactggaaaattgatagaccacatggtacaaggccatgctgcttttccagaactacaagtaaaggccacagccaggatgccagagtatatattgcatatttgaacagtcacctgggatcttgattaaggaagggttcagcctgtggggttttcctttactgtttgattttacatgtttgggccagatttccatggcaaccggtctcccttagcagatctgacactaaagggcatggtcaccggattgaaactgtctcaggaccttgatgatcttgccattctctacctggccacagttcaagccattgctttggggactcgcttcattatagaagccatggaggcagcagggccactcaatcaagtactcttttcctatgtggaggcctcagccaagaatccccctttttgtgcaaatgcatgcggacattactggcatgcctgtggtccctgtcgcaagaggtgggagtccgttcttgtgtggtgctgctgttctgggtgcctgtgcctcaggggatttcgcttctgtaacaggaagcaatggcaaaaatgagcaaagttgggaaagttgtgttcccgagactaccagaataaaaaatactatgatagagaaatacccaagtattccctgaagctggttgaaccccagaaggagtatttggcgatcatgaatgatgactgaacagggcttgcaggtgctgatgccagaagcttctgtgccattgcattaaagacttctgtcatttgatcccatgttcaagacccttgaggtattgtttcatcatttctgtattgtctttcaataaagaaaacaaacatgtgcaaccagaaaaaaaaaaaaaaaaaaaaaaaaa

SEQ ID NO: 152582 - DNA, 581 bp, Homo sapiens
gcagcaacctcctggggagcagcccaaaccatctcctccccgatcctggacaagagcctcccagctgacatctctatcgaggaccagcagtgtcttgtgttccgtgatgtggcccctcaggctcctgtgcacttcctggtcattcctaagaagcccattcctcggattagccaggctgaagaagaagaccagcagcttctaggacacctactccttgtggccaagcagacagcaaaggctgagggcctgggagatggataccgacttggtgagtgacttttggcccttggtccctcacctatgaattctcattcctacttctcaatatgatcttcattcttcgacctctgccatgatcctgactccctaaccccaagctcaatttcagtgatcaacgatgggaagctgggtgcacaatctgtgtatcatctgcacattcatgtacttgggggccggcagctccagtggcctccaggttgaacctgccaactgattaaaggacaccagactctggatgcttggatggaaagggaaaaatggaccctgtgatgctaataaaactgttctcccttaaaaaaaaa

SEQ ID NO: 152583 - DNA, 719 bp, Homo sapiens
ttttttttttttttttaagggagaacagttttattagcatcacagggtccatttttccctttccatccaagcatccagagtctggtgtcctttaatcagttggcaggttcaacctggaggccactggagctgccggcccccaagtacatgaatgtgcagatgatacacagattcgtgcacccagcttcccatcgttgatcacaagtcggtatccatctcccaggcccctcagcctttgctgtctgcttagccacataggagtaaggtgtcctagaagctatagagagagcggagggacataggtggctgctggtcttcttcttcagcctggggtaatccgagggaatggggctttttagggaatgaccagggaaggtgcacagggagcctgagggggcccacatcacgggaacacaagacacttgctggtcctcataagagaattgtcagctggggaggctcttgtccaaggatccggggagaagatggttggggctgctcccccaggagttggcttgctggggccttggccactttcattcccatcagtcacacctgcagctcctcggacctgccccccgcgcactccccgtgtgacgccacgtgcatctgcgccgcgcgcaacccagcagccagcaccacggctgccgccatcttccctgagccgcgggaacctctcaccccgggtcacagctcggctccgcgaccgaccgtgggtg

SEQ ID NO: 152584 - DNA, 2077 bp, Homo sapiens
  misc_feature (1)...(2077): n = a,t,c or g
ctcttaatataactgtttattttcactgtgtaatgtgcaaagcaaaagggaaattatttggtggatggtagctcaaaattggaactcttgttctaattcagttacattggctttaccctccttagatttttcatcaaagggctgtcccattgcaatcttactaaaacattttgttaaaataaactcttttcctttttatattaataattaggcttttaaataaagatgttattcctttaaaatggtgggcttaccatcattgaagatgtcactcaggtggccttgtttgatcaaaactctcttttttataaaccaagctttaaaaacatgtttataggtttcatgaagcacatatatattgttcccatagtcttcagctttaaaactataaatatgcccaaattttgttatttgccctactttaagtaggtttattgtgtttgttttttcagtacttgcttttctctgataagactcaggaattctgaaatgtgaaattgtctcaattctttctcttgtagcatgaatcaaatgtatttattaatagcacttatgactatagaatataatttggcatatgattcatattacatatgtattcattttatttttaaaatagtttataaacttactgatttttttttacaaatgaggttatagatattaatgcaaattttctggtagggatctctttttttgctatgatgattccaacttatcagagacctcccatttgccttttcattacggtgaaagctttgccctcatctactaaagtacaaaggaattctttggaagcagattattctagtcttatgctagagatgaattttgatcattttaatgtgtgatctttttgctctatcaggtataattgttttcctttcctttataatgcgtaagttttctcacctttgagtaacagtaaagttcatttatatgtccatacctagaagaccagtgcaaatactttgagagcacctgggtctacaggacataattggcatctaaatcctcatttcttgctattagtaggaaaacagatatagtattgtaatacccttattctttttgaatcctaattactcatttcggttttttttctctcttttgaatctagttgctggttttcgtttaatgattttagtttaacaatcccaaccaacaatacatttgatttatttttttctgtctaacctgacaacctttttcttgtgcttcttggttggtgggtagtttttgtgaaaggaatcattgtttaagatcactgttttcatacttgttttacacttcacgtattttgaagtacatttatttactaagcatttgtgacttgaataatttcaccaaatgaatacattttggtagtttgtaatgagttcttctaattgttacactttgcttggtacttaacaataaatatgtaaaggtaaaagaaataattttctgtattctgccaatcttaattttatataataaatcatccatttttttcttaaaatagtatggattgactgtttctaaaataccaatctgtggctgtggtttttcttttcttcagcatttccagcatccaagtaaacaatagtcccttatagtcctgctacttgatgggtaaatttggttgctgggttttttaagttgcactcacaataaatcgtgcaaagcatttgtcatgccttatttactccatttttaatcctgcatcccagatttatggcagcaacacatatctacaggatacttttatgttgtccaaatattgctgtcagtcatatgtacttataaaatgtctccagtcatgtatatttatagaaatgaaatgtcaaatttctcagactgttaaagtgcagtataaagttgcttaatgcacacttaaaaatgatatataatttctgaatcctatgnaaaatgngttcttttttaattctttgggagttttcttaagttttacatgttttttggtttattgttaatgattttgtttactctttgccaaattttgtcatgtaggttattttacaatagcacctttaaaaaaaatgtatatgctaatttactaagcatattcatgtcc

SEQ ID NO: 152585 - DNA, 888 bp, Homo sapiens
ccatgtgcctctgggctcttgaattgagcctgcggatctgaagctcgggtgggagctgggtgctttcccgtgtcacgtgtggtacactgatctgcctttaacattgactttatcttagtctgaggaagatgatattgaaagaaggaaagaagttgaaagcatcttgaagaaaaactcagattggatatgggattggtcaagtcggccggaaaatattccccccaagtgagtgtgttctcagtgtcacgggggcaccccttgacagaggacacatcagctgacacgtttcttcccgcctcagggagttcctctttaaacacccgaagcgcacggccaccctcagcatgaggaacacgagcgtcatgaagaaagggggcatattctctgcagaatttctgaaagttttccttccatctctgctgctctctcatttgctggccatcggattggggtaggtgatgtgactgtgtgactcctgtcatggcatgtcgtggggcgattctgggttgcagtgatttattcgtaacctgtttcctgaagtccagatcatcagttacagcttggtgcattttcacaaacacccacgtagtctctgttcaggttcagaaacccaccagccttcaagcccccaaaggccccagcacaggcgccctgtggtgctgctgtctggcctgacgagtctgcctgttgctcactgaatataaacggagtcaaagcagggcttcttaggtctgacctctttgtcctgtgtgtaggtgaaagcagtctcatttctgtgtagtactgtggcgggaatgcacccagctctgctgtaggtggagggtctcagttacctgctgtacttcctccagacaggactgttgttctagtaactctcagcaatgaagg

SEQ ID NO: 152586 - DNA, 1197 bp, Homo sapiens
cctccgctcagtccgggagcgcacgtgggccgcggcgctccgacctccgctttcccaccgcccgcagctgaagcacatcccgcagcccggcgcggactccgatcgccgcagttgccctctggcgccatgtcgcagaacggagcgcccgggatgcaggaggagagcctgcagggctcctgggtagaactgcacttcagcaataatgggaacgggggcagcgttccagcctcggtttctatttataatggagacatggaaaaaatactgctggacgcacagcatgagtctggacggagtagctccaagagctctcactgtgacagcccacctcgctcgcagacaccacaagataccaacagggcttctgaaacagatacccatagcattggagagaaaaacagctcacagtctgaggaaggatgatattgaaagaaggaaagaagttgaaagcatcttgaagaaaaactcagattggatatgggattggtcaagttcggccggaaaaatattccccccaaaggagttcctctttaaacaccccgaagccgcacggcccacccttcaggcatgaggaacaccgagccgtcatgaagaaagggggcatattctctgcagaaatttcctgaaagttttccttccatctctggctgctctctcattttgctgggccatcgggattgggggatctatattgggaagggcgtcttgacaacctccaccagcaccttttggatgaaggaactgggagtcttgactttggttcgttagttggatttacttcttgagcttgccaacatagcttcactggaaggagctgttagatcctggggtggccacgtcacttgtgtttatttgttctgtaaatgctgcgttcctaatttagtaaaataaaagaatagacactaaaatcatggttgatctataattacacctatgggattcaataagcatgtcagactggattaatgtctactgtgaaaatttgggtagtaaatttttcatttgaaattagaaataaaatatctgaatataaataattttaatatactagtccatgatgtgtgttgtattttaaaaattatctgcacccttaattcagctgaagtactttatatttcaaaagaatgaataacattgataataaaatcgctactttaaggggtttgtccaaaataaatattgtggccttatatatca

SEQ ID NO: 152587 - DNA, 387 bp, Homo sapiens; identical to SEQ ID NO: 111677

SEQ ID NO: 152588 - DNA, 464 bp, Homo sapiens
  misc_feature (1)...(464): n = a,t,c or g
gaccggccgaattcccggtcaccacgcgtccggagattcaaagatcctggagtttgtggggcgctccctgccagaggagaccgtggacttcatggttcagcacacgtcgttcaaggagatgaagaagaaccctatgaccaactacaccaccgtcccccaggagttcatggaccacagcatctcccccttcatgaggaaaggcatggctggggactggaagaccaccttcaccgtggcgcagaatgagcgcttcgatgcggactatgcggagaagatggcaggctgcagcctcagcttccgctctgagctgtgagaggggctcctggagtcactgcagagggagtgtgcgaatcaaacctgaccaagcggctcaagaataaaaaatgaattgagggccccggacnnnnnnnnnnnnnnnnnnnnnnnnnnnnnnnnnnnnnnnnnnnnnnnnnnnnnatttaacg

SEQ ID NO: 152589 - DNA, 579 bp, Homo sapiens
atgcgccgcgccgcacgggcgatggccttcgggcctccccggccccagggcaccgcgcaggtccctttgctggcaccaagcccgagcctgagccggacccggggcccaagaggcctgtgcgccctgcgagcccttgagctccaggggaggaacatggagctgatccaggacatctctcgcccgccactggagtacgtgaagggggtcccgctcatcaagtactttgcagaggcactggggcccctgcagagcttccaggcccggcctgatgacctgctcatcagcacctaccccaagtccggcaccacctgggtgagccagattctggacatgatctaccagggcggtgacctggaaaagtgtcaccgagctcccatcttcatgcgggtgcccttccttgagttcaaagtcccagggattccctcagggatggagactctgaaaaacacaccagccccacgactcctgaagacacacctgcccctggctctgctcccccagactctgttggatcagaaggtcaaggtgagactgggcacagtggttcacacccgcaatctcagtactttgggaggctga

SEQ ID NO: 152590 - DNA, 589 bp, Homo sapiens
ggtctcctactaccatttccaccgtatggaaaaggcgcaccctgagcctgggacctgggacagcttcctggaaaagttcatggctggagaaggtgggcttgactggaggaaggagggtgtgaagccgaggggtggtggctataacgtacagcaaccctgtgtcggtgccccctgcccgcttctctagtgtcctacgggtcctggtaccagcacgtgcaggagtggtgggagctgagccgcacccaccctgttctctacctcttctatgaagacatgaaggaggtgagaccgactgtgatgcttccccccatgtgacacctgggggcaggcaccttacagggacccaccaaggccacccagccccgtccctgggcggctcccacagcaagcccggattccccatcctacctccctggcccaggcccccccactgcagccccacctggcagcaggctcggcacagctttcatcttctgcacctgagtcagctgcatgggtggccacggatcaaatacttagtcctattgcttatcctcaccaaagggtgtgccacccagggccacagtcatggaagaagaccatcccggtc

SEQ ID NO: 152591 - DNA, 2165 bp, Homo sapiens
ttttgagacagagtctcattttgttgcccaggctgaagtgcggtggcacgatctcagctcactgcaacctctgcccactgggttcaggcgattctcttgcctcagcctctggagtagctaggactacaggccctcatcatcctgcctggttaatgtttaagaatttttttaaagatttttagagatggggtcttgcaatgctgcaccaggttggtctccaactcctggcctcagcctccctagggtctgggattataggtgggagccaccctgcctaggcctctgcttttgctgagtcatcagagttttgttcattcccacagcagctctggcccctagtagcagctcagttcctcaatgggccgtgtttgtcctggagcccagatggactgtggccaggcaagggggatcacaggccttggctggcctgggcggtttccacatgtgaggggctgaggggctcaaggaggggagcatctccactgggtggaggctgggggtcccagcaggaagtggtgagacaaagggcgctggctggcagggagacagcacaggaaggtcctagagcttcctcagtgcagctggactctcctggagaccttcacacaccctgatatctgggccttgcccgacgagggtgctttcactggtctgcaccatggcccaggccctgggattttgaacagctccgcaggtgaatgaaaggtgaggccaggctggggaaccaccgcattagagcccgacctggttttcagccccagccccgccactgactggctttgtgagtgcgggcaagtcactcagcctccctaggcctcagtgacttccctgaaagcaagaattccactttcttgctgttgtgatggtggtaagggaacgggcctggctctggccccttgacgcaggaacatggagctgatccaggacacctcccagcccagccactggagtacgtgcaagggggtcccgctcatcaagtactttgcagaggcactggggcccctgcagagcttccaagcccgacctgatgacctgctcatcaacacctaccccaagtctggcaccacctgggtgagccagatacttggacatgatctaccagggcggcgacctagagaagtgtaacccgggctcccatctacgtacgggtgcccttccttgagttcaaagccccagagaatcccgttaaggatggagactcttgaaagacacacccgcccccacggctcatcaagtcacacctgcccctggcttctgctccctcagactctgttggatcagaaggtcaaggtggtctatgttgccgcgcaacgcaaaaggagtgtggcagtttcctactaccacttctaccacaatggccaaggttgcaccctgagcctggggacctggggacagcttcctgggagaaagttcattggttctgtagaaagttgtcctagcggattcctggtaccagcacgtgcaggagtggtgggagctgaaccgcacccaccctgttcttttacctcttctattgaagacatgaaggagaaccccgaaaagggaagatttcaaaaagatccctggagtttgggggggcgctccctccaagagaagaccggtgattttcagggttcagccacacgtcgttcaaggagatgaagaagaacccctatgaccaacttacacccaaccgttcccccaggaagttccatggaccacaggcatctccccccttccatgaggaaaaggcatggctggggactggaagacccaccttcacccgtggcgcagaatgagcgccttcgatgcggactatgcggagaagatggtcaggctgcagccctcagcttcccgctctgagctgtgagagggggctccctggggtcactgcagagggagtgtgcgaatcaaacctgaccaagcggctcaagaataaaatatgaattgagggcccgggacggtaggtcatgtctgtaatcccagcaatttggaggctgaggtgggaggatcatttgagcccagggagttcgagaccaacctggggcaacatagtgagattctgttaaaaaaataaaataaaattaaaaccaatttttaaaaagagaataaaatatgattgtgggccaggcagagtggctcatgcctgtaatcccagcaatttgagaagttgaggctagaggatc

SEQ ID NO: 152592 - DNA, 372 bp, Homo sapiens; identical to SEQ ID NO: 145972

SEQ ID NO: 152593 - DNA, 576 bp, Homo sapiens; identical to SEQ ID NO: 145973

SEQ ID NO: 152594 - DNA, 420 bp, Homo sapiens; identical to SEQ ID NO: 135894

SEQ ID NO: 152595 - DNA, 370 bp, Homo sapiens; identical to SEQ ID NO: 135896

SEQ ID NO: 152596 - DNA, 1773 bp, Homo sapiens; identical to SEQ ID NO: 135897

SEQ ID NO: 152597 - DNA, 399 bp, Homo sapiens
cgaaagcgaagaaggaagctcctgcccctcctaaagctgaagccaaagcgaaggctttaaaggccaagaaggcagtgttgaaaggtgtccacagccacaaaaagaagaagatccgcacgtcacccaccttccggcggccgaagacactgcgactccggagacagcccaaatatcctcggaagagcgctcccaggagaaacaagtcagtactgccccctgtacccatgaaaagatttgggtattctccattggtaatttggaaattcactcactctgcgtgatggtttctcaaacgcaaattgtgtccagtgtgcttctctaattggaagtatgaggagattgtttctgctgcatttacaaaactggcaggatcagcccagaggccgggcgcggtggctc

SEQ ID NO: 152598 - DNA, 605 bp, Homo sapiens; identical to SEQ ID NO: 135898

SEQ ID NO: 152599 - DNA, 1727 bp, Homo sapiens
ctgagcattccgtgtgtccagaggtagggttagcagggatagatggacttcctgcttattttctgttcacatttccactgaccttcaatcctgtagactgcaaagattgagccagctgagcccccaaagagactcagcagtgcagaatgtgggcctgagtgggaggactgcccagccgcacaccttccagctctgttcttcccgggccctggatgcttcttgccacgctgtcctctgaaatgacgctctgccccagcagacctgtgcgggcccagcacagggatcacattgtcggggtgacctggatcctacttgaagcctttgagctggactgtggctttatccctgaggccaggcttcatgtccagatggccatgccagaggttgacgtggcagagaaggagtgtgacacaggccagtggagcgagtggagccagcctgtgtgcttccaggctccccagagacaagacggcaccgaaagcgaaggaagctcctgctcctcctaaagccgaagccaaagcgaaggctttaaagcccaagaaagcagttgttgaaaggtgtccgcacacacacgcaaaaaagaggatccgcatgtcacccaccttcaggcggcccaagacactgcgactccggaggcagcccagatatcctcggaagagcacccccaggagaaacaagcttggccactatgctatcatcaaagtttccgctgaccactgagatcggccgggaaaaagaataaaaaaaacaacacgcctttggttcactgtgggtgttaaaggccaacaaggcaccagattcagacaggctgtgaagaaggctctatgacagtgatgtgggccaaggtcaccaccctgatttgtcctgataaagagaagaaggcatatgttcgacttgctcctgattatgatgctttggatgttgccaacaaaattgggatcatctaaactgagtccagctggctaactctaaatatatgtgtatcttttcagcataaaaaaataatgtttttcataagaatgacaacttaattagaatcaaatctataagctttaagattttacgtttctagtaagtataatattagcttatttgactagaactcaagcagaataggaatttatgcttgttttatattcaataatgataattttgaagatatagttgttttattacaccaaaaatactatattaatcttatttaactaagttttatccaaatcatgttaacttaagaaacatttgatcagttcctatatttctaggagtttggtgaatatttatttataaatgcttatttttttccaagccaagtttggaataggaggcacttttaggagggtttccataaatggaattttgtaatgctctctggagttaagaaaatatcacatatacataacgtacattaatagatacacaaacacaaatagagatttcatagctttcatcctgaaatttcagccatgaatcaggcataaatattctgatggttaatttcagacatctacttgatcggattgagagacacacatagctggtcaaacacgatttcagccatgaatcaggcataaatattctgatggttaattttagacatctacttgagtggattaagagacacacgtagctggtcaaacatgatttcagccatgaatcagccataaatattctgatggttaattttagacatctacttgagtggattaagagacacaccctgtatt

SEQ ID NO: 152600 - DNA, 1605 bp, Homo sapiens
atgcacttaattcctccagcaacaaattgtgacacacttgtggaatgttgtctaccagggaagctcactagagatttagtgtgcacggcttttactggatttgggaccagttactctccacaagaaaattcacacaaccacagtgctcttcatagttcaaattcacattcttctaatccaagcaataacccaagcaaaacttcagatgcaaatattttgtctcaaacaagcagacacaatgacagagactacagactgccaagagcagagactcacagtagttctacgccagtacagcaccccatcaaaccagtggttcatccaactgctaccccaagcactgttccttctagtccatttacgctacagtctgatcaccagccaaagaaatcatttgatgctaatggagcatctactttatcaaaactgcctacacccacatcttctgtccctgcacagaaaacagaaagaaaagtattacagcaactgtcaaaacacaacaggaaagtaatgattagaagtgcacttattaccagtatcattttagatcttctgtatattgaaaaggatttgagataccagaaaaatatagaatctacatcaggagacaaacccgtatcacattcttgcacaactccttccacgtcttctgcctctggactgaaccccacatctgcacctccaacatctgcttcagcggtccctgtttctcctgttccacagtcgccaatacctcccttacttcaggacccaaatcttcttagacaattgcttcctgctttgcaagccacgctgcagcttaataattctaatgtggacatatctaaaataaatgaagcccagccatctaatcagtctccgatgtctttaacatctgatgcgtcatccccaagatcatatgtttctccaagaataagcacacctcaaactaacacagtccctatcaaacctttgatcagtactcctcctgtttcatcacagccaaaggttagtactccagtagttaagcaaggaccagtgtcacagtcagccacacagcagcctgtaactgctgacaagcagcaaggtcatgaacctgtctctcctcgaagtcttcagcgctcaagtagccagagaagtccatcacctggtcccaatcatacttctaatagtagtaatgcatcaaatgcaacagttgtaccacagaattcttctgcccgatccacgtgttcattaacgcctgcactagcagcacacttcagtgaaaatctcataaaacacgttcaaggatggcctgcagatcatgcagagaagcaggcatcaagattacgcgaagaagcgcataacatgggaactattcacatgtccgaaatttgtactgaattaaaaaatttaagatctttagtccgagtatgtgaaattcaagcaactttgcgagagcaaaggatactatttttgagacaacaaattaaggaacttgaaaagctaaaaaatcagaattccttcatgataagtgcttccaaaactggcagcaccaagggcttattttttatgttagacatcaatgtcaatgttactacattctcggatgctaacataaattttgaaattgctcttgtgctttaa

SEQ ID NO: 152601 - DNA, 871 bp, Homo sapiens
gatagggaagtaattttatgaccttgggccattttcacaaagaaatgagatctaagtttcagaacttgactgtcttctttaaaacaccacattttacatgtttcaagacgattacctagattttggggggagagatgtggattagatttggagaccatctcaccagattttgacatttcaggttagtactccagtagttaagcaaggaccagtgtcacagtcagccacacagcagcctgtaactgctgacaagcagcaaggtcatgaacctgtctctcctcgaagtcttcagcgctcaagtagccagagaagtccatcacctggtcccaatcatacttctaatagtagtaatgcatcaaatgcaacagttgtaccacagaattcttctgcccgatccacgtgttcattaacgcctgcactagcagcacacttcagtgaaaatctcataaaacacgttcaaggatggcctgcagatcatgcagagaagcaggcatcaagattacgcgaagaagcgcataacatgggaactattcacatgtccgaaatttgtactgaattaaaaaatttaagatctttagtccgagtatgtgaaattcaagcaactttgcgagagcaaaggtaagtctttcactgaaatatatttttatgtttctcaggattatgattcttaaatcgaactaaagaatgtaaatcacattttatttatgaaatgtaaagttctcttcgatacattgatcacattctatcactgcattttcataagttaatatttctcgtgaaggataaagcctgtcgattttctcttaacccatgatgaatgcttcattagacttttctcataactccataagctgcaataatatattactga

SEQ ID NO: 152602 - DNA, 2511 bp, Homo sapiens
  misc_feature (1)...(2511): n = a,t,c or g
ttcagcggtccctgtttctccgtgttccacagtcgccaatacctcccttacttcaggacccaaatcttcttagacaattgcttcctgctttgcaagccacgctgcagcttaataattctaatgtggacatatctaaaataaatgaagttcttacagcagctgtgacacaagcctcactgcagtctataattcataagtttcttactgctggaccatctgctttcaacataacgtctctgatttctcaagctgctcagctctctacacaagcccagccatctaatcagtctccgatgtctttaacatctgatgcgtcatccccaagatcatatgtttctccaagaataagcacacctcaaactaacacagtccctatcaaacctttgatcagtactcctcctgtttcatcacagccaaaggttagtactccagtagttaagcaaggaccagtgtcacagtcagccacacagcagcctgtaactgctggacagggccaaggtcatggaacctgtctctcctcggaggtcttcagcgctcaagtagccagagaagtccatcacctgggtcccaattcatacttcttaatagtagtaatggcattcaaatggcaacagttgtaccacaggaattctttctggcccgatccacgtgttcattaacggctggcactagcagcacacttcagtgaaaatctcataaaacacgttcaaggatggcctgcagatcatgcaggagaagcaggcatcaagattacgcgaggaagcgcattaacatggggaactatttcacatgttccgaaatttgtactgaattaaaaaatttaagatctttagtccgagtatgtgaaattcaagcaactttgccgagagccaaaggatactattttttgagacaacaaattaagggaaccctgaaaaagccctaaaaaaatcccagaatcccccctccatggtgtggaaagatgtggaaataaattgccaccatggttttgaagaaaccaggaaacctgtaaaatcctgttgcccccccaaccctaaacatttttgagcctgccatttaaagtagacctttggacccgttaagcctgggccaaaggaaatgaccaaggggacggggtcctgtgagagtcaattccaggggaaagataccaagattgatttgtaaaaccccttgaaatgtagatttcttgtagatgtatccttcacgttgtaaatatgttttgtagagtgaagccatgggaacgccatgtgtaacagagcttagacatccaaaactatatcaatgctgaggtggctaaatacctagccttttacatgtaaacctgtctgcaaaattagcttttttaaaaaaaaaaaaaaaaaaattgggggggttaatttatcattcagaaatcttgctttttaaaaaattcagggcaagcgccaggcgatttgtgtttaaggataccattttgaaccatatgggcagtgtacaaaatatgaaacaactgtttccacacttgcacctgatccaagagcagtgcttctcccatttgttttgcagagaaatgtttttccatttcccgtgtgtttcccatttcccttctgaaattctgattttatccattttttttaaggctcctctttatctcctttcctaaaggcactgttgcttatgccactttttctataaccttttcattcctgtgtacagtagcttaaaattgcagtgattgagcataacctacttgtttgtataaattattgaaatcccatttgcaccctgttaagaatggacttaaaagtactgctggacaggcatgtgtgctcaaagtacattgattgctcaaatataaggaaatggcccaatgaacgtggttgtgggagggcgaaagaggaaacagagctagtcagatgtgaattgtatctgttgtaataaacatgttaaaacaaacaaaaaattgttatttttcttttccttcggtcagtgcacattaggcatttgaactacctgggggattctttatcagaactgttcttgttgaatatttatacttaattggaaataatncccttaaggggagggtttgttttaaaacgtattaacaggggaattgtgtatggaggatattttaatggaaataagaaattcaacaagaatgattaagtcacttcccaagtggttgtcatttgttaaaccctggtttacctgtcttgctattatgacatttcatttggaaggatgtttgtgttgtagctaactgttcaagtctggtgctgaactgctgttcttaagccatcacaaaacgctaaatttgtgtaattggagcttcctgctgttatctggaaatagcaggaaagcgcagctttgtatattgtttcctaaagtatattaaaataaaaaaaagaaactattgctaatataaaattaccttgactttttttttcctttgctgaaatattagtcacatagccttagcttcacactgccagtaatgtatcaaatcacaagggtttccgcatgaaaaaaaaa

SEQ ID NO: 152603 - DNA, 1038 bp, Homo sapiens; identical to SEQ ID NO: 137239

SEQ ID NO: 152604 - DNA, 2335 bp, Homo sapiens
  misc_feature (1)...(2335): n = a,t,c or g
atggggagaaaccagagcagaaaagctgaaaattctaaacacgaaagcacctattctcctccaaaggatcacagctcctcacaagcaatggaacaaagctggacagagaatggctttgagaagctaggcttcagaaggaaagaagccctgtattacttagatttgactgcttcatgccagtctcaggagcttttccagctgtatgccggcatgtccgtggtggggacgtccatgccggtgcaggccgtgtgtccctactgtggaaaccgcatcatcacggtgacgacctttgtcccgggtgccctcacctggctgctgtgtaccaccctcttcctgttcgggtacgtcctgggctgctgcttcctggcattctgcataaggagcctaatggacgtgaagcactcgtgtcccgtgtgtcagcgcgagctcttctactaccaccgcctgcggcagatggagctcgcgtcctccgcacgcaccgtcgtcgcccccagccggccctgtgctggcagagaggggagaggggacgccaatgggaagaacagctcccccactgctgggtcagccatgtcatctgagcctcccccaccaccacagccccccacccatcaagcttggagtcgggctgctggacacccctcggagccgtgagcgctcaccatccccctctgcggggcaacgtggtcccaaggcccactgcccactcgccggacgaggaccttctcgggngacggtgcggggcttcacagggccccgtctacaaaggagtcttgcaaatgcttctgccggtcccaaagggccattggcttcaattaccccccagctggatgggcgggccccgacatctttcctggcacatctcttgattgtggaaagggggagttattgttcccagtgggaagggcgacgagggtcaccctaataaaatgtgctcccatccccaccccaaagaatgaagaaagctgccaggcccgtgaaggtcgtccatcacctcaccctggcaccccaggcacccaagcatgagaccctggtcctggacatgtcatcagctccctaggaggattggtggaaagcacccctttgtccctgtgctttgtgggagactttgcggggaggaggcagcagacactggaggatgacattcttccacacgagacggggcttcagcggggcaatggtccctctcaagtatctcctggaggaaaggggtatgggggggcaggtgtggggtgtggggtgttcccggccatcagcacagcctatggaccattgcaacaacctctccaccatctgaagagcattaaaagcatttaaaaaggagaggtgcccactggtggctgagtggaggttccaaccccatcccagggagtggatcaagggttggtatttcttcccagcttgctcagacacatgggctcaacccacagaatccctcttcctcctggagctggaggccccagattcccagatctggccccctggcagcctgacagggaccttgcgtgacttctccaaggcaaatttccacctaagtgccccttgcgcctctcctggggcctgggcaaagcagttttctaattcttggcttggttggttctaggggagctggcttgaagtgggtggggaaaggcgggggtggcggtctttggattggacggatgttgccttttggtgcctttgcagtgggaggcggcatagctgcctgtctggggaagacagttctcccagcactcccacccctgggcacagcaggctggtactgggaggctgaacccctcttagagcctgaccttttcatctgccttctggttgtgtgaccatcactcaacagccatttcacagcccctgtaattatggcggcggcgggctggggtggtggtggtgggaagggcttgtggagaggacacaggctttgtttaaaaactttgtcccgatccatccagaaaagagtaggtagcttgcatcctgacagcctggcaaagtcaagaaagttgaaggagaaacatacctttggagagggggttttctttaaaactagtgttaagaaatgcttagggattttttttttttcttatttttcataactaaagctttcacccagagccggctctgtttgcactttgctgccgacattgcaaactttttggcagggtgggagactgagtctcattctgtcacccagggctgggagtgcagtggcccgatctcagctttactgcaacctcttgccctccagggttctgggcaattccgcctcagtctcctggagtaggctggggattacagggcatgcgccaccacacccggttaatttttgtatttttagtaggagaca

SEQ ID NO: 152605 - DNA, 411 bp, Homo sapiens
agcctgtaatgaaaggcagagcagaagcttcttgaatggccatcctgtgtggaagccctcagagatacaaatagcccattatcacaaaggagcacctattttatgttatcttggttccatcctctggccttgatggtatccaagggtgaagtcaaaaagaagggagaggtttggcggttcccacccctgtctccgtagccgcagggctgccggcagcttccatggccgaagaggcagcggaccaggttgggcgggcggccctggcctggctttgccccgctgggcggcgccggggattcggcggcgaagtgatgagggccctagttgcttctcgcccagacctcctaaccctgagtgcctcctcgggttgggccctagggtcagagggcagggtgaaagcttctgcggacg

SEQ ID NO: 152606 - DNA, 1240 bp, Homo sapiens
ggaattaagaggaggtctgggcgagaagcaactagggccctcatcacttcgccgcctaatccttttcgccgcccagcggggcagagccaggccagggccgcccgcccaacctggtccgctgcctcttcggccatggaagctgccggcagccctgcggctacggagacaggcaagtatatcgcgtcaacacagcgacctgacgggacctggcgcaagcagcggagggtgaaagaaggatatgtgccccaggaggaggtcccagtatatgaaaacaagtatgtgaagtttttcaagagtaaaccagagttgcccccagggctaagccctgaggccactgctcctgtcaccccatccagggcctgaaggtggtgaaccagggcctctccaaggacagccaaacgttaaccttgaaggcgaaagggagaaggaggcggcagcaggcaagagaaaggagagggcagagggcttgagcaaggactcttgattaaggtgtccctgggaagagacagcccaactccccagtgctccacagggctctcgggcagcccccacagctgcatctgaccagcctgactcagctgccaccactgagaaagccaagaagataaagaacctaaagaagaaactccggcaggtggaagagctgcagcagcggatccaggctggggaagtcagccagcccagcaaagagcagctagaaaagctagcaaggaggagggcgctagaagaggagttagaggacttggagttaggcctctgaggcctttggggaatagggaatggactgcagaacaaaccgtggggctctctggggtctgggggaatacgggcaacagcagtcaggaggggtaccccccatactggcttacttccacctcctgcggcccagctctgtcctcacagagcctagcgtctccctcaatccttcccttttcttcccaacttctactttttggactttccccctcccattccccagtgttcaaaatctcagtgactacccccaggtacctttgctgctgatttgggtgtcttgtttaaaagaaaatcaaggtgggtgggaatctcttggagaactgaggctgagggtagagggagtatgcccaagtcttggagtcttggttcctgttcgcggtgtttatgggttatttccctctccatccctcatttttttttttttttttaaaaaaagcaaaaatgagaataaacacaagtagacatgtaaaaaaaaaaaaaaaaa

SEQ ID NO: 152607 - DNA, 411 bp, Homo sapiens
  misc_feature (1)...(411): n = a,t,c or g
cccacgcgtccgcccacgcgtncggaggaaagaacaattgaaactgcaaaagggattaatggaactgtaaattatgatagtgtcaattctgacaactctaagccaaagatatttaaaagtcaaatagagaacataaatttgaccaatggcagcaatgggaggaacacagagtccccagctgccattcacccttgtggaaatcctacagtgattgaggacgctttggacaagattaaaagcaatgaccctgacaccacagaagtcaatttgaacaacattgagaacatcacaacacagacccttacctccccctccttcttcccaaaggctgccaccacctcctcctcctccccctccttcactcccagagaaaaagctcattaccagaaacattgcagaagtcatcanaca

SEQ ID NO: 152608 - DNA, 454 bp, Homo sapiens
tcccggttcgacccacgcgtccggcaaaaacagcaggagggatacgatggaggacccaattttattaccaaagtctggcaaagaggaacacctagctcttcaccttatgtatctcccaggcactcaccctggtcatccccaaaactcctcctccccctccttcttcccaaaggctgccaccacctcctcctcctccccctcctccactcccagagaaaaagctcattaccagaaacattgcagaagtcatcaaacaacaggagagtgcccaacgggcattacaaaatggacaaaaaaagaaaaaagggaaaaaggtcaagaaacagccaaacagtattctaaaggaaataaaaaattctctgaggtcagtgcaagagaagaaaatggaagacagttcccgaccttctaccccacagagatcagctcatgagaatctcatggaagcaattcgggg

SEQ ID NO: 152609 - DNA, 407 bp, Homo sapiens
  misc_feature (1)...(407): n = a,t,c or g
cggacgcgtgggcacttgcctccctgcctgcttctggctgccttgaatgcctggtccttcaagctccttctgggtctgacaaagcagggaccatgtctacctttggctaccgaagaggactcagtaaatacgaatccatcgacgaggatgaactcctcgcctccctgtcagccgaggagctgaaggagctagagagagagttggaagacattgaaccttacctcctcctccccctccttcttcccaaaggctggcaccacctcctcctcctccccctcctccactcccagagaaaaagctcattaccagaaacattgcagaagtcatcaaacaacaggagagtgcccaacgggcattacaaaatggacnnnnnnnnnnnnngggggggcccgtttaaaagaaccccn

SEQ ID NO: 152610 - DNA, 3635 bp, Homo sapiens
atggatactaatgatgaccctgatgaagaccatcttacaagttatgatattcagctaagtattcaagaatccattgaagccagcaagactgcactttgtcctgaaagatttgtacccctaagtgctcaaaacagaaaacttgtggaggccataaaacaaggtcacattcctgagctccaggagtatgtaaaatataaatatgcaatggatgaagctgatgaaaaaggatggtttccattgcatgaagctgttgttcaacccattcaacaaatacttgagattgttctggatgcatcctataagacactctgggaattcaagacctgtgatggagaaacacccttgactttggcagtcaaagctggtctggtggaaaatgtaagaactttattagaaaagggagtgtggcccaacacaaaaaatgataaaggagagaccccccttctgattggtatttgtgttaatatacttactgttgtttttaacaatcattttcaagctgtgaaaaagggctcctatgacatggtgtcgactctgatcaaacataacactagcctagaccagccctgtgtcaagcgatggtcagcaatgcatgaagcagccaagcaaggccgaaaagatatcgtagctctgctgctgaaacatggaggcaatgtccacctgagagatggatttggagtcacaccactaggcgtcgctgccgagtatggtcactgtgacgtgttagaacatctaatccacaaaggtggtgatgtgcttgctttggcggatgatggggcgtcggtgctgtttgaggcagcaggaggtggcaatcccgactgcatttccctcctgctggaatatggaggaagcggaaatgtacctaaccgagcaggacatcttcctatacaccgagctgcctatgaggggcattatcttgcactgaaatatcttatcccagtaacatctaaaaatgcaattcggaaaagtgggctaacaccaattcactcagcagcagatggacaaaatgcacagtgtctagaactgctcattgaaaatggttttgatgtcaacactctacttgctgaccacatttcccagagctatgacgatgagaggaagactgcgctgtattttggcgtttctaataatgacgttcattgcacagaagtccttctggctgcaggtgcagacccaaacttagatcccctcaactgtctacttgttgcagtgagggccaataattatgaaattgtcaggctgcttctctcccatggagctaatgtcaattgttattttatgcatgtgaatgacactcgtttccccagtgtcattcaatatgctctaaacgacgaggtaatgctgaggctattgctgaataatggctatcaagtggagatgtgctttgactgcatgcatggtgacatctttggaaattcatttgtgtggtcagagatacaggaagaggtgctgccaggatggacatcttgtgtaataaaagataacccggacctggagtcttctaaagtgacagttgtcatgaccctgaggagggaaccataccaaggagatcgctgtcttgggtgctcaccttccacatcattcttcttaatactacagcgaacaactctgtccaaacttgtcagaccaacactcggggtttcaggacagagaaaaggcctttccagcgaagacctatttgaaacagctccttctgggtctgacaaagcagggaccatgtctacctttggctaccgaagaggactcagtaaatacgaatccatcgacgaggatgaactcctcgcctccctgtcagccgaggagctgaaggagctagagagagagttggaagacattgaacctgaccgcaaccttcccgtggggctaaggcaaaagagcctgacagagaaaacccccacagggacattcagcagagaggcactgatggcctattgggaaaaggagtcccaaaaactcttggagaaggagaggctgggggaatgtggaaagctgtctgtagttgccaggcatgatgagcaggaacttgctgatggagggtgcaaatccaattcccacaacagggaaaatcttcgagcagctgttgggtggctgggggagcaaggtagttgcgttgcagaagacaaagaggaaagtgaagaagagcttatctttactgaaagtaacagtgaggtttctgaggaagtgtatacagaggaggaggaggaggagtcccaggaggaagaggaggaagaagacagtgacgaagaggaaagaacaattgaaactgcaaaagggattaatggaactgtaaattatgatagtgtcaattctgacaactctaagccaaagatatttaaaagtcaaatagagaacataaatttgaccaatggcagcaatgggaggaacacagagtccccagctgccattcacccttgtggaaatcctacagtgattgaggacgctttggacaagattaaaagcaatgaccctgacaccacagaagtcaatttgaacaacattgagaacatcacaacacagacccttacccgctttgctgaagccctcaaggacaacactgtggtgaagacgttcagtctggccaacacgcatgccgacgacagtgcagccatggccattgcagagatgctcaaagtcaatgagcacatcaccaacgtaaacgtcgagtccaacttcataaccgggaaaggtgatccttgccatcttgagagctcttcagcacaacacggtgctcacggagctgcgtttccataaccagaggcacatcatgggcagccaggtggaaatggagattgtcaagctgctgaaggagaacacgacgctgctgaggctgggataccattttgaactcccaggaccaagaatgagcatgacgagcattttgacaagaaatatggataaacagaggcaaaaacgtttgcaggagcaaaaacagcaggagggatacgatggaggacccaatcttaggaccaaagtctggcaaagaggaacacctagctcttcaccttatgtatctcccaggcactcaccctggtcatccccaaaactccccaaaaaagtccagactgtgaggagccgtcctctgtctcctgtggccacacctcctcctcctccccctcctcctcctcctccccctccttcttcccaaaggctgccaccacctcctcctcctccccctcctccactcccagagaaaaagctcattaccagaaacattgcagaagtcatcaaacaacaggagagtgcccaacgggccataccaaatgggacaaacaacgaaataagggaacaaggtcaagaaacagccaaacagtattctaaaggaaatataaaattctctgaggtcagtgcaagagaagaaaatggaagacagttcccgaccttctaccccacagagatcagctcatgagaatctcatggaagcaattcggggaagcagcataaaacagctaaagcggatgacagaagtgccctgtgatgaccaaatgctcgggcaatgtagggtgactgccgccaatgagccaaaatacaatcacatgcatcagagtcagaggctggctcctcaaaacaagccagcttttctggttagagatggacataggatgttggcggcatctatcaacacccagatgatatga

SEQ ID NO: 152611 - DNA, 396 bp, Homo sapiens
gaggacacttcccttgtgccctcaaatcagttgtccctccagatgagaagcactggaatgatctggctttggaatttcactatatgaggtgggtcctggcctcattcatctctatgagaaagatccagagaagaatctagaaccctggtttagattttgtaccaagagctacagcatggcctctctatatttagttaatctgtgtctaacagacatgtgctccctttcaggcctttactgtctttgcttgctctttccccaccatcctaatttctcagactcatcattccatttaactttcttctttagtccttaagccttatcagtttttagaatccaggattcttcatccttgttgaagaggccatgctctgtctgtactgagggctctgtctg

SEQ ID NO: 152612 - DNA, 6543 bp, Homo sapiens
  misc_feature (1)...(6543): n = a,t,c or g
atgatttcttgcctgtgataacctatgcactccacaaagatgaactctctgagagggatgagcaagagcttcaggaaatccgaaagtatttctcctttcctgtattctttttcaaagtgccgaaactgggctcggagataatagactcctcaaccaggagaatggagagcgaaagatcaccgctttatcgccagctaattgacctgggctatctgagcagcagtcactggaactgtggggctcctggccagggatactaaagctcagagcatgttggtggaacagagtgaaaagctgagacacttgagcacattttctcaccaggtgttacagactcgcctggtggatgcagccaaggccctgaaacctggtgcactgccactgccttgacatctttattaaccaggcatttgacatgcagcgggacctgcagatcactcccaaacgtctggaatatactcgaaaaaaggagaatgagttgtatgaatcattgatgaatattgccaaccgaaagcaggaggaaatgaaggatatgattgttgagacacttaataccatgaaggaggaacttctggatgatgctactaacatggagtttaaagacgtcattgtccctgagagtggagaaccagtaggcaccagagagatcaaatgctgcatccgacagatccaggaactcatcatctcccgacttaatcaggcagtggctaataagctgatcagctcagtggattacctgagggaaagcttcgtcggaaccctggaacgatgtctgcagagcctggagaagtctcaggatgtctcagttcacatcaccagtaattatctcaaacagatcttaaatgctgcctatcatgttgaagtcacgtttcactcagggtcgtcagttacaaggatgctatgggagcaaatcaaacagatcatccagcgcatcacatgggtgagcccacctgccatcactctggaatggaagaggaaggtggcccaggaagccattgagagcctcagcgcctccaaattggctaagagcatttgcagccaattccggactcggctcaatagttcccacgaggcttttgcagcctccttgcggcagctggaagctggccactcaggccggttaggagaaaacggaagatctatgggctgagggttcgggaaagatcatgctccccgcctggcccgcctttctctggaaagctgttcttttacaggatgtctttgcnttcatcgtaaaccctaaactgggacaggaactgggccggggccagtatggtgtggtatacctgtgtgacaactggggaggacacttcccttgtgccctcaaatcagttgtccctccagatgagaagcactggaatgatctggctttggaatttcactatatgaggtctctgccgaagcatgagcgattggtggatctccatggttcagtcattgactacaactatggtggtggctccagcattgctgtgctcctcattatggagcggctacaccgggatctctacacagggctgaaggctgggctgaccctggagacacgtttgcagatagcactagatgtggtggagggaatccgcttcctgcacagccagggacttgtccatcgtgatatcaaactgaaaaatgtgctgctggataagcagaaccgtgccaagatcactgacttaggattctgcaagccagaggccatgatgtcaggcagcattgtggggacaccaatccatatggcccctgaacttttcacagggaagtacgataattccgtggatgtctacgcttttggaattcttttctggtatatctgctcaggctctgtcaagctccctgaggcatttgagaggtgtgctagcaaagaccatctctggaacaatgtgcggaggggggctcgcccagaacgtcttcctgtgtttgatgaggagtgctggcagttgatggaagcctgttgggatggcgaccccttgaagaggcctctcttgggcattgtccagcccatgctccagggcatccatgaaatcggctctgcaagtccaaattctgagcagccaaacagaggactagatgattctacttgaaagcaaagaccctttcctctttcactctcctagttatttcccttccccctcaccttttggcccatggggagaatttgacatttattcactataggacacaactcccaaggnaaactggtgcttgctggggaaacttggacccttcccaggcagggatgactccctggaccagtgaaggagttgaatgactgagcatattcagcagctcactgaagcccccaagctatcccctttagcaaaaaagtgtctcagatgtgtaaaagctgaggaatgtggtgttctggcttcacaaatgaaaaggaggcagatgttacccattgtccttttcactgtatatacctcctaagaccagcaaccgggacacctgcagtggccaatagtgttaaaaaatcctcattcctcatgatttttggctcctagcctaggaatagtttagtcaggacctcagaaaatttgagccttagttctgggattatgaaaacatggggacaaaaacaataacttgtggatgtctggttccctgctgtctgcagcccaggtatctcaggttgcaatggtcagaagtcccagtgagggagctagaaacagagctatctgttcctcatagtgccagtgtgtttacatttataggaccacatatccctggtttctgggggagggtttcactgttacatcaccaagaggccctgaaaagaggaaaaaaaaaaaaaaagaggccaggcatggtggctcacgcctgtaatctcagcactttgggaggctgaggcgggcggatcacaaggtccagagttcaagagcagcctggccaacatggtgaaaccccgtctctactaaagatacaaaaaattagccgggcgtggtggtgcatgcctgtaatccaagatactcaggaggctgaggcaggagaatcgcttgaacctgggaggcggaggttgcagtgagccgagatcatgccattgcactccagcctgggtgacagagtgagactctgtctcaaaaaaaaaaaaaaatagaatgtgtatgcatatatttgtgtgtatatgtatatatgtgtgtgtgtctatatctctatctatatagacatacacacaggagttattggatttagagttactgctaaccccagaacagaatctgttcttttacctttgagtcttttcttttgtttacctcttttcatctcaaagtgggaaagctccagataacatggtacttaggagtgagtgtctaagcaaaaccaacccaatgcgaagtatttgggtgagaactgagaggtgggagatgattggaggccatggcctatgtacaaacatactggaagaaaaccagcttgtttttaaaacttaacacaatcagaaatttttctttttgtgtttgaatctaacacactgacgtttggaaaacttgatcaatgagcttttaaccacgatttctcccgcaatttgttccttctttttacctttttaaaaatctgttagaagaaaaaaagcagcagacgaaagagaaaaaccctcctctggtagttctgtgtgtgcccctcacccctgtgtgctagtgtctgtgaagtttccctgaaaggtgggaggcgggtgggtggtcttttggagggttcctcatgaagtgtgcttgaggaaagaaattctgattctaggcagaggaaggggaacaatttaaatattggtgcatctcagatgcacttgacttcaagccttcctcaaccaaactggtccattagattccgaaaaacaggtagacgaggaagtagacagtggaagtgagtagtctccctccatctgcctaatccccaataactgtggtctggcccctgtgttcagccccagagtttgtaaaacaggtccccaggtaggtgtataagatgagttgcaaattagccgggcatgctggcacgcaccagtaatcccagctacttgggaggctgaggcaggagaatcacttgaacccgagaggcagaggtcatggtgagccgagatcacgccactgcactccagcctgggcaacagagcgagactctatcaaaaaaaaaaaacaaaaaaaaaaaacaaaaaacaaagatgagtcgcacatctgctgctgggattttctagggttgtctatgacagaatgaccatcttttaaatattaatggagtataaatggagtctataatgggtctttcatataacttttaactctttggctatcctgggctctgatcatgatatgtttgagcatagtagctccctaaactcttggagcctttcagaaattccatgtagtgctaataacctttttacttgcaaatgataaagtaactgactcagtgtctttgggctctgcaggctttagccttgttttggtaggatgttcagtatattctcagaatttttaccacctatttagctatacttcaagtactctattctctgcactaacttactgtccttctgggaactatgatggggcttcaagggagtcaggtgtcaagaaaggaggggtaagtactctctacttgctggaaaatcattgtaagtctgttgtgtatgaaattttaggaaaagtcttatatagttccctttccagactgttttcttttgactctaactataatcataagtctgtgcttccattatgaaggtcacattcctagcattcttgggaagtattagctcatactctcattcacatatgggaggttagatttttttcctctacccagagtccctttttagtttaccccacggcttagtttgctgtcagataccagttctctagcagattccccaacagttttttccccagtggggagggtggaagggagggactgatataagtaaggagatgagtagttgtgttacagttcattttctttaaaaaaaagtactttgagaaaaggtgcaaaatattcttgaaagtctctaggccagccaaagtccacatatggatatttggggatgttatttaaatactcagcaggctgagtgcaggtatacgtgtgtatagagtgtgtatactttgcttttgttttataacattgtcagctaattttggctttgttctttggcatccattcttattataagtgatggaatgccatgaaatgtactgtattgtatattacttgggaggacactaggttttcaaagaagtctggcagcacttgggttatagagggctcagcatgaccaaagtcctaaagattttacctcccagctttggttgtatgtgttcccaagtggtgaggtgagattgtggctggaggaagaaaaaggatggcatgaaagaatgacccttattgtggtctgtccttctaatcaacataattagggcagcttaccccaacatgaaaatgatgacctggccatttttaatggccagagcttgaagtctggtctctcattttgtttcagaaatgagtgagaggccttcctgcagagcagtcaggagaaatggtggagcctggggccctggaatggctgaccctgtgcctagagagctgatggcaagggctgtctggcatggctcatttgggtggggtttccccaggcataccttagttccctgatcctctgcaaagagtagctcattgactgagcaagcgcttcaggaggactgtgctggttgttcccagaccaaagagagtcacttttgactccatcaacttcaaggggacagagcctaggcagcagattctcctaatttttaacactaaaattcaaggaagcagtggaggaaagaatgcattactaccacacgatagaaataggggactcatagaactctcgactagtacctgtcagctctcaaatgcattcttgtgtctttgcttgagctgccaaaggaagggtcacaaagtgttcttcctcatggaagaagtgcctcgggggttgcagggctgcaatagtgacaactggcactggaatggacactttatttttttggctttggcttatttatttaggcactggggagggcccagggggaatttggtggatttacagttaggcactttggggaagtttaaagccccctttgggctttgttttgggagagatgatggcatgcttggtattcccatttggataatcagggaagcctccctagtccatccatattgtgtcagagtgggattaacaaccctggaagagtccactgccaaaagagtagttgctttcctggaatttccaaagcttttggattttctggatcaagtaacccactttttaaaacctgaggtcaggagttcgagaccagcctggtaacatggtgaaaccccgtctctattaaaaatagaaaaaattagccagggcatggtggcgggcacctatagtcccagctactcaggaggctgaggtaggagaattgcttgaacccaggagacagaggctgcattgagccaagatcacaccactgcactccagcctgggcagcagagcaagactccatctcaaaaaaaaaaaaaaaaaaa

SEQ ID NO: 152613 - DNA, 1539 bp, Homo sapiens
  misc_feature (1)...(1539): n = a,t,c or g
ggggcccgaggccgtccctcaccgggcatgttccctctggctgcccactccctcagggcccacatgtcctgccactcgccactctgagcacgagttcaccttccagatgtggccagggtgtgccagctcctctctcctgtgcgttggaaccccgggggaggcaagagcagatcacaggtgcatgagggttacacccgttcacctgggtctgccgggatgggttgggggggcaggtgccaggcctcactgctgtgaatctgccacgcctgggggtcctagaggctgccccaccccagtgattgggtagcagctcacatcccacccagctttcacaagtgagggaacccagggtgcattcggggagaccctcgggggcttctgtggcctctgtgcccgatgacctgcgtggcttcagacaaggccccagcgttactgggctcagcttgttgttctgtgtggagcgtgaggtgagaaaacccctctgaaaagatgtggtcggggccacgcttcccactggttctgcagtgaggagttggggcgggtgagccaaagcggccccccatggtgtctacctgaggggcagggaaccgcctgcctgtgcactcacgccaccccccagcccacaaagagcccatctgagagaaggacgtggtggagccaggacgggaaagcgtcctgtcggctggccatgctgttgcttgcgtctcgaatcttcggttctcgaggaagtgttgacagtgtgatgctaatgtctgcttttcttggcgttgggtagaagcaggacatctgtgtgtatgtgcgtatttaaattagattatttataataaccagagccagccctcgcgctggccaggatcctcctgccgagctgatgtcgctcctgccctctgccggggtccggaagcgacatctcaggaggtagctctcagcagagtgaggattcctgcctttcgtagagttttgtgtgactttttaaattattcatgtgtcccttaaaagtttcactacgtgggagaaaattccagcaccaagtgttgtggcaacaagctgagaagangtgcaggcaccactgtgttgtgggcttgttgaccgggaaatggtgtcaacccttgccaagggaacttcttctcctcgcgggggaacttgggaatggcccatcaagacctttctagggtctgggctggggtccatccctaaggtaatgggtgaccgtcccctgaagacataagcgagggtaagattcaagccatcctcaccctaaagacttgaggtccccacccaaggccaagccggccccccgtaccccttgccctgggaagcaaaccgcccaggacgcagcctcccacgcccgcaccctgccacattcaagccctgcccaaggaaggaacacatgacccttctgtctgtgactgttgcttgagtctctgtctcatgtcgtagaattgtggataattgtctagtgaccctctcatcactgtaaccatcgcgcctggcctagaatgtcgtgttttggatgctgtggtttcaataaatgcctct

SEQ ID NO: 152614 - DNA, 1551 bp, Homo sapiens
  misc_feature (1)...(1551): n = a,t,c or g
aaaaaacagcagggttagcttgtccctcccctccctcttcagcttcccagacactgattctggaatgaaaattcacctgcctctgagttggctcctaatgggggtgggagtgttacttcggttcccaggttggaagattatctcacccggccccagctatataagctgaccggtgtggaggggcccagcagggccaactccagggattccttccacgacagaaaaacatacaagacttccttcagccaacatgatggtactgaaagtaggaggaactggtcactggaaagaagaatggcaattggggaggcaggggaattccttcctgaggatttcagagatggagagtattaagctgctgttactttaggagaggcaggaggatctgaagacacttctagcccaccctgttacccttggggagccacagttgagaaagcgagaaacacacgagagagcagagctcaaaaagaaaaaactagaacaaagatcaaagcttgaaaatttagaagaccttgaaataatcattcaactgtaggaaaagggaaaaaatccagggaaactaaagttccagttttaaaggacccagaaccctgaattcattacgggacctgctgggagtgccctacgttcctgaaggcctcctctgggagaataacctgccagtagtagaaaaattcttgtcagacaagaacaatccagatgtttgtgatgagtataaacggacagctcttcatagagcatgcttggaaggacatttggcaattgtggagaagttaatggaagctggagcccagatcgaattccgtgatatgcttgaatccacagccatccactgggcaagccgtggaggaaacctggatgttttaaaaattgttgctgaataaaggagcaaaaattagcgcccgagataagttgctcagcacagcgctgcatgtggcggtgaggactggccacttatgaagntgcgcggagcatcttatcgcctgtgaggcagacctcaacgccaaagacagagaaggagataccccgttgcatgatgcggtgagactgaaccgctataagatgatccgactcctgattatgtatggcgcggatctcaacatcaagaactgtgctgggaagacgccgatggatctggtgctacactggcagaatggaaccaaagcaatattcgacagcctcagagagaactcctacaagacctctcgcatagctacattctgaggcaaacgtcagacttctttaatcagtaaatgttcactggcattttgaaggcatggcccaagagaagagacactagccataaaatctagtttctatttatcaacgtgttgtgaagatgtacctaatgaagttttgagaaagcacagggttataggggtttaaatttcctttagggaaactcttatttatttttatggattcctgtttatttatttactgccacgctactgatattcaaaccttcatgatcatccatctggtgagcagagcttcatttgtatataacactttcagagccttcccacccataggtagttcttaaag

SEQ ID NO: 152615 - DNA, 428 bp, Homo sapiens
atgcttacgggatcacctggcacgctctatgatccgtactgactggggaggaggtttacctcgcggtgtctctttcagccgcaacgtactccgggtcggccttgcgctcggggcctgagaggggcggcggcggggtcaggggccgcacaaataatgaaccagcagtggaagagaaaatactgtaagctggctgactgctggtgaagaaaatgctttatttttgtggcaggcatctgtgggatctgtaataaaaatgatggctggctgtggtgaaattgatcattcaataaacatgcttcctacaaacaggaaagcgaacgagtcctgttctaatactgcaccttctttaaccgtccctgaatgtgccatttgtctgcaaacatgtgttcatccagtcagtctgccctgtaagcacgttttctgctatg

SEQ ID NO: 152616 - DNA, 444 bp, Homo sapiens
gagcgagagaagagaaagcagcagcaagagccactccggaaaaaggcaaaaatgcagactgtacgccctggcttcgatctgacccaaggcccaaactgtctgaccccacacgggaaaacatggagcaggctaccgccgaaaaaccatcgccgcccctacacctcgaggccagaaggtccccgggtaaaggcctaaaaccacggcccagaggggaggagagggacccgcctgccacccgaggcagcgaagcgggctcaggcggaagaggctgcgcagtaatggccgacccggagtacgttgcggctggaggtgacaccgcgagctatgcctcctctccccgagtgaggatcctagagtggccggcgttcaccctgctcccccgagagggcctcgctccgactcccacctctccggccacagctgcggccacacgaaatcgtcacg

SEQ ID NO: 152617 - DNA, 819 bp, Homo sapiens
atgactaaatggaaaagcaatcctcaaattcatatggaattgcaaaggaccctaagtaacccaaacaatcttgaaaaatccaatgtcaaaacttactacaaagctaagatctttgacgataacctcatacagctgacctttcaacaacacaggcaagaccgagacactgagcaggagaaaaaaaaggaggaagagcgagagaagagaaagcagcagccagagacactccgggaaaaggcaaaaatgcagactgtacgccctggcttcgatctgacccaaggcccaaactgtctgaccccacacgggaaaacatggagcaggctaccgccgaaaaaccatcgccgcccctacacctcgaggccagaagccggggccgcgccagcccaagggcgtccatctacgtaccggcccctgaccccgccgccgcccctctcaggccccgagcgcaaggccgacccggagtacgttgcggctggaggtgacaccgcgagctatgcctcctctccccgagtgaggatcctagagtggccggcgttcaccctgctcccccgagagggcctcgctccgactcccacctctccggccacagctgcggccacctcgcagtcttttctctctggcctcggagcccgcagctgccgggaacgcgcgcggccgtcacagtgtgcttgctttgtattagggcccagaggctctgaaagagtgcagttccaacagaaagagatttggggtggaggaagtaaaacgtgtgtaggaccagcaggtggtgctgctcaaaaatccagctttgctatcctgaggaagctctggggcgcctag

SEQ ID NO: 152618 - DNA, 2608 bp, Homo sapiens
gagacaggggcagaacgatgaggcgccggagttagctcgccggtgcgggtgcgggtgcgcggcgcgtcgcggcccctcctccgcgacgcgccgggtggtcacgtgacggccgcgcgcgttcccggcagctgcgggctccgaggccagagagaaaagactgcgaggtggccgcagctgtggccggagaggtgggagtcggagcgaggccctctcgggggagcagggtgaacgccggccactctaggatcctcactcggggagaggaggcatagctcgcggtgtcacctccagccgcaacgtactccgggtcggccttgcgctcggggcctgagaggggcggcggcggggtcaggggccgcacaaagaaatgaaccagcagtggaagagaaaatactgtaagctggctgactgctggtgaagaaaatgctttatttttgtggcaggcatctgtgggatctgtaatagaaatgggatcttcaatattcatgttattttctcctttggtcttatatgattgttacctttatgaagctttagtgattacaaagcactttttttgtccatttttacctgagctttgtaaactctgatttgcaggatggctggctgtggtgaaattgatcattcaataaacatgcttcctacaaacaggaaagcgaacgagtcctgttctaaatactgcaccttctttaacccgtccctgaatgtgccatttgtctgcaaaacatgtgttcatccagtcagtctgccctgtaagcacgttttctgctatctatgtgtaaaaggagcttcatgggcttgggaaagcgggtgtgctctttgtcgacaaggaaattcccgagggatttccttggacaaggccaaccttgttgttcaccaggaaggaactcaagggcaggcaagtaggagggaaatggtgaatatgcatgggtattatgaaggaagaaatgggtgggtggcaggacgatggagcgcactagtaggagagctggaagatgctttttccaaagggtaaaaagacaactgaaatgttaattgctggctttctgtatgtcgctgatcttgaaaacatggttcaatataggagaaatgaacatggacgtcgcaggaagattaagcgagatataatagatataccaaagaagggagtagctggacttaagctagactgtgatgctaataccgtaaacctagcaagagagagctctgctgacggagcggacagtgtatcagcacagagtggagcttctgttcagcccctagtgtcttctgtaaggcccctaacatcagtagatggtcagttaacaagccctgcaacaccatcccctgatgcaagcacttctctggaagactcttttgctcatttacaactcaggtggagacaacacagcttgacaggaggtcataggggagaaggagaagaagatcatggaatcaccatctttcagggcagggtaccaggcaccagacacctccattgaagaaactgaatcagatgccagtagtgatagtcccggatgtatctgcagttgcctgcacagcactccttgacccaacagagacttttggtttctaatgcaaaccagacagtacccgatcgatcagatcgatcgggaactgatcgatcagtagcagggggtggaacagtgagtgtcagtgtcagatctaaaaggcctgatggacagtgcacagtaactgaagtttaaataaaaatgtcttcagctccatgctcaaggttgaaagggttaccatgtaaatttrctgccccacataaacattatactcatccctagtagtggcattttgggagttggggtgggaaggggtatgggaaggattagactcataattaaaatcgtctaacatgtctcttmttgagaaatttattttaatgtaaggaacttgggtgttaatagttgagagctcgtttagtaataacccagttttcctggaggttccgtttacctttatactttttaaaaacttcrgttagttcttttggcccagtgtgtttgtattatcctgtgccattaatggtcctcatctgactcctgccattgtgtcttatttttctgcatggattggcataagacccattactaaaatttggcacctgtgagatgttttaatattatgaacaggaaacataatttaatgtatgaatagatgtggaatttggggatttcaaaataggatggaataacaactattttattagtaaaagttatttggaaatgggaaattgaaaaacagccagtaacttatgtttcagaatgtttgtaacacacttcatggtgttcccataggctttgctgtctagtcttatagtttggaggttttttttggtctgcatttttctttttgattccbbacaawwawaatttaataaatactagagtttatcaaaaacagtttgtctcttgtttgagggtggaaagggtgtggaaacattttgacatttgtgaccaaaggtcacttaaaaagtggtggttttaattggttgttttcagcttaatcacctgctcagaaaagtttgatttttttcttagagattatttaaacagaatctataggcagtgtgtatataataaacatgtatggaaataaa

SEQ ID NO: 152619 - DNA, 458 bp, Homo sapiens
cctcccggtcggctaagattgctgaggaggcggcgggtagctggcaggcgccgacttccgaaggccgccgtccgggcgaggtgtcctcatgacttctcttgtggaccatgtccgtgatcttttttgcctgtgtggtacgggtaagggatggactgcccctctcagcctctactgatttttaccacacccaagattttttggaatggaggagacggctcaagagtttagccttgcgactggcccagtatccaggtcgaggttctgcagaaggctgtgactttagtatacaacagcatcattcagaaagtgaagtggcattttaactatgtaagttcctctcagatggagtgcagcttggaaaaaattcaggaggagctcaagttgcagcctccagcggttctcactctggaggacacagatgtggcaaatggggtgatgaatggtcacacaccgatgca

SEQ ID NO: 152620 - DNA, 1839 bp, Homo sapiens
ctgaaattctgtacctattaagcactaactttccatttccccctttctgggtttcttttcatccctcaaaggagctctgctgccttccacagagttcttatatacatgctaatctctccatctgaaacacacttcctctcccctttgcctagttagcctcctgtgattcccaacaccagcctagaagcttctgtaaattctcccaaaacccctgctcctccctgaagagcagtttgtatttatacaggtgtttgattgtttgaagggtgctctcaccctgcctcctctcttaacatagtttttcgtgtcaggaattcctcgctttgtccacaacccctggcacatagcaggtgctcaatacttgctaaatgaataaatggacggactctgctacctacctaatctccttccagccagtcatccatctgtgggtgcctcggtccccagcttggggtgtgtccccctgggtcggactttggcgccccatccaggctggcagtaggttgtgctctttggtttgcctatctcgggcctcccgcccagccgcgcggaccgcagaacatacgccccgggcgttatcactctgtcacgcggagcctccccgcctccagacgtcagtccggttgctaccccggcaggaatcgagcttagatcacgaaggcctctctctcacctccggacgtgagaattacaggcttggatctcaaaccgccgcggtgagagccgggaggtgggaagaaagttgggaggcgcgcgcccccgtcacactccctctccgtttgggtcgcagccctttaagaaccactacgttcgcgccttcgccgggacgggggctgtggaggcgcgccgggattggtcggtttgggtgcgggtgtcgcttagcagcagcgaatgcggggtagcggggaggtggggtggctcaagactcgcgcacgcgcaccacggcctacctgcgcctgggctgccggtgacctgggccgagccctcccggtcggctaagattgctgaggaggcggcgggtagctggcaggcgccgacttccgaaggccgccgtccgggcgagagtgtcctcatgacttctcttgtggaccatgtccgtgatcttttttgcctgcgtggtacgggtaagggatggactgcccctctcagcctctactgatttttaccacacccaagattttttggaatggaggagacggctcaagagtttagccttgcgaactggcccagtatccaggtcgaggttctgcagaaggttgtgactttagtatacatttttccttctttcggggacgtggcctgcatggctatctgctcctgccagtgtccagcagccatggcctttctgcttcctgggagaccctgtggtgggaattccacagcttcctatgacactacctgcattggcctagcctccaggccatacgcttttcttgagtttgacagcatcattcagaaagtgaagtggcattttaactatgtaagttcctctcagatggagtgcagcttggaaaaaattcaggaggagctcaagttgcagcctccagcggttctcactctggaggacacagatgtggcaaatggggtgatgaatggtcacacaccgatgcacttggagcctgctcctaatttccgaatggaaccagtgacagccctgggtatcctctccctcattctcaacatcatgtgtgctgccctgaatctccagccagttcagcacgtttacctaggacagctggatctgggggctcatccagaaagagctttattggaagagagaaaggaaatattttggtcttttaagttgatatgatacagtaaaccacttgattcaataaa

SEQ ID NO: 152621 - DNA, 1002 bp, Homo sapiens
  misc_feature (1)...(1002): n = a,t,c or g
atgcgggcgctgcgggccggcctgaccctggcgttgggcgcggggctgggtgcggtcgtcgagggctggcggcggcggcgggaggacgcgcgggcggcgccgggactgctgggccggctgcccgtgctgcccgtggcggcggcagccgagttgccccctgtgcccgggggaccccgcggcccgggcgagctggccaagtacgggctgccggggctggcgcagctcaagagccgcgagtcgtacgtgctgtgctacgacccgcgcacccgcggcgcgctctgggtggtggagcagctgcgacccgagcgtctccgcggcgacggcgaccggcgcgagtgcgacttccgcgaggacgactcggtgcacgcgtaccaccgtgccaccaacgccgactaccgcggcagtggcttcgaccgcggtcacntggccgccgccgccaaccaccgctggagccagaaggccatggacgacacgttctacctgagcaacgtcgcgccccaggtagcgcccgcgccccgggccggtcgcggaatgaggggccggcgcctggcctcgcggggcctcggtttgttcttctgcagaacggggcagctgcccaacgcgcccccggtgccccacctcaaccagaatgcctggaacaacctggagaaatatagccgcagcttgacccgcagctaccaaaacgtctatgtctgcacagggccactcttcctgcccaggacagaggctgatgggaaatcctacgtaaagtaccaggtcatcggcaagaaccacgtggcagtgcccacacacttcttcaaggtgctgatcctggaggcagcaggtgggcaaattgagctccgcacctacgtgatgcccaacgcacctgtggatgaggccatcccactggagcgcttcctggtgcccatcgagagcattgagcgggcttcggggctgctctttgtgccaaacatcctggcgcgggcaggcagcctcaaggccatcacggcgggcagtaagtga

SEQ ID NO: 152622 - DNA, 2393 bp, Homo sapiens
aatttccgccgagggtccacacgatctacctgagcaacgtcgcgccccaggtgccccacctcatccagaatgcctggaacaacctggagaaatatagccgcagcttgacccgcagctaccaaaacgtctatgtctgcacagggccactcttcctgcccaggtaaggtggaaaccaggggggcggcagaacctcccactcacccgaggcccctactgccactcacagggccaggcttgccccaggctctgggtcaataccagttccctactcatctggtttcttggcaagcctgtcagcttccctgcctcgagtcccctcattccacctccacagccaaagacctgtcgggtacccctgaccatctctcctctgcccatgggcagcagcaggccctgaatctgcccccgcttctccctgctgtcacctcttggcatgcccacccaatcttgttctgccaatatggaaccccccgcaggtctgcagtgcaccaagctctcccaccttccccccgcaggtctgcagtgcaccaagctctcccgccttccccctgcaggtctgcggtgcaccaagctctcccaccttccctctgcaggtccgaggtgcaccgagctctcccgccttccccatgcaggtccccagtgcaccgagctctcacgccttccccatgcaggtccccagtgcaccgagctctcccgccttccccatgcaggtccccagtgcaccgagctctcacgccttccccctgcaggtccgcggtgcaccaggctctcccgccttcagtctctgctctgcttggagcacttccctccacccttctcgggagtttgaatctagatctgcctgacccagggcctccactcttgctcctgtgcagccctgcctctcaggtggaagcaactgagcacctctgggtgtgctccgtggtttttctggcctgcagagggctggggctgagaggcaacaggtccaggctgagcagctcactctggaatccacaggctcgggatggagtccaggcctcatcacctagttccttggtgctgtgggcaaatgacctgtgtccccctctgcaaaacctgtgacctcttggttgatgtcacatgcttccccagggcctggtccatggtaagggctcggcataggctggccaaggcggtggttggggcactgatcaaatttcattagcaggtgcctcctagggcctggtggaagggaggagactctgctgagggggagcccccgtccggtgtcctggcacctgtgctggtgctgggatatcacctgtcatggtccttgcccacttgttgctcacctctgtggggagagatggacagtcgttaagtctcccctcagacgaatgtgaatattcagaaggctcgattctcctagcagcgtttattgtcgcccactctgcctgacccagtgttgggcataaggaaaacagagggaaagagttaaccaccctggagagagttccagcctcaaggaggagccaggcaggctacagaagtctcacagtgagggcgtggtcctgcaggttgacagaaagttagaggacagatcagggaaggctgcctggaagaggtggctttgggttcatccaggccccctgcccacgtgtgcctgggtctgcccacaggacagacggctgatgggaaatcctacgtaaagtaccaggtcatcggcaagaaccacgtggcagtgcccacacacttcttcaaggtgctgatcctggaggcagcaggtgggcaaattggagctccgcaccttacgtgatgcccaaccgcacctgtggatgaggccatcccactggaggcgttcctgggtgcccatcgagagcattgaacgggcttccggggctgctctttgtgcaaaacatcctggcgcgggcaggcagcctcaaggccatcacggcgggcagtaagtgagggtggagcccagtgagactgtgggtgtgtgcaggccggggagtattaaaggtggtgatttttggagacaagtctggtggcgtccgtcccaagtgacctgcagagcccctggtttcactgctgcttcactgatgtcctcggccccttagaactttcaggtgtgccgggcacccgcctgggtgaggccaggctgcagggcggccagggagatgaggatggcttcctccgtgcggatggtacggctaccctggccaggacaggtattgacgtacaggtcaaagaggacactgggttcagccacctccaggttggggtcagcatccgctccagcttccagaccctggaggcccccgaacaccacaagagcatgcctgaagttgggaagctgggcagaggccacatctgagccgcgctctgacgtcccgatggtcaggtcatacccatcttggaagggggcctcagca

SEQ ID NO: 152623 - DNA, 1149 bp, Homo sapiens
ggcacgaggctgggttccgaggcccaagcccttggcagtgtttgtgagtggaagggaggtcacgctatcgtccgcggccccagcagccctgtgccctcgttggatcccgcgacgcggctcctttaagagcctcgcgggtcgcccgccgctaggtcgctccccggccatgcgggcgctgcgggccggcctgaccctggcgtcgggcgcggggctgggtgcggtcgtcgagggctggcggcggcggcgggaggacgcgcgggcggcgctgggactgctgggccggctgcccgtgctgcccgtggcggcggcagccgagttgccccctgtgcccgggggaccccgcggcccgggcgagttggccaagtacgggctgccggggctggcgcagctcaagagccgcgagtcgtacgtgctgtgctacgacccgcgcacccgcggcgcgctctgggtggtggagcagctgcgacccgagcgtctccgcggcgacggcgaccggcgcgagtgcgacttccgcgaggacgactcggtgcacgcgtaccaccgtgccaccaacgccgactaccgcggcagtggcttcgaccgcggtcacctggccgccgccgccaaccaccgctggagccagaaggccatggacgacacgttctacctgagcaaagtcgcgccccaggtgccccaactcaaaccagattgcctggaacaacctgggagaaatatagccgcgagcttgacccgcagctaccaaaacgtctattgtctgcactagggccacttcttcctgcccaggacagaggctgatagggaaatcctacgtaaagtaccaggtcatcggcaagaaccacgtggcagtgcccacacacttcttcaaggtgctgatcctggaggcagcaggtgggcaaattgagctccgcacctacgtgatgcccaacgcacctgtggtatgaggccatcccactggagcgcttcctgggtgcccatcgagagcattgagcgggcttcggggctgctctttgtgccaaacatcctggcgcgggcaggcagcctccaaggccatccacggcgggcagtaagtgagggtggagcccagtgagactgtgggtgtgtgcaggaccggggagtattaaaggtggtgatttttggaaaaaaaaaaaa

SEQ ID NO: 152624 - DNA, 4038 bp, Homo sapiens
tggcgtgtgagtgcggggtggggtggtggccgttacgttctgggcaacggctacggcagtggagaagtaagaagagaaacaacgtccggcgcttccgccttcgcttaggaggaggaagagctggtagggaaaggaaagtgcttcgccctgggcctggactggaccgagtcgggttggtgggggtctgggctatgagcttttgagggtcgcctgggacgcggagcgagacacgagagccaggagctatgtctcagccgccggcgccgccgcctccgttgccgccgccacctcctccccctgaggctccacagactccgtcgtccttggcgtcggcggctgcttcgggggggcttttgaagcggagagaccggagaatcctttccgggagctgcccggatccgaagtgtcaggcgcgtctatttttcccggcctccggttctgtcagcatcgagtgtaccgagtgcggccagcggcacaagcagcaacagctgctgggggttgaggaggtgaccgacccggacgtagtgctacacaacctgctgcggaacgcgctgctcggggttacgggggcacccaagaagaacacggaactggtaaaggtgatgggcctttccaactatcactgcaaattgttgtcgcccatattagctcgctatggaatggacaaacagacaggccgggccaagcttctccgggacatgaaccagggcgaactgttcgattgcgccttactgggtgaccgcgcctttctcatagaaccagagcatgttaacactgtgggctatggcaaggaccgctccggaagcctcctgtatttgcatgacactctggaggacattaagcgggccaataaaagccaggaatgtctcattccagtgcatgtggacggggatggacactgcttggtgcatgctgtgtctcgggctctagtaggccgagagctcttctggcatgccttaagagagaatcttaaacagcactttcagcagcacctggcccgatatcaagctctgttccatgacttcattgatgctgctgagtgggaggacattatcaatgagtgtgaccctctgtttgtaccacctgagggtgttcccttgggcctgaggaatatccacatatttggtcttgccaatgtgctacatcgtcctattattctgttagattccctcagtggcatgagaagctctggtgattattcagccacctttctacctgggctcatccctgcagagaagtgcactgggaaagatggtcatttgaacaaaccaatctgtattgcatggagcagctccggtagaaaccattatatccccttggtaggcataaaaggggctgctttgcccaaactgcctatgaatttgcttcctaaagcatggggtgtgcctcaggaccttattaaaaagtacataaaacttgaagaggatggtggttgtgttattggaggtgacagaagtttgcaagataaatacttacttaggcttgttgctgctatggaagaagtctttatggacaaacatggtatccatcctagtttggttgctgatgtccatcagtatttctacagaaggactggagtgataggagttcagcctgaggaagtcacagcagctgctaaaaaaagcagtaatggataatcgccttcacaaatgtttgctctgtggtgccctttctgaacttcatgttcctccagagtggttggctcctggagggaaattgtataacctggcaaaaagtactcatggacagctgaggactgacaaaaattacagctttcccttgaacaatttggtttgctcatatgattcagtgaaagatgttctggtaccagactatggagtgagtaacctaacagcttgtaattggtgccatggcacatctgtgcgaaaggtcagaggagatgggtctattgtgtatttggatggagacagaaaaaattctaggtccactggtggcaaatgtggttgtggattcaaacacttttgggatggtaaggagtatgacaatctaccagaagctttccctattactttagaatggggtggaagagtggtcagagaaacagtatattggttccagtatgaaagtgattcatctttgaatagtaatgtttacgatgttgcaatgaaacttgttaccaagcactttccaggtgaatttgggagtgaaatcctagttcagaaagttgtccacactatattgcatcagactgccaaaaagaatcccgatgattatactcctgtaaatatagatggtgctcacgcccaaagagttggagatgttcaagggacaagaatcagagtctcagcttccaactaaaattattcttactggacagaaaacaaaaactttgcacaaggaggagttaaacatgagtaaaactgaaagaactattcaacagaatattacggaacaggcttctgtaatgcagaaacggaaaacagagaagttaaaacaagaacaaaaagggcaacccaggactgtttctcccagtaccattcgtgatggtccatcctctgcacctgctacacctaccaaggctccctattcaccgacaacttctaaggagaagaagatccgaatcacaactaatgatggacgacagtccatggttacccttaagtcttcaacaacctttttttgaacttcaggaaagtatagccagagaattcaacattcctccatatttacagtgtattcgatacgggtttcctcctaaagagttaatgccaccacaggcaggaatggaaaaggaaccagttcctttacagcatggcgacagaattacaatagaaattctaaaaagtaaagctgaaggtggtcagtctgctgcagcacactcagcccacactgtgaaacaagaagatattgctgttactggtaaactgtcatctaaggaacttcaggagcaagctgaaaaagaaatgtactccttgtgtcttttagcaacattaatgggtatggctgatggcaagcattgtacttttccacatttgcctggcaaaacctttgtctataatgcttctgaagatagactggaattgtgtgtggatgctgcaggacatttccccattggtcctgatgttgaagatttagttaaagaggctgtaagtcaggttcgagcagaggctactacaagaagtagggaatcaagtccctcacatgggctattaaaactaggtagtggtggagtagtgaaaaagaaatctgagcaacttcataacgtaactgcctttcagggaaaagggcattctttaggaactgcatctggtaacccacaccttgatccaagagctagggaaacttcagttgtaagaaagcataatacagggacagactttagtaatagttccactaaaacagagccttctgtattcacagcttcttctagtaatagtgagcttattcgaatagctcctggagtagtaacaatgagagacggcaggcagcttgatcctgatttggttgaggcccagcgaaaaaaattgcaggaaatggtttcttctattcaggcttcaatggacaggcaccttcgggatcaaagtacagagcagtcaccatctgatcttcctcaaaggaaaacagaagttgtgagttcttctgcaaagtctgggagtctgtcagactggtttgcctgaatcttttcctttaactggcggtactgaaaatttgaatacagaaacaactgatggctgtgtagcaaatgcactgggagcagcctttgccacaaggtcaaaagcacaaaggggaaattccgtggaggagcttgaagagatggatagtcaagatgctgagatgactaacacaactgagccaatggatcactcttgatttaattagaggctaataaaggcagaatgtttattgtgaatatgtaatatttgttggctgggccacgtaacttgattagtcattaaaaatcttgtacgtatataattcacagattatatcttgttattcagtgcatgatagcaagtgtgtgattggccatagcttttaatatactgctgcccaggctggctctgaatttctataaat

SEQ ID NO: 152625 - DNA, 480 bp, Homo sapiens
gaatttaaacaactcattcatatagagcaccagcctaatggaggtgcatcggttatccatgcctacagtaacgaactctcccacctgtctcctatggagatggagaggtttgccagaaagagtttggtggggtcctagtgttccagtgaaaatgaaaactctggcagctttcctacgtgatggggtattgttccatggggcagctacttatttaccctgactttttagactatttttcatttaattttccccaattcacccagtgaaaatggagatattgggaaagaaagatatagagacaacgactatgtccaattttcatgctcagagtctcactgtactccagcctggacgacagagtgagactccatctcaaaaaaaaagaaagaaattcatgataatgctatcctctaggtgggaaggagaaaccaaaaacaaatatagaagacttacaaattaaaaaggtaaacaaaaaaataa

SEQ ID NO: 152626 - DNA, 769 bp, Homo sapiens
  misc_feature (1)...(769): n = a,t,c or g
atatatccnggtcaaattgcagacagaccaaatggaacncgacccgtcaatttgttncgggcccaacgcactttggaaagacctttgcagctcaatctctcccgggnctcggtttcttttcgcnagaagttcggantgagagagaagcacncgaaaatnaacganaagggncagcggcgggaacagcaggcagctncagcgccggcacaacttcgcctcagagctatgcagccccgcgttcttggagctttgcccctctgtctgctgcttccttccccgtcctcttctcggagcagtttctctttctccgctggcacggccgttccctcctcagcctccgcttccttgtctcagccggtgccgcgcaaactgctggtccctcctacgctgctgcacgctcagcctcaccatctcctcctgcccgccgccgccgccgctgcctcggctaacgcaaagtcgcgcagacctaaggagaagcgggagaaggagaggaggaggcacggtctcggtggggcccgagaggccggcggggcctcccgggaggagaacggggaggtgaagccgctgccccgagataaaatcaaagacaaaattaaagagagagacaaagaaaaagaaagagaaaaaaagaaacataaagtaatgaatgagatcaagaaagagaatggagaagtaaagattttgctgaaaagtgggaaggagaaaccaaaaacaaatatagaagacttacaaattaaaaaggtaaagaagaaaaagaaaaagaaacaca

SEQ ID NO: 152627 - DNA, 3391 bp, Homo sapiens
aggagcgcaaaatggcggaaccgccgagccccgtgcactgtgtcgctgccgcggcccccaccgccaccgtctcggagaaagaaccgtttggcaagctgcaactctcctcccgggaccctccgggttctctgtccgccaagaaggtccggactgaggagaagaaggcaccgcggagtagtgaacggagaagggggcagcggcgggaacagcaggcagctgcagccgccggcagcacgcttcgcctcagagctatggcagccccgcgtcttggagctttgcccctctgtctgctgctccctccccgtcctcttctcggagcagtttctctttctccgctggcacggccgttccctcctcagcctccgcttccttgtctcagccggagccgcgcaaactgctggtccctcctacgctgctgcacgctcagcctcaccatcttctcctgcccgccgccgccgccgctgcctcggctaacgccaagtcgcgcagacctaaggagaagcgggagaaggagaggaggaggcacggtctcggtggggcccgagaggccggcggggcctcccgggaggagaacggggaggtgaagccgctgccccgagcaaatgataaaaccaggagctttgacgatttttcgccagatcaagcggctgcagaatgtttgagcattagaaaaaggcgaattcttaagggttcttgtcagacaggttacctccgaaaagccttattttcagatacagtcacattgggcattaaggcttcaacatatggattttggggaggcatgattcagtccatagtgaagggcttggcagagaccttcaacttctggatacatatttgggaactgaatgacttgcagtatatttcagccctttttgcctgctcagaagagatgcccgattatcatttagaaaaacaattggctgataaaatcaaagacaaaattaaagagagagacaaagaaaaagaaagagaaaaaaagaaacataaagtaatgaatgagatcaagaaagagaatggagaagtaaagattttgctgaaaagtgggaaggagaaaccaaaaacaaatatagaagacttacaaattaaaaaggtaaagaagaaaaagaaaaagaaacacaaagagaatgaaaaacggaagcgtccgaaaatgtatagcaaatctattcagaccatctgctcaggattgctaactgatgttgaagatcaagcagccaaaggattccataaatgataacataaaagattacgttgggaagaatttggataccaagaactatgattccaaaattccagagaacagtgagtttccatttgtctcattaaaggagccacgagttcagaataacctcaaaaggttggacacttttggaatttaaacaactcattcatatagagcaccagcctaatggaggtgcatcggttatccattgcctacagtaacgaactctcccacctgtctcctatgggggatgggagaggtttgcagaagagtttgtggggtctaggtgttcagtgaaaatgaaaactctgcagctttctacgtgatgggtattgttcatggggcagctacttatttacctgactttttagactatttttcatttaattttcccaattcaccagtgaaaatggagatattgggaaagaaagatatagagacaacgactatgtccaattttcatgctcaggtaaaaagaacgtattctcatggtacttacagagctggcccaatgagacaaataagcttggtgggagcagttgatgaagaagtaggagattatttccctgagttccttgacatgttggaagagtcaccatttttaaaatgtacactgccatgggggacgctatctagtctaaaattacagagtcgaaaagatagtgatgatggtcccatcatgtgggttcgtccaggagaacaaatgatccctgtggctgatatgccaaagtcacctttcaaaaggaaaagaactaccaatgaaataaaaaatcttcagtacctacctcgaacaagtgagccccgtgagatgctctttgaagacaggacaagagctcatgcagatcatataggacaaggttttgaacgacagactacagctgctgttggagtgctgaaggctgtgcactgtggagagtggcctgatcaaccccgtataaccaaagatgtaatttgttttcatgctgaagatttcttagaagtagttcaacgaatgcagttagatttacatgaacctccactgtcccagtgtgtccaatgggttgatgatgcaaaactgaatcaactgaggagggaaggcattcgctatgccaggattcagctatatgataatgacatttattttattccaaggaatgttgttcatcagttcaagacagtttcagctgtatgcagtttagcatggcatattcggctcaaattatatcactcagaggaggacacttctcagaatacagctactcatgaaacaggcacatcatcagattccacatcatctgttcttggacctcacactgacaacatgatttgtgctgtaagcaaagcctccttggattctgttttttcagataaacttcattctaaatatgaattacagcagattaaacatgaacctattgcatctgtaagaatcaaggaagaacctgtgaatgttaatattcctgaaaagactacagcactgaataatatggatggcaagaatgttaaagcaaaattggatcatgttcaatttgcagaatttaagattgacatggattctaaatttgaaaatagcaacaaagatttaaaggaagaattgtgccctggaaatctaagtctagttgatacaaggcaacacagttcagcacattcaaatcaagataaaaaagacgatgacattttgtgctaaatttgcatataccatctaaaatccttttttaaaaaaatttaatgtaataaagattcatgaattctgaaagcaagccaaggacttgctcctaagtctgttacaaaacatagtttatgtagctttgtaacattcctcagtgcctggccataactgtgaagtattaagcacttagggccagatgcactgtaaacattgcaggtttaaacataaaggggtctttaaaaaaaaatcatttacgttggaattttaggttttagaatagagctgacattaacatatatatatatatataaatatatatatatattttgtaatatgagccagaattctttttgcaacaatttaaagcttttccatagagcttatttatatcctttttttttcattttaaatgtgtcagcactgtagtgtaaatagcttttaaatatctttttagtgtgatttatactgaaatgtgagccacttaataaaggttcatatgttcatattaaaaaaaaaaaaaa

SEQ ID NO: 152628 - DNA, 391 bp, Homo sapiens
  misc_feature (1)...(391): n = a,t,c or g
actggaatattgcctgtgttggatcctatttgctggattcatgtcattctctggtttgtgtactccttcattttgctggagtattttctccaacagcttccctaaaaagggcacatggaggtaacccctgagtctttgcttgtctaaaaatgtattattctaccttcacccttgattatttgggtgaatatagatttatcagttgaaaataactttctagaattatgaaggcatggttccattgttttcagannnnnnnnnnnnnnnnnnnnnnnnnnnnnnnnnnnnnnnnnnnnnnnnnnnnnnnnnnnnnnnnnnnnnnnnnnnnnnnnnnnnnnnnnnnnnnnnnnnnnnnnnnnnnnataaagaatagaaggnaatacaggtgtgc

SEQ ID NO: 152629 - DNA, 1959 bp, Homo sapiens
tttttttttttttttacttattaacaagtgtaactctttattaagatggaattgttcttattaaagaaatagatgaaaatggttaagtacaattaaatggctccaaaagtcttacaatgaaaacaacagtcctgccagttgttctttccagaggcaaatacttttcattctcttagtttttccttccgttagttaccttcatgggtttttccaaattattgtttttttttttagtttttcaagtgaatgcatatattaatacataaaattttaaaaaggcttttcagtttataatgcatcctaacagtcccctgccccatccctcctaattctccagagcaatgacttttaactcttttagcaatgtcttctcgtttttttcctcacataacttagtcatttcattattatatattatatagtgatttctggatatgacagatgaggaattaggctctacacccatcacaatcttcacttttcctcccatattgtcccagagtaagttaccatatttaggggctaagcagtcacatcattatgactggtgtacatactggctccttggtggagaaaaacagtggtattatgctcttcccatccggtacttctttttgccctaaaaagattgcctaaccaaccctttccccttgttttttttttttttttttttacttttgctttatcttcaatgaacttctttccaaatgccccaaatctggcaataaagttattatttttaagagaagggatctcactaaggtggccaggctggtctggaactcttgggctcaagtcgtcctgctgctgagcctcctgagtagctgggactaccaggcatgggccattccacccagctaaccgattaatatttttactgttcctttttaaaagctagctccatagctggaatattgcctgtgttgggatcctatttgctgggattcatgtcattctctgggtttgtgtactccttcatttttgctggaagtattttctccaacagcttcccctaaaaaggggcacatgggagggtaacccctgagtctttgcctggtctaaaaatgtattattttaccttcacccttgattatttgggtgaaatataagatttatcagttgaaaataactttctagaattatgaaggcatggttcccattgtttttcaagatcccttttcgagacaaggtcttctttctgtcacccccggcttggagtgcagtggcacaatcacgacttcactgcagccttgaactcgtgggctcaattaattcttccatctcagcttcctgactaggatgggaatacacggtgtgcgccacaatgcccaggctaattcctgtgttttttgtagagatggggctttgccatgttgcccaagctggtctcaagtgatctgcctgccttagcctcccaaagcgctgggattacaggcgtgagccactgtgcctggctggtttttcttttattttctctctacttcattcatttctcaaaggcatctgaaactccctgggcccaaaaccaaagtcaaactccatcagaatatcgtgggtacttccacctttagaatatatcttaaatcacaatttctttccacatgcaatcctttggttcaaactaccatcatccctcacttgaacctagaattggttttcctgcttctgtacttttttaaattataaaatatttcaaataaaccatgtgtggctttatactttttactacataaaaagaatgaaagatgtgccgggtggtggtggcttcaagccgggtaatcccaggcactttggggagggctgaggtggggtgaatcgcttgcggtcacgagttcgagactagcctggaccaacatggcggaaaccccatctctaccaaaaacacaaaatacaaaaattagccgggcgtggtggcgcgcacctgggtcctagctacttgggagcctgaggcaggagaat

SEQ ID NO: 152630 - DNA, 548 bp, Homo sapiens; identical to SEQ ID NO: 134971
  misc_feature (1)...(548): n = a,t,c or g

SEQ ID NO: 152631 - DNA, 1509 bp, Homo sapiens
atgtcagaactaagactctgctgtgacctccttgttcagcaagtagataaaacaaaagaagtgaccacaactggtgtgtccaattctgaggagggaattgatgtgggaactttgctgaaatcaacctgtaatacttttctgaagaccttggaagaatgcatgcagattgcaaatgcagccttcacctctgagctgctctaccacactccaccaggatcaccacagctggccatgctcaagtccagcaagatgaaacatcctattataccaattcataattcattggaaaggcaaacggagttgagcacttgtgaaaatggatctttaaatatggaaataaatggtgaggaagaaatcctaatgaaaaataagaattccttatatttgaaatctgcagagatagactgcagcatatcaagtgaggaaaatacagatgataatataaccgtccaaggtgaaataatgaaggaagatagaatggaaaacctgaaaaatcatgacaataacttgtctcagtctggatcagactcaagttgctctccagaatgcctctgggaggaaggcaaagaagttatcccaactttctttagtaccatgaacacaagctttagtgacattgaacttctggaagacagtggcattcccacagaagcattcttggcatcatgttgtgctgtggttccagtattagacaaacttggccctacagtgtttgctcctgttaagatggatcttgttgaaaatattaagaaagtaaatcagaagtatataaccaacaaagaagagtttaccactctccagaagatagtgctgcacgaagtggaggcggatgtagcccaggttaggaactcagcgactgaagccctcttgtggctgaagagaggtctcaaatttttgaagggatttttgacagaagtgaaaaatggggaaaaggatatccagacagccctgaataacgcatatggtaaaacattgcggcaacaccatggctgggtagttcgaggggtttttgcgttagctttaagggcaactccatcctatgaagattttgtggccgcgttaaccgtaaaggaaggtgaccaccggaaagaagctttcagtattgggatgcagagggacctcagcctttacctccctgccatgaagaagcagatggccatactggacgctttataagaggtccatgggctggaatctgatgaggttgtatgatggctgctgggcagcacctcctaacttcagggaataaagtgctaaagtgttttgttgccctacttaatttccagcaacagcctcaaccctctccaaccccttcacctggggggatggacaggaggtggcaaaacccagtgcttttataatttttaaaatgcatatgtgttttgtttaaagatcaaggtgctatatatttcagttcagcaggcctactggaaaccaaatgataagctgctgtagacttgaacagcaagttataagagcagatttaacaaacaaaaaaaaaaaaaaaaa

SEQ ID NO: 152632 - DNA, 2115 bp, Homo sapiens
atgggagttgagctgttcacaccagccagcgtcatgggagtgaaaagatgctgttgttctataccaggacagctttctgggaatggggagccaaggttctcagaaattgactcttctgtttcagtgaggggaggttggcagcctcgatggttccttctctgtgggggaatattgtcctattatgattctcctgaagatgcctggaaaggttgcaaagggagcatacaaatggcagtctgtgaaattcaagttcattctgtagataatacacgcatggacctgataatccctggggaacagtatttctacctgaaggccagaagtgtggctgaaagacagcggtggctggtggccctgggatcagccaaggcttgcctgactgacagtaggacccagaaggataaagagtttgctgaaaacactgaaaacttgaaaaccaaaatgtcagaactaagactctgctgtgacctccttgttcagcaagtaaataaaacaaaagaagtgaccacaactggtgtgtccaattctgaggagggaattgatgtgggaactttgctgaaatcaacctgtaatacttttctgaagaccttggaagaatgcatgcagattgcaaatgcagccttcacctctgagctgctctaccgcactccaccaggatcacctcagctggccatgctcaagtccagcaagaaagtaaatcagaagtatataaccaacaaagaagagtttaccactctccagaagatagtgctgcacgaagtggaggcggatgtagcccaggttaggaactcagcgactgaagccctcttgtggctgaagagaggtctcaaatttttgaagggatttttgacagaagtgaaaaatggggagaaggatatccagacagccctaagtttctcatcaaatgttgtacttgatttggagactgggcccaggggatgtattgactttgtgaagaaagaggagactttgaagggcaaatgctgctttgtgactgcaataatcacagccagtctcagctttttcttccctctcttctccttcggcacaattttcaatggaaaagagaagggaggctgtaaatttgacatttttgtcctgatgttcaggcttatttcaaagaagacacagacacaacaagctctgcgtaaacggttttttgagaaatgtttacacaatagttactcagaacctgtaggctccttgatgcatatttcttctgggataatggttcctttttctcattttgaagtcccagccttcataagtagaactgataccttgtttgaaatgagggaggataatgcatatggtaaaacattgcggcaacaccatggctgggtagttcgaggggtttttgcgttagctttaagggcagctccatcctatgaagattttgtggccgcgttaaccgtaaaggaaggtgaccaccagaaagaagctttcagtattgggatgcagagggacctcagcctttacctccctgccatggagaagcagctggccatactggacactttatatgaggtccacgggctggaatctgatgaggtgctgtaccctttggggtgcttggactgctgtccagagggtgaacagagctggtttcagaaaaagaatgtgtttggatgtctgtcccaacttccagtgggtagaggagtacagctgccttgtggtcatgagggtccagcaaaggagaacagagtgtggctgtgcatgccacttgctattactccagaatctgcagaggcacaaaatagagataaccacctttggagcagtgtggttcgggttgatggagaattgatgaacgatgatggtctgacatcagcactgaggacacagatcacgtttgggatgatttgctgtgtgaatgcattgtcctcagagaacaaagttgtcgcatctttgctgacacttgtaagattcactgctgcccctagtctccccactttgcactgtgtgtcacggcaccttcaagtagaagaccctcatctagtcatgtctgtatgtgaatgtggcactaccatttccttgcctgagccccggagccagctgcagtgctccacagctgtatcccagttggaggattccagaagaatggctgagcattag

SEQ ID NO: 152633 - DNA, 759 bp, Homo sapiens
  misc_feature (1)...(759): n = a,t,c or g
gggatggctgaagagaaaacagtccgtgataaagagtacaaggcccttcaaataaaactggaacggttagagaagctgtgcagggctcttcaaacagaaaggaatgagctcaatgagaaggtggaagtcctgaaagagcaggtatccatcaaagcggccatcaaagcggcgaacagggatttagcaacacctgtgatgcagccctgtactgccctggattctcacaaggagctgaacacttcctcgaaaagagccctgggagcgcacctggaggctgagcccaagagtcagagaagcgctgtgcataagcccccgtccacaggctctgctccggccaatcgagtcggttgactaagatgaggtgtgatcactgaattgagagataaattttgcggataactttctctggtagtagntaactattgggtttcgtggcgaaaaatttactactttttctaccataatctgcattttcttagaactactgaacttatgtggtccaggaggctgcttagcaggcttgatagttaaatctataaaatttcctcagttggggtgccatgacctcgttctccttccactgaatgcgatgggtccttggctgtgccttctctcctggtcctggccatatcatccttagagaattactggcagggcgcccattcagggaactttttgtgaagggcctgatgggacatatataataacacttaaccccccctcattttttcagaaaaaagaaaaatttatatcgcccgg

SEQ ID NO: 152634 - DNA, 769 bp, Homo sapiens
tgagaatttggcgcccaaatgggaaaacaataataaagcacttctgcacatggctgattagaaaacagtccgtgataaagagtacaaggcccttcggataaaactggaacggttagagaagctgtgcagggctcttcaaacagaaaggaatgagctcaatgagaaggtggaagtcctgaaagagcaggtatccatcaaagcggccatcaaagcggcgaacagggatttagcaacacctgtgatgcagccctgtactgccctggattctcacaaggagctgaacacttcctcgaaaagagccctgagagcgcacctggaggctgagcccaagagtcagagaagcgctgtgcaaaaggcccggtccacaggctctgctccggtcatcgagtctgttgactaagatgaagtgtgatcactggattgagagatatattttgtgtataactttctctgttagtagttaactattgggcttgtggtgaagaagttactactttttctaccatatctcgattttcttaaaactactggacttatgtggtacaggaggctgcttagcagttttgaatagttaatcctataattttctcagctggggtgcacatcagcctcgctctccctcactggatagcatgagtcactgccttggctttttcttcctgttccttggccatttgatcctaaggaaaatttattgacagggcgacctttccagggaatttggtttgacaaaggtgcttgaggggaaacaatttaattaaacgtttag

SEQ ID NO: 152635 - DNA, 988 bp, Homo sapiens
ggacccacccattcctgttgagggcacaaaagtcccgcctctggttaccatccttgggccttggagtggacaccatctttttgtcaggggtaaacatgcgcctgaagtctgaaatgatgtgtcctggaggttgtgtgaaaggtcagttcttaatgtctggtggggttgaagttcgctgtcttcccaagaatttaaggaattcgtttaatggacagacaactcagtcatgggcattttttcatacaacttagggagaaggagggcttgtctctcgctacccggagctgggatgaaagctgcacttcagccttaactgagttcagagtgtggtggctgacagcttcctccatgtgctgctgcctctgaaattgaggagattaaatttgtttttctcataatacaaacccccttctttggttccaccctaggagcttctgagataagctctgctaccgacaggcaggcacagctacttctataaagacacacacagctgtcagctgggtgagggaggtgcagggatgggggaggggaggggcacagaaacatttttgtgtactgggacagggagtagagataaggaagggaacttagaatttaaatgtgcaattgtattcacagatgacaaagaaaattaaaaaactggaaaaagaaacaataatttggcgtaccaaatgggaaaacaataataaagcactctctgcaaatggctgaagaggtgagatggtttcctgcgactaaggtgtagtcttagtcatggggactccttgagttcaggtacctatcggggccggggacgtgtgctgcaacactactaccatagttgaggactccagcccgcgttggggcgggggtggggatgagttgctgggtagaatctgtgacttctttcctggcagttaggttaaggacagggccctgagtgaggggctgagcttcctaccacccagttaatcaacccaggcttgtgtcggagatagcataaaac

SEQ ID NO: 152636 - DNA, 2252 bp, Homo sapiens
gcacgaggcggcgccgaagaggcgactgaggccggacggggcggacggcgacgcagcccgcggcagaagtttgaaattggcacaatggaagaagctggaatttgtgggctaggggtgaaagcagatatgttgtgtaactctcaatcaaatgatattcttcaacatcaaggctcaaattgtggtggcacaagtaacaagcattcattggaagaggatgaaggcagtgactttataacagagaacaggaatttggtgagcccagcatactgcacgcaagaatcaagagaggaaatccctgggggagaagctcgaacagatccccctgatggtcagcaagattcagagtgcaacaggaacaaagaaaaaactttaggaaaagaagttttattactgatgcaagccctaaacaccctttcaaccccagaggagaagctggcagctctctgtaagaaatatgctgatcttctggaggagagcaggagtgttcagaagcaaatgaagatcctgcagaagaagcaagcccagattgtgaaagagaaagttcacttgcagagtgaacatagcaaggctatcttggcaagaagcaagctagaatctctttgcagagaacttcagcgtcacaataagacgttaaaggaggaaaatatgcagcaggcacgagaggaagaagaacgacgtatagaagcaactgcacatttccagattaccttaaatgaaattcaagcccagctggagcagcatgacatccacaacgccaaactccgacaggaaaacattgagctgggggagaagctaaagaagctcatcgaacagtacgcactgagggaagagcacattgataaggtgttcaaacataaggaactgcaacagcagctcgtggatgccaaactgcagcaaacgacacaactgataaaagaagctgatgataaacatcattttttagagagagtttttattaaaagaagcgacagaatcgaggcacaaatacgaacaaatgaaacagcaagaagtacaactaaaacagcagctttctctttatatggataagtttgaagaattccagactaccatggcaaaaagcaatgaactgtttacaaccttcagacaggaaatggaaaagatgacaaagaaaattaaaaaactggaaaaagaaacaataatttggcgtaccaaatgggaaaacaataataaagcacttctgcaaatggctgagagagaaaacagtccgtgataaagagtacaaggcccttcaaataaaactggaacggttagagaagctgtgcagggctcttcaaacagaaaggaatgagctcaatgagaaggtggaagtcctgaaagagcaggtatccatcaaagcggccatcaaagcggcgaacagggatttagcaacacctgtgatgcagccctgtactgccctggattctcacaaggagctgaacacttcctcgaaaagagccctgggagcgcacctggaggctgagcccaagagtcagagaagcgctgtgcaaaagccccccgtccccaggctttgctccggccatcgagttcggctgactaagatgaggtgtgatcactgtattgagagatatattttgtgtataactttctctgttagtagttaactattggttttgtggtgaaaattttcttactttttctaccatatctgtattttcttagaacctactggacttatgtggtacaggaaggctgcttagcagttttgaatagtttaatctataaattttcctcagcctgtgttgcacatcaagcctccgttctccctccactggaatgcatgtgttcattgccttgtccctttctctcccctgctccttgcacattatcatcctaatgaaaatttcactgacaggggccgaccattacaagggaactttggttctgacgatggttccttgatgtgaaaacaatattaatttaaacgtcttagcccccccccccataatattattcagaaaaacaaaataccaaggcgattagttttgtctaataacccatttaaatgccaagtaaaaataaaactcctagtgttgggtcagaagcatatttgattgaaattagctttttgaaaacatttatatctcgggacaaattgagatggccacatgcctagaatcctaagtttcggcagaatatgtatataaagatgtcacttgtggacaaaatagtacatagaggcaaatcactagacaaataagcttagtgtttacgtgactggaacagtcatcctg

SEQ ID NO: 152637 - DNA, 1042 bp, Homo sapiens
caggcctctggggacgggacacagggaagcccgaaggggcgccttggccaggtctgccatctcctccagcgaggctctggccagcactgggtgagagtggggagggggcactggcctttgcagcacagtaaaacatggtccagacaacctgtggccccggcctcatgagcaccccctgcacaggcccggcccaagccaggcgctagaagggctggttgtggagtgcttatccttgacaggtatggggccaggtgagggcaggggacaaggtgcagctgaggccgagcccaactaggtcctgggcacccctgcaggtgggagtggtccttgtcctcctggtatccagcagacacccccctctccccaccagccccattctcaggtcctttcctctttgtcaccaacaccaagaatctgtccagggttcttggcttatcttttatctcttttcactcctagagaggaattgcaattgactcagaatgacacatttttggcaccacgtgtgtagaaagcccccactgttagatgatagcctcgtgaaattcatgtctctgtattctcctatttcttttcaaaaactaatttttttctctagtgtaataaatcctaaagagggaactgatttaagaaacaaggccgccaaacaaaggcaaagcagttccgactccagcagctgggaaaggaaggaaagtgaccccactttcactcctgcacagcccacttggttaccaaaaccaccgtgcaagtcgggatgacagcagggacttcttgccaggtgggaaaaggtgcctggaagcggtatgcgcctgtgcgattcttggccatgatgttcttggaggcaatgttatttcttggtgctgcctggggtgttgctgagcggacaggctctccagctggagtccatggagaggccagaggctcgagcgccctgcctgggcctttcggagcctcctgcctgcaccctccacctcttctaaaccatgatgtggcacatctttggtgttaataaaacccaacacccaaagtaaaaaaaaaaaaa

SEQ ID NO: 152638 - DNA, 426 bp, Homo sapiens; identical to SEQ ID NO: 110830

SEQ ID NO: 152639 - DNA, 383 bp, Homo sapiens
  misc_feature (1)...(383): n = a,t,c or g
cccgggtcgacgatttcgtcgggaggaatggaaggagaaggcggaatgtgggagggctcagggggatgtgggagggacgaacggagaagggggagagaggggggtccagtctcccctggccgagcannnnnnnnnnnggaagtcctaggactgatctccaggaccagcactcttctcccagcccttagggtcctgctcggccaaggccttccctgccatgcgacctgtcagtgtctggcagtggagcccctgggtgctgctgctgtgcctgctgtgcagttcgtgcttggggtctccgtccccttccacggcccctgagaaaaaggccggaacccagggccttcggttccggctggctggcttccccaggaagccctacaagg

SEQ ID NO: 152640 - DNA, 443 bp, Homo sapiens
  misc_feature (1)...(443): n = a,t,c or g
ccccaagggcgcgggatttttcccggtccacgattttctctggggggaatgaaaggaaaggccggatttgggaagggtccaggggatgttagaagggccaaccgaaaaaggggaaagaaggggggtccgttttccctgggccagccnnnnnnnnnnnnnggaagtcctaggactgatctccaggaccagcactcttctcccagcccttagggtcctgctcggccaaggccttccctgccatgcgacctgtcagtgtctggcagtggagcccctgggggctgctgctgtgcctgctgtgcagttcgtgcttggggtctccgtccccttccacgggccctgagaagaaggccgggagccaggggcttcggttccggctggctggcttccccaggaagccctacgagggccgcgtggagatacagcgagctggtaatcatagtcga

SEQ ID NO: 152641 - DNA, 420 bp, Homo sapiens
  misc_feature (1)...(420): n = a,t,c or g
ttccgggttgacgtttttgtcgggaagaatggaaagagaaggccgaatgtgggagggctccgggggatgttggaaggacccaccgaaaagggggaaagaggggggttccgtttcccctgggcgagcannnnnnnnnnnnggaagtcctaggactgatctccaggaccagcactcttctcgcagcctgtagggtcttgctcggccaaggccttccctgccatgcgacctgtcagtgtctggcagtggagcccctgggggctgctgctgtgcctgctgtgcagttcgtgcttggggtctccgtccccttccacgggccatgagaagaaggccgggagccaggggcttcggttccggctggctggcttccccaggaagccatacgagggccgcgtggagatacagcgagctgggaatgtctaa

SEQ ID NO: 152642 - DNA, 499 bp, Homo sapiens
  misc_feature (1)...(499): n = a,t,c or g
cccgggtcacgatttcgtgggagagaggggggtccagtctcccctggccgagcannnnnnnnnnnggaaggcctaggactgatctccaggaccagcacttttttcccagcccttagggtcctgctcggccaaggccttccttgccatgcaacctgtcagggtctggcagttgaccccctgggggctgctgctgtgcctgctgtgcagttcgggcttggggtctccgtccccttccacgggcttcccgggtcgacaatttcggggcttctgaggcgtctaccttcccaggcctttcctgccatgcgacctgtcagggtctggcagggaagcccctgggggctgctgctgtgcctgctgtgcagttcgagcttggggtctccgtccccttccacgggccctgagaagaaggccgggagccaggggcttcggttccgactggctggcttccccaggaagccctacgagggccgtgggagatcagcgagctggtantgtcaga

SEQ ID NO: 152643 - DNA, 474 bp, Homo sapiens
ctcatttcccgggtcgacgatttcgtcggactccaatgtcattgaggtatgagcatcacctgcaagtttattaggtgcgaattcgacccgccgctgggtgggggggacgacccctgcccgtgacggaggggctggtggaagtcaggcttcctgacggctggtcgcaagtgtgcgacaaagactggagcgcccacaacagccacgtggtctgcgggatgctgggcttccccagcgaaaagagggtcaacgcggccttctacaggctgctagcccaacggcagcaacactcctttggtctgcatggggtggcgtgcgtgggcacggaggcccacctctccctctgttccctggagttctatcgtgccaatgacaccgccaggtgccctggggggggccctgcattggtgaactgtgggccaggccctgtctacgcggcatccagtggccagaagaagcaacaacagtcgaagcctt

SEQ ID NO: 152644 - DNA, 1037 bp, Homo sapiens
tcccgggtcgacgatttcgtgagcgcccacaacagccacgtggtctgcgggatgctgggcttccccagcgaaaagagggtcaacgcggccttttacaggcccgtgtccgtataaagggcggcgccctccatggagaggcggcgagtagtagtcccaatggccagcacatggggcgcagtctgtggccgcgagtgggacctccatacagccagcgtggtgtgtcgggaggtgggcttcgggagtgctcgacaacctgtgattggcgctcgcatggggcagggcatgggtgctatccacctgagtgaagttcgctgctctggacaggagcgggtccctctggaagtgcccccacaagaacatcacagctgaggattgttcacatagccaggatgccggggtccggtgcaacctaccttacactggggcagagaccagggtcagtcagtcctctctaccttggttgaggtctctttcatcctaccacagggcctggtctccggggctacggggcaatgttccccagcccattgccccacgcccctgccctcctgcagctcccacctgacccatcacttgctagcccattatgtgcctgagtcacgcttcagccacatctgttagagactcccactacctcgccccaaagctttctccagcgcttccattctgtgtcactacagatccgactcagagggggccgcagccaacatgaggggcgagtcgaggtgcaaatagggggacctgggccccttcgctggggcctcatctgtggggatgactgggggaccctggaggccatggtggcctgtaggcaactgggtctgggctacgccaaccacggcctgcaggagacctggtactgggactctgggaatataacaggggtggtgatgagtggagtgcgctgcacagggactgagctgtccctggatcagtgtgcccatcatggcacccacatcacctgcaagaggacagggacccgcttcactgctggagtcatctgttctgagagtgaatgaaggagggggtgatgcatg

SEQ ID NO: 152645 - DNA, 1387 bp, Homo sapiens
atggggcaagagccccgggacctcctgctcgccctgcggccccaggaggtggatggatggatggcagccatccatgtccatcccagaacccaagctgatggattagggatatttcccattactgttgctgaatccagagagcagcatgagttcctgaaatgcagttcaatggtgttcagcagacggtggatgcggaaaatcttcatttttcccatccccatgctgcccacaaagggtctttcccagaaacagaaaaataaccctgtacctttcctgcgccacatatgtaaccactacctctaccaacttccttctcctttttgcggaccaatcaccaagcttaaagtcaaacccaaaccccgagtggtcagggggccacacaagaggctgctagcccaacggcagcaacactcctttggtctgcatggggtggcgtgcgtgggcacggaggcccacctctccctctgttccctggagttctatcgtgccaatgacaccgccaggtgccctggggggggccctgcagtggtgagctgtgtgccaggccctgtctacgcggcatccagtggccagaagaagcaacaacagtcgaagcctcagggggaggcccgtgtccgtctaaagggcggcgcccaccctggagaggggcccgggtagaagtcctgaaggccagcacatggggcacagtctgtgaccgcaagtgggacctgcatgcagccagcgtggtgtgtcgggagctgggcttcgggagtgctcgagaagctctgagtggcgctcgcatggggcagggcatgggtgctatccacctgagtgaagttcgctgctctggacaggagctctccctctggaagtgcccccacaagaacatcacagctgaggattgttcacatagccaggatgccggggtccggtgcaacctaccttacactggggcagagaccaggcgcttccattctgtgtcactacagatccgactcagtgggggccgcagccaacatgaggggcgagtcgaggtgcaaatagggggacctgggccccttcgctggggcctcatctgtggggatgactgggggaccctggaggccatggtggcctgtaggcaactgggtctgggctacgccaaccacggcctgcaggagacctggtactgggactctgggaatataacagaggtggtgatgagtggagtgcgctgcacagggactgagctgtccctggatcagtgtgcccatcatggcacccacatcacctgcaagaggacagggacccgcttcactgctggagtcatctgttctgagactgcatcagatctgtggctgcactcatcactggtgcaggagaccgcctacatcgaagaccggcccctgcatatgctggactgggctga

SEQ ID NO: 152646 - DNA, 2575 bp, Homo sapiens
  misc_feature (1)...(2575): n = a,t,c or g
cccgggtcgacgatttcgtcgggaggaatggaaggagaaggcggaatgtgggagggctcagggggatgtgggagggaccaacggagaagggggagagaggggggtccagtctcccctggccgagcannnnnnnnnnggaagtcctaggactaatctccaggaccagcactcttctcccagcccttagggtcctgctcggccaaggccttccctgccatgcgacctgtcagggtctggcagtggagcccctgggggctgctgctgtgcctgctgtgcagatcgtgcttggggtctccatccccttccacgggccctgagaaaaaggccgggagccaggggcttcggttccgactgactggcttccccaggaagccctacaagggccgcgtggagatacagcgagctggtgaatggggcaccatctgcgatgatgacttcacgctgcaggctgcccacatcctctgccgggagctgggcttcacagaggccacaggctggacccacagtgccaaatatggccctggaacaggccgcatctggctggacaacttgagctgcagtgggaccgagcagagtgtgactgaatgtgcctcccggggctgggggaacagtgactgtacgcacgatgaggatgctggggtcatctgcaaagaccagcgcctccctggcttctcggactccaatgtcattgaggtagagcatcacctgcaagtggaggaggtgcgaattcgacccgccgttgggtggggcagacgacccctgcccgtgacggaggggctggtggaagtcaggcttcctgacggctggtcgcaagtgtgcgacaaaggctggagcgcccacaacagccacgtggtctgcgggatgctgggcttccccagcgaaaagagggtcaacgcggccttctacagaaagttgaggaagcgagcggccaaggtctcagcccgacaccccaagccccttggaaggctgctagcccaacggcagcaacactcctttggtctgcatggggtggcgtgcgtgggcacggaggcccacctctccctctgttccctggagttctatcgtgccaatgacaccgccaggtgccctggggggggccctgcagtggtgagctgtgtgccaggccctgtctacgcggcatccagtggccagaagaagcaacaacagtcgaagcctcagggggaggcccgtgtccgtctaaagggcggcgcccaccctggagagggccgggtagaagtcctgaaggccagcacatggggcacagtctgtgaccgcaagtgggacctgcatgcagccagcgtggtgtgtcgggagctgggcttcgggagtgctcgagaagctctgagtggcgctcgcatggggcagggcatgggtgctatccacctgagtgaagttcgctgctctggacaggagctctccctctggaagtgcccccacaagaacatcacagctgaggattgttcacatagccaggatgccggggtccggtgcaacctaccttacactggggcagagaccaggatccgactcagtgggggccgcagccaacatgaggggcgagtcgaggtgcaaatagggggacctgggcccctttcgctggggcctcatctgtggggatgactgggggaccctggaggccatggtggcctgtaggcaactgggtctgggctacgccaaccacggcctgcaggagacctggtactgggactctgggaatataacagaggtggtgatgagtggagtgcgctgcacagggactgagctgtccctggatcagtgtgcccatcatggcacccacatcacctgcaagaggacagggacccgcttcactgctggagtcatctgttctgagactgcatcagatctgttgctgcactcagcactggtgcaggagaccgcctacatcgaagaccgagaccctgcatatgttgtactgtgctgcggaagagaactgcctggccagctcagcccgctcagccaactggccctatggtcaccggcgtctgctccgattctcctcccagatccacaacctgggacgagctgacttcaggcccaaggctgggcgccactcctgggtgtggcacgagtgccatgggcattaccacagcatggacatcttcactcactatgatatcctcaccccaaatggcaccaaggtggctgagggccacaaagctagtttctgtctcgaagacactgagtgtcaggaggatgtctccaagcggtatgagtgtgccaactttggagagcaaggcatcactgtgggttgctgggatctctaccggcatgacattgactgtcagtggattgaccttcacggatgtgaagccaggaaattacattctccaggttgtcatcaccccacactttcaagtagcagagagtggctttacctccaatgcaatgaaatgtaactgcaaatatgatggacatagaatctgggtgcaccacttgccacattggtgatgccttccctgaatagacccgcaggaggggcggacttatcctctccctgccacaacccgatatttttctatcacagagggcctttcttgaacctcggtggcatctc

SEQ ID NO: 152647 - DNA, 812 bp, Homo sapiens
agacagtccgatgtaattccacggctcgagcggcctgccggatctggcccctgtccaccttcaaaagttttccaactttcccggaaagcccccaggggtctgcttcctcatctcagagcagagatacctggagctaaactctaggttacttggagacccaggcgtgcgggccctaacagctcctgcagaacctttgaccaaatacgggcaaagttgcttctcttggctcgcccgcccccctcccttcccctctccgcttctgcttttcctgaaggagagtactgagcatgcaaaggctcctcacttacctcactgactccctttatttactgggtttactttccccattaacactgacatctaaatgtctagaggagtatggcatcccttcctccctgggtccatattctaaagtttagaatcatgatctttttctgcactaacgtcccacagtcctcagagtttctcacagttcattgatgtgtactgagtatataatttatacttagcccccacggcggggtggttctcagaagtggaagacaggtgggtctttggagaacacggtgggaatcttggtgcactgactaacttgatgggcgcttggttcctcttccagccagctgaggtgggtgtcctggttggcaaagaccggtcaagtttttacgtgaatgggctgacacttgggggccagaaatgttcggtgatccgggactcactgctgcaggatggggaatttagcatggatcttcgtaccaagagcaccggtggggcccccaccttcaatgtcactgtcaccaagactgacaaga

SEQ ID NO: 152648 - DNA, 979 bp, Homo sapiens
gatttttaaaattgcatttgcaaagttcggtgtctgggctggcgagtgggggagggagggaatggggagcaggaagtggagtgcgagggctgctgcacagcgagcggagccgcggtccggacggcagcgcgtgccccgagctctccgcctccccccggcccgccagccgaggcagctcgagcccagtccgcggccgccagcagcagcgcccgagagcagccccagtagcagcgccatggccgggtggaacggcctacatcgacaacctcatggcggacgggaccctgcgtgacaggcgccatagtgcgctatcaagactctgaacctccgttttggcacgccgtccccgggaaaaacgtttcgtcaacatcacgccagctgaggtgggttgtccttggttggcaaagacccggtcaagttttttacggtgaatgggcttgacactttgggggggccagaaaatgttcggtgaatcggggacttcactgcctgcaggaatggggaattatagcatgtgatcttcgttaccaagagccacccggtggggccccccacctttcaattgtcacttgtcacccaagactgaacaaagacgctaagtcctggctgatggggcaaaggaaggtgtcccacggtgggttgaccaaacaagaaatgttatggaaatggcctcccacctttcggggtttcccagtactgaccttcgtcttgttccctttcccctttcaccgttccccacagcttttgcacccctttccctccccatacacacacaaaccaatttttattttttggggccattaccccataccccttattgctgccaaaaccacatggggctggggggccagggcttgatgggacagacaccttcccctacccatattccctcccgtgtgtggttggaaaaacttttgttttttggggttttttttttttctgaataaaaaagattctactaacaaaaaaaaaaaaaaaa

SEQ ID NO: 152649 - DNA, 1103 bp, Homo sapiens
gcggccgcgccggctccaggaaatggttactgctgacaggaagtttggcatccacctcccccagcctcctgagtggacaggggccctgggcaccacttcagagggccatgaagcccccaggaggagaatcgagcaatctttttgtgatttccagaagaagctactccttctagcaggcctaataggatgtcatctaatatttttggaccaacagaagaacctcagaacatactcaagaggacaaatcccccaggggtataaggaagtggtatctttgacgaatcaacccccgtgcagactcgacagcacctgaacccacctgggagggaagaccagcgacatttttgggtctccggtcactgccacttcacgcttggcacacccaaacaaacccaaggatcatgtttttcttatgtgaaggagaagaaccaaaatccggatcttaaagctgcaagggagcatcccggctgggagcagagccaggtgagaaaggcagcgccagataaagcaggccccgccaaggagcaggagcccatgcccacagtcgacagccatgagccccggctggggccgcggtgtcactgtgtctacaaggtacacgacatccctcaaagacgctgactcgatctctaataaaagctatcagcctgtccccctttactacgagacccctcttagctctgcagagcatccatcacagttaggcatttttgcccttttttccatccacccacgctttccaccccaccaagacgtgagcttggaacttatcttgtcatcccagcagcaaggagtcgattttgcatgatggatggaaaacacagagaggaccagctgtttcatttctaggcacctcacttctaacctggaaccggttccgagaggaaggaccaggaagacccatgtgtcgggaatggtggacagaaggagtgtgctcagctgccgccgagaagaccacacgctgggtgctgaaaagagggggggacctgctaggaaccatggccctgggctaagtcggggatgaaggcgggagctgctgtgctggactgcagctcagcacagagacagtgagcctagattgcagagctgcccagggaaggatg

SEQ ID NO: 152650 - DNA, 1259 bp, Homo sapiens
gccctttatattttttttaaaaattcaaaaaattagtttattagcttaatataattaggtccaatggaatcctgttttgatctcaatacttcccatattgcaatatataaatgtgacaaattcagctgttttgtggcatagataagtgtctaagctgggcagttagtctaccccgtttcatagttcatgttcttcatggctttgcagcatttgtcactttctatgatgtgttcaaagaccagaaaaggccacacttgacctgtcagctggtccttgaacagctgtaggtttttttttttttttttgagaccagagtctcccttctgttgtccagctgggagtgggcagtagcgcaacctcgactcactggcaacctctggcctccaggttcaagtgattctcctcctccagactcctggagtagctggggattacaggcacatggccaccatggcccggctgatttttatatttttagtagagatggggttccaccatgttggccaggctggtcttgaacttcctgacctcaagtgatccacccacctcggccttcccaaagtggctgggattacagggcgtgaaacccaacacccgggccgtaggttttaactaataattagggtattactctatcattctctatcattcaaattctccaggtactgacctggtttttattttatttatttatttatttacttatttatttttgagacaggaacaaaactctgctgcccaggctagagtacagtagtggcacaatcttggctcactgcagtctccacctcctggggttctattgattcctgtgcctcagcctcccaagtagctgggactacaggtgtgcaccaccacaccaggctaatttttgtattttttagtagagatggggtttttccatgttggccaggctggtctcgaactcctgacctcaggtgatccacccaccttgggcctcccaaagtgctaggattacaggcgtgacaccgagtttgacaacacattttcatagtgttcctcatgtaatgtcctctgtgtctactggaatgaaggatttgcacataccaaggaatagaataatgaaatactatgagttagcaaaccagcatgatttgtctgtgtgtgtgtaaaaggcatgagtaaaattatttacatgatcatctattattgcacatacatatttgagtgttaaaaagttaaaccgttgtcttaataggaatttcacagccttgtgatctttctttttcttttctcct

SEQ ID NO: 152651 - DNA, 612 bp, Homo sapiens
aggtaatatatcttcttagaactttctgatgatatgcaatacctacttagaacgttcttctccatttgttgctattgttcccttgggagtttagttgggtgcttctctttcatgctgttaattttcgtcagatatttggtggttcttgtctatttacattttaaattacatttaaatcctaggttgatcattattggttactgcagagcattttcttgggacaaatgataatctttggtcctttgttcccctgatcttctctttcacatgtacgcagttagattcttctgttctcatggctttccaatcaatcagataccatttgatttatattttttataaatgtccccactatctcagtttgttgatggcacccttctcaaaatccaatgctattatggatttactgagtttcactctgtcgcccaggctagagtgcattggcatgatctcagctcactgcaacctctgcctcccaggttcaagcaattctcctgcctcagcctcctgaatagctgggattatagcacccgccatcatgccccgctaatttttgtatttttgtagagacagggtttcaccaggatttatttttttaagtaacttttggtc

SEQ ID NO: 152652 - DNA, 583 bp, Homo sapiens
ggcacgaggctgccgtcgcgtttgcacctcgctgctccagcctctggggcgcattccaaccttccagcctgcgacctgcggagaaaaaaaattacttattttcttgccccatacataccttgaggcgagcaaaaaaattaaattttaaccatgagggaaatcgtgcacatccaggctggtcagtgtggcaaccagatcggtgccaagttctgggaggtgatcagtgatgaacatggcatcgatgagcagatgcttaacgtgcagaacaagaacagcagctactttgtggaatggatccccaacaatgtcaagacagccgtctgtgacatcccacctcgtggcctcaagatggcagtcaccttcattggcaatagcacagccatccaggagctcttcaagcgcatctcggagcagttcactgccatgttccgccggaaggccttcctccactggtacacaggcgagggcatggacgagatggagttcaccgaggctgagagcaacatgaacgacctcgtctctgagtatcagcagtaccaggatgccaccgcaaaagaggaggaggatttcggtgaggaggccg

SEQ ID NO: 152653 - DNA, 1799 bp, Homo sapiens
  misc_feature (1)...(1799): n = a,t,c or g
gcgtttgcacctcgctgctccagccatctggggcgcaattccaaccttccagcctgcgaccctgcggagaaaaaaaattacttattttcttgccccatacataccttgaggggcgagcaaaaaaaattaaattttaacccatgagggggaaatcgtgccnacatccaggctggtcagtgtggcaaccagatcggtgccaagttctgggaggtgatccagtgatgaacatggcatcgaccccaccggcaccctacccacggggacagcgacctgcaagctggaccgcatctcctgtgtactacaatgaagccacaggttggaaaatatgttcctccgtgccatcctgggtggatctagaacctgggaccatggactctgttccgctcaggtccttttggccagatctttagaccagacaactttgtatttggtcaagtctgggggcaggtaacaacttgggccaaaaggccactacacagaagggcgccgagctggttgattcctgtcctggatgtggtacggaaggaggcagagaagctgtgactgcctgcagggcttccagctgacccacttcactgggccgggggcacaggctctggaatgggcactctcctttatcagcaaggattcgagaaagaataccctgatcgcatcatgaatacccttcagtgtggtgcccttcccccaaatgtctggacaccgtggtcgagccctacaatgccaccctctccgtccatcagttggtagagaatactgatgagacctattgcattgacaacgaggccctctatgataatctgcttccgcactctgaagctgaccacaccaacctacggggatctgaaccaccttgtctcagccaccattgagtggttgtcaccacctgcctccgtttcccttggccagctcaattgctgacctccgcaagtttggcagtcaacatggtccccttcccacgtcttccatttctttatgcctggctttgcccctctccaccagccgtggaaagccagcaagtatcgagctctcacagttgccggaactcaccccagcaaggtctttcgatgccaagaacattgatggctgcctgtgaacccccgccaagggccgattaacttcaaccgtggcttgctgtcttcccgtgggtcgggatgtcccatgaaggaaggtcgaatgaagcagatgctttaacgctgcaagaacaagaaacagcagctacttttgtggaaatgaatccccaaacaatgtcaaagacagccgtctgtgacatccccacctcgtgggcctcaaagatggcagtcaccttccattggccaatagcacagcccatcccaggagctcttcaaagcgcatcttcggagcagttcactgcccatgttcccgccggaaggcttttcctccactgggtacacaggcgagggcatgggacgagatggagttcaccgaggctggagagcaacatgaacgacctccgtctctgaagtatcaagcaattaccaaggatgccaacgcaagaagaggaggaggatttcggtgaggaggcccgaaagaggaggcctaaaggaagagcccccaatcaactcaaggcttctcagttcccttagccgtcttactcaactagcccctttcctcttccctcagaatattgtgtttgctcgcctcatatcattgttttttgatttatttcctttctgggaggggcgttatagaaacaagtggccctggcgacaataagtaggccgcctccaataaaatacttggttttgttgaaaaaaaaaaaaacaaaaaaaagggcggcc

SEQ ID NO: 152654 - DNA, 2264 bp, Homo sapiens
tttcgtgcgagaggagcccctgctctgttaacgctcttaatgtgctgcggctgccggcagaagctagcaggctcctctgctgaggagctggtgcctgtccagacgcagaagaaaactgacacctcccacgtgggggacagaaaggtcctctcattggtgccacctgcagagatagacaaggagcgcctggccatcagaggacgctcctgacagtgacacagtgaccactataaaagtcaggcgggctgaggaggagacaaaggccaggacgctccgcagctgttggggaagaggagctgcctcctgggatggagaaatttaaggctgcgatgttgctggggagcgtcggcgatgctcttggctacagaaatgtctgcaaggagaacagcactgtaggcatgaagatccaggaggagctgcaaccggtccgggggcctgggccacctcgtactctcgccaggagaatggcccgtgagtgacaacaccatcatgcacatcgcaaccgccgaggccctcaccacagactactggtgcctggatgatctgtaccgggagatggtgagatgctatgtggaaatcgttgagaagcttccagaacgccggccagacccagctaccattgaaggctgtgctcagctaaagcccaataactaccttctcgcctggcacacaccgttcaatgaaaaaggctcagggtttggagcggccaccaaggccatgtgcatcggcctgcggtactggaagcctgagcggctggagaccctcatcgaggtcagcgtggagtgcggccggatgacccacaaccatcccacaggcttcctgggctccctgtgcacggccctgtttgtgtcgttcgccgcacaaggaaagcccctggtccagtgggggagagacatgctgcgggcggtgcctctggcagaaaagtactgcaggaagaccatccggcacacggcagaataccaggagcactggttttactttgaagctaaatggcaattttatttggaggagaggaagatcagtaaagactcaaaaaataaagccatcttccccgacaattatgatgcagaagagagggaatagacctacaggaagtggagctcggaaggtcgagggggaagacgaggccacgatgcccccatgatagcctatgacgccctccttgcagcaggaaacagctggactgagctgtgtcaccgggccatgtttcatggaggggagagcgcggccacggggcaccattgcagcctgcctgttcgggttgctgtacggcttggacctcgttcccaaaggcttgtcccaggacctggaggacaaggagaagctggaggacctgggcgcggctctctaccgcctgtccacagaaaagaagtaaagccatttctgccactttccccctagagagccgattccaccccggggcccgtagggccctctcgcagcccctgggtgagggtgtctctgtgaggctccactgcggtctgtgcctgactggccacatctaactctctgtttccaatttcagaatcctaacgtgttgcataaaatacattgtttgtcctgcgagaatattttccgtcctccaccatcagcattgacactgcgtagatttgccgcacttggacctccatgcgtggcactcacccgcagtctcctggacaggcgctgtattttattctgtcgcagagctaatgctgtttactcactcacttcaacaacactaactgcggtggtggcctccagcaggcccccccgctgcagaccctctgtcctgcctctgcctccaggcatggcgtttccccgtgagggccaatgcacctccccccaccagccaccctcccatgtccacagtgggtcgtgtgttcctggacagagaaacagtccacactggggcctgcgggacacatatagcagcatattttgctcttaaccccacccacctttttaatcacactagattttaagatcaatccctttttgaaacaactcacggagaaaaccagaacataaatggcctcctgccagctccggcgtctctctgtggtctgccttagtgggccaagtccaaatgcagagaaggcctttcccttccgcgcctgccccatcgggctcgctgacgaggaagcgctgtccctgtgatgaggttctctctcagagagtcttggaaaagagaccacttgctcttgtttaaaataaatttggacgtgatttttccatgcagcatctggtgtgaataaaacagcagttgactgatgtttaaaaaa

SEQ ID NO: 152655 - DNA, 443 bp, Homo sapiens
  misc_feature (1)...(443): n = a,t,c or g
agcggctggagaggtggtcggagaagtaggaacctcctgccgggctcgtggcggcttctgtccgtccgnagcggcaagcgccttccccacaggacatcaatgcaagcttgaataagaaaaacaaattcttcctcctaagccatggcatatcagttatacagaaatactactttgggaaacagtcttcaggagagcctagatgagctcatacagggctctctaaatacgtacagattctgcgataatgtgtggacttttgtactgaatgatgttgaattcagagaggtgacagaacttattaaagtggataaagtgaaaattgtagcctgtgatggtaaaaatactgggctccaatactacagaatgaataagaaaaaatatgacttttttacaccatcttctgttattcattgcttttgaagaggagcatagaagagactttt

SEQ ID NO: 152656 - DNA, 937 bp, Homo sapiens
ctcagttctgcggtttctgcggcggctggagaggtggtcggagaagtaggaacctcctgccgggctcgtggcggcttctgtccgctccgcggcgggaagcgccttccccacaggacatcaatgcaagcttgaataagaaaaacaaattcttcctcctaagccatggcatatcagttattcagaatacttcctttggagacaagtttccaggagagcctagaattagcttattcagtctcaacagatcacccccccaacttgccctttcaagttctacctccagttggatagggcctataaatgcagcactggcctcagagggtcaggaacagaggtcaatttcaggggctctcctaaatacggtaccagattctgcggataatgtgggggacttttggtaccggaatgatggttgaattccagagagggtgaccagaacctattaaaaggggataaaagtgaaaattggtagccctgtgatgggtaaaaataccgggctcccaatacctacagaatggaatagaaaaaaatatgactttttttacacccatcttctgttattcattgcttttgagagagaagcataggaagagactttttattttattctagaattgcaggaaatggactacactggtggctatacccagagaattccagtagaaagaaacttgtaactctgtagcctcttacatcacctttattatacagcatgaaaaaccataacttttttttaaggacaaaagttgttgccttcctaagaaccttctttaataaactcattttaaaactctgagtaataactggtgaagctattaaggtagcaatatgaagatattagataatgcattttcccatttcctttgcaaggaacatgatgccctttcagaatgcttatttcaataaagtcatgttttgtcagttgtaaaaaaaaaaa

SEQ ID NO: 152657 - DNA, 1534 bp, Homo sapiens
tccctataggatagagctggcagctgagaaattttaaaggtaattgataattagtatttataactttttaaagggctctttgtatagcagaggatctcatttgactttgttttgatgagggtgatgccctctcttatgtggtacaataccattaaccaaaggtaggtgtccatgcagattttattggcagctgttttattgccattcaactagggaaatgaagaaatcacgcagccttttggttaaatggcagtcaaaattttcctcagtgtatttagtgtgttcagtgatgatatcactggttcccaactagatgcttgttggccacgggaagggaaatgacttgttctaattctaggttcacagaggtatgagaagcctgaactgaagaccattttcaagagggacggtatttatgaatcagggttaggctccatatttaaagatagagccagtttttttttttaaatagaacccaaattgtgtaaaaatgttaattgggttttttaaacattgttttatcaagtcactgttaagtagaagaaagccatggtaaactgatacataacctaaattataaaagcagaaacctaactcactcgtcaagggaagttaccttttgaggaaagttaaagtacttttttccctatctgtatctatagcaacaacccagaacttacaaacttctccaaagattttattggattgttatatcaaatcagaatgtaaacatgaactcttgcatatatttaaaattgtgttggaacatttgaacatgaatgctgtttgtggtacttaagaaattaattcagttggattatcattatgtgatactggccagattgcagtgcaaccctttatgcccaataaaatgtaatttaaccagcccccagatattgttgaatattcaacaataacaagaaaagcttttcatctaagttttatgctttaattttttttctttttttttctttttcttttgtttccttgggactaattttaatttttatttggaaagggagcagtataaaccttatttgtatttagtagtgcatctcatagatacagacaaggcaagacacgataagctgtttaaatagtgtttaatcttgattgggggtggggacaaagaaaacctgtattacttaaacatactacatacgttctgcacaccattcctcctctccaaagaaatgaaataaatttattgtttacagatgtttagtgagtttaatcattctgaaaaattatctgacattttcagggtgtcaatttgagtatcagtttttttaaatgaaccatttgtatacctgtgcttttgatctcctgtcctgtacaatgtttaaattaatactgatttcttactgtcttcttagaaatctgttttttgttaggccaaaaaagggcaatatgggctgtctgttgatttttaattttatattgattattttcacaggattataatagtagctatactttttttctcccctcttttgagacggagtctcgctctgtagaaagggctggagtgcag

SEQ ID NO: 152658 - DNA, 440 bp, Homo sapiens
cagcgtgaacaaggagtgaatgctgcagagcagctccatgatgggcccaggtagcaaagggaggagctcacaaggcctgtcttggtgatgtgggcctggggtattttaactctggaagtttctgttttgctttatctaaattgaaaggatggttttgcctttcagcctttagaagaagccacactctctgaattaaaaactgtcctcaagagcttcctaagtcaaggccaagtattgaaattggaggctaagactgatccgtcaatcttgggtggaatgattgtgcgcattggcgagaaatatgttgacatgtctgtcaagaccaagattcagaagctgggcagggctatgcgggagattgtctaaaagtgttggttttctgccatcagtgaaaattcttaaacttggagcaacaatacaaagcttccagaacagatcaa

SEQ ID NO: 152659 - DNA, 838 bp, Homo sapiens
  misc_feature (1)...(838): n = a,t,c or g
aattctcgggtttgacctacagccgcccgggagaagatgggctgccccagcagtcgtccgggctctccccgcaaggtgcgatgctttagtaccgggtgaggtcagaccatttgcccaagcttgtggggccctcttgttcaggtatacggcattgaaggtcgctatgccacaggctctttattctgctgcatcaaaacagaataagcctggagccaattagaaaaggagttgttgagagtagcacaaaatcctcgaaggaacccaaaagtggcctgcttcctgtttttgaatcccctatgtgaaagccgttccattaaaagtgaaaaagccctaaattgacatcaccagcaaaaagagaaggttctctcccccttcaactacccaaccctgaatcaattttgcttggctggaaaaatgggtccgatttaagccaataacnccaagggagtcgttttctggcctttttcttaccatggatggagtgttccattcgcgggagagggtacctttgcacagtggacctctggcatcttcctttaggaaggaaagccacactcttttgaatttaaaaactgttcctcaaggagtttcctaaggtcaagggccaagtattggaattgggggctaaggactgatccgtcaatctttgggtggaatgattgtggcgcattggcgaagaaatatgttgacatgtctgtcaagaccaaagattcagaagctggggcagggctatgcgggagattgtctaaaaagtgttggttttctgcccatcagtgaaaattcttaaacttggaagccaacaataaaaagcttccagaccagaaaaaaaaaaaaaaaa

SEQ ID NO: 152660 - DNA, 468 bp, Homo sapiens
gacccacgcgtgcgcccacgcgtccggaggcctgcgcccacaccctctcctgtttattcttcgcccgcctgggcagggcccggcgccggccgtggatgagccacagaacctcttgcaccttccgagcggagagaagtttccattcctcttcttgttcctgctcctcttccacctcctcctcggcctcccgtgccctcccggaccaggacccgcccatggagaaggccctgagcatgttttccgatgactttggcagcttcatgcggccccactcggagcccctggccttcccagcagcccatcccacagcccgccccggtggggcaggcaacatcaagaccctaggagacgcctatgagtttgcggtggacgtgagagacttctcacctgaagacatcattgtcaccacctccaacaaccacatcgaggtgcgggctgagaagctggcggctgacggcaccgtcatga

SEQ ID NO: 152661 - DNA, 934 bp, Homo sapiens
cgcccagaggcctttgcccacaccctctcctgtccagccttcgcccgcctgggcagggcccggcgccgtccgtggatgagccacagaacctcttccaccttccgagcggagagaagtttccattcctcttcttcttcctcctcctcttccacctcctcctcggcctcccgtgccctcccggcccaggacccgcccatggagaaggccctgagcatgttttccgatgactttggcagcttcatgcggccccactcggagcccctggccttcccaggcaagtgatccgggccctgaggggaggggaggtgcacagggaggggacgtctgctccagggcgccaccgaaggcgctgtggctgcccggtcggcctggaacaggtgctgcacagcctgcagccatgtgtggccaccaagacagatgtggccacagggacagatgtggccatgaaaacaggcaacatcaagaccctaggagacgcctatgagtttgcggtggacgtgagagacttctcacctgaagacatcattgtcaccacctccaacaaccacatcgaggtgcgggctgagaagctggcggcctgacggcactgtcatgaacaccttcgctcacaagtgccagctgccggaggacgtggacccgacgtcggtgacctcggctctgcgggaggacggcagcctcactatccgggcatggcgtcacccgcatacagaacacgtccagtagtaccttccggacggagatcaaaatctgagtgcctctcccttccctttccctgtccccccgccccacgcctgccagcaaagcctcgctaaccccattacaacagctccaggacatctcagcccaggttctagcccccacgcaccccagaccccaggtggaccatcctcccaaactaagggccctccactctatccagggcaggccagggact

SEQ ID NO: 152662 - DNA, 631 bp, Homo sapiens
  misc_feature (1)...(631): n = a,t,c or g
agaaaaaattgacgcccgtggttcgatcgcgtgtggagcgcgacccacgcgtgcgcagaggcctgcgcccacaccctgtcctgtccagccttcgcccgcctgggcagggcccggcgccgtccgtggatgagccacagaacctcttccaccttccgagcggagagaagattccattcctctttctcttactcctcctcttcacacctcctcctcggcctcccgtgctctcccggcccaggacccgtccatggagaaggccctgagcatgttttccgatgactttggcagctatatgcggccccactcggagcccctggccttcccagcccgccccggtggggcaggcaacatcaagaccctatgagacgcctatgagtttgtggtggacgtgagagacttctcacctgaagacatcattgtcaccacctccaacaaccacatcgaggtgcggcctgagaagttggcggctgacggcactgtcatgaacaccttcgctcacaagtgccagctgccggaggacgtggacccgacgtcggagacctcggctcttggggaggacgggaggcttactatccgggcacggggtcacccgcatacagaacacgtncagcagacctttcggacggagata

SEQ ID NO: 152663 - DNA, 553 bp, Homo sapiens
ttttgaagcgttcaagctattatatattttcataatatagaactttaaagtatagtaatcaacagtggcaaaatatttctgtctctgacaaggccagtagaattcttatgagaacagcttttaagcacttcaatggagtgtcatttttttggtagcttccagaaggtgccaaacaggtttcaacatcatattaattagaaatacccataataattataacaataataaaaaggtataatatggtacataaatatggaagagcagtttgtaatatgaatacattttctctagacgagatcacagttttattttgtaaatattacatttaagtatatatatacacacatatatgtacaactatatatacatgtgcatatatatgtaaatttatatttatatataatatctttatatagatagatatctgcagacaggttattgattatagagacccaagaaagcaactcaataattgttcaaagttttcctcactgactgctggtgtgtagtttaagaagcccccatttgtttgcactcagaatgccttatcttc

SEQ ID NO: 152664 - DNA, 489 bp, Homo sapiens
  misc_feature (1)...(489): n = a,t,c or g
acaataggccagtagaattcttatgagaacagcttttaagcacttcaatggagtgtcattttttttggtagcttccagaaggtgccaaacaggtttcaacatcatattaattagaaatacccataataattataacaataaaaaaaaggtataatatggnacataaatatggaagagcagtttgtaatatgaatacatttnctctagacgagatcacagttttattttgtaaatattacatttaagtatatatatacacacatatatgtacaactatatatacatgtgcatatatatgtatcagagaaaacagtatgggaaaacaaatccatgagaacaggataaaaatatcatgaacagcaaaatatgtctgagtatttaaaactgtatagaaaaaataaattagatgaacaattgtgtaaatataaattaaaaaagatgacattcttaataaataangtttactatttacatttttatatattgcca

SEQ ID NO: 152665 - DNA, 1470 bp, Homo sapiens
  misc_feature (1)...(1470): n = a,t,c or g
gggcaggagattttgaggccctgaggttttaggtgggctgtgagggccaacgcttgacacaaagtccatgggttattattcaagaatgcacaggcccatcggccttttagaaagacaagacagggagtgcttgtttgatatttcaaggaataaagccggagctccggaattgtagtccaccttaaaagagagacctgtattggagaatattttatttttttggcaaatttgatcttaccctttaccagttctataatttggttaaaagctgattacggccctacaatggtcaaagtcagctaactgtcgtcctacttaaagacttccgggtccatttccccaacttataggagggaaggggagtctcttaaaatcttctttctttcaggaagggcaccctncactttctcagacttaaaattcccacatcaagtgttcccattaaaaggaaggataagggcattctggaggtgcaaaccaaatggggggcttctttaaactacacaccaggcagtcagtgagggggaaactttggaaccaattatttgagttggctttccttggggtctcctataatccaataaccctgtctggcaggatatcctatcctatataaagatattatatataaatataaatttaccatataatatgccacatgtatataatagttgtaccatatatgtggtgtatatatatcccttaaatgtaatcatttacaaaataaaactgtgatcctcgtcctaggggaaaatgtattcatatttaccaaactgctccttcccatattttatggtacccatattatacctttttattattgttataattattatggggtatttctaattaatatgatgttgaaacctgtttgggcaccttctgggaaggctaccaaaaaaatgacactcccttggaggtgcttaaaagctgttctcataaggaattctactgggcctattgtaaaaaagggaaaaaaaaaaggaaaaaggaaggaaaggacacaaaggaaaataatctaaacaccaaaaactaaacacaattccaatcctttttctgtacctcacgcgcataaatttgcctgctcctatttttttttctgtttatgtgtttttatgggatctaagttaaatcttttggcaatatataaaaatgtaaatagtaaactttatttattaagaaatgtcatctttttttaatttatatttacacaattgttcatcttaatttattttttctatacagttttaaatactcagacatattttgctgttcatgatatttttatcctgttctcatgggatttgttttcccatactgttttctctgatctcaattacaggttgggatctcacaaataataatgtcagaggcaggaaatattttgccactgttgattactatactttaaagttctatattatgaaaatatataatagcttgtacgcttcaaaaaaaaaaaaaaaagcg

SEQ ID NO: 152666 - DNA, 450 bp, Homo sapiens
  misc_feature (1)...(450): n = a,t,c or g
gaattcccgggtcgacgatttcgtcgaaggctgctgctcctgttcgacacagcggagaccatgggaaaagactatttgtcatcagaccttctagattctatgacaggcgttttttgaagttattgagattctacattgcattgactgggattccagtagcaattttcataactctggtgaatgtattcattggtcaagctgaactagcagaaattccagaaggctatgtcccagaacactgggaatattataagcatcccatatcaagatggattgcccgtaatttctatgatagtcctgaaaagatatatgaaagaacaatggccgtccttcagattgaagctgaaaaggctgaattnnnnnnnnnnnnnnnnnnnnnnnnnnnnnnnnnnnnnnnnnnnnnnnnnnnnnnnnnnnnnnnnnnnnnnnnnnnnnnnnnnnnnnnnnnng

SEQ ID NO: 152667 - DNA, 512 bp, Homo sapiens
gtttgttgcggcgggtttcggttactgcggtggcagctctgtctggccggccccttggcactcgcctcggatttgggggcttcctcactcgtggctttccgaagctgctgctcctgttcgacacagtggagaccatgggaaaagactatttgtcatcagaccttctagattctatgacaggcgttttttgaagttattgagattctacattgcattgactgggattccagtagcaattttcataactctggtgaatgtattcattggtcaagctgaactagcagaaattccagaaggctatgtcccagaacactgggaatattataagggtaaaggagctggaagtgcgaaaattgatgcatgtgagaggagatggaccctggtattactatggagacaattgacaaggaacttattgatcattctccgaaagcaactcctgacaattaagcatttttttctccaaatacaaagtatattctctttattgggaaataaattaataaatatat

SEQ ID NO: 152668 - DNA, 1163 bp, Homo sapiens
cccacgcgtccgcccacgcgtccgccatgagtttgttgcggcgggtttcggttactgcggtggcagctctgtctggccggccccttggcactcgcctcggatttgggggcttcctcactcagtggctttccgaaggctgctgctcctgttcgacacagtggagaccatgggaaaagactatttgtcatcagaccttctagattctatgacaggcgtttttttgaagttattgagaatccaccatggcattgactggattgccagtaacaattttcatagctctggtgaaatgtattcattggtcaagctgaactagcagaatttccagaagggctatgtccccagaacactggggaatattattaaggcatcccatatccaagatgggatttgcccggtaatttcttatgataggtcctgaaaaggatattatggaaaggaacaatgggccgtccttccagattggaagcctgaaaaaggctggaatttacggggtaaaagggagctgggaagtgcggaaaatttgatggcatgtggaggagggagatgggaccctgggtattactatggagaccatttgaccaaggaactttattggatcattcctcccgaaagccaactccctggacaaattaaagccattttttttcctcccaaataccaaaggtataatcccccctttaattgggaaaattaaattaataaatataatcccgggaatttttgccccccccggtggaaaaaccaaaagagccctctgacattactgtctcctcagtgttgggttccagattggaggccttttggtttggagggagtttgggcctccccagtccccccaaagaagggtttaaaatggtacctaataaaaactgggaggaaatagggaatttggtgaacctcctaaaattgtaggcaactttggaaagggtaagtggtttaattacctggaccaatgggaagttataggaagtctaataatgttaagcgaccgagtaattatagtaatttggtaccaatggcctgtactgtagatgtctgtattattgaggggcaactcaggattttaagttccataaagtattgaaccaactctaaaatgttaactccttcactcaacagattctcagtaaacaaattttaaagttaaaaaaaaaaaaaaa

SEQ ID NO: 152669 - DNA, 1564 bp, Homo sapiens
ttttttttttgttaaaatatcttttaattttaccggcaaaatacatcaatgactaatatattcccgtatggaatatattcttattggaatatattcttatatagaatatatagactatgtatatatacatatgtgtatatacctatatacatatatatatcttggagatataaaactaattgggaataatgtcatatatatagatagtaagcaaacattttttaaaacattttaaagactccaaactattcatttctatccacctataaaaaactagcaattaaacctgtcaaatcacagccatcttgctttacgcagattcagaaacatgagatccttttacctttgaaactctagtttcaaagctgttctaaagtgacttggttttaatttatatacttgcagggataataagtagctgtagggccataaaaatgtaaagaatacagtatcgtgcccatacgcaactgcaatcagttatttttaagtgttcgtaaaagatagtggtcttcacaatcctcccttttcagatgggcacactttcatatttcaaaagtgcatgtattcactttttatccccaacaaaggtagtagctaccctctaaagcagaggataacattttctttttgcccaccccagaatggattatgatcccatgtgcatactcccatggttcccttcccctagtctgtatgaaaaaataaagcacaataattctgaggttttaggggtagtggtatagggatagtattcacacacaaaaaaactgaagtacaaggatatgagacttttgttaaaatatcttttaaagtaattttactggcaaaatacataaatgattaaccagttttaaaatagtaaacttatttatttatttatttttgagacggggtttcactctctcaccaggctggagtgcagtggcatgatcttggctcactgcaacctccgatttccagagtcaaggaaactttttttttttggagctattgacagcttttaacaattaagcaaagtatactcctataaacaaaatttggagcataattgtttctctctacctgatttctccagaacttgaaaattattagtgagtatcttaacttacggcaatagttatttgcataagtacaataagaatctgttttcatttgtaacaggacacaattggagaaactggttattttaccaaggctttgactggaatggtgtgctttcctttaaggaatcaaacttgacttatggagccaatataagccccttggaaaaactggccttatatctttgtctacacagtccgtgcccagggttcctgacctgtacgggctctgtgctaaggggcgcagggtaaccaagagcgaccaggaggccgccatcttgaactccgtacgaggagaggaagaggaaaactttattggaacccagaagagagacggtggcaaagtcaaaccccgccgtgcacgctgaaggctccacccgagagaaccaagggatcagttagggaacgtgacctccagtagccacatgggcgggctgcactcccgtgccctcccgtccacgaaa

SEQ ID NO: 152670 - DNA, 730 bp, Homo sapiens
  misc_feature (1)...(730): n = a,t,c or g
gaacagacaggaaatcaactgggtttgaaactctggtggtgacctccgaagatggcatcacaaagatcatgttcaaccggcccaaaaagaaaaatgccataaacactgagatgtatcatgaaattatgcgtgcacttaaagctgccagcaaggatgactcaatcatcactgttttaacaggcaacatttcatacaccatttagtcacctaggccaaagtccggaaggatgctcctcttacacttttccgaagataatgagcccagccaaggcaacagagatgcttatttttggaaagaagttaacagcgggagaggcatgtgctcaaggacttgttactgaagttttccctgatagcacttttcagaaagaagtctggaccaggctgaaggcattttgcaagctctccccaaattgcctggagattttcaaagaagtantcaggaaaagagagagaganaaactacncgctgttaatgctgaagaatgcaatgtccttcagggaagatggctatcagatgaatgcacaaatgctgtgtgaacttcttatccagaaaatcanaactgtgatgaccactacagcagagtanagcatgtccaagggaaggatgtngctgtaccnntctgatttccagactaggaactaaaataagcttcattgtgcctttttgagtgctagaatatcannntacatgatatattcactacagctctgagaaaataaaagttga

SEQ ID NO: 152671 - DNA, 2192 bp, Homo sapiens
atggtgctgggcgccaaaaccatcaagacgttcacagctctcagacaccagcgatcaaatcagaatcacgctgtcagtgctttggtagaagcacccaaagggactttgagagcagaggagagagaattctcagtcaggctggggcatctggaatcttccagaagctgcattgtggagggtgagagcacagaatctggctctgacgaactcaggcaagatggaaccacatttgaaagaatctatgaagacagacttggcaaaggcaggagtcacggcaaatcaagggatctggctagcaaggactcacaggcaagcccacagcaggctcggtgcagcagcaaaagaggccagcaacaggaatctgcaggagctacagctctgagggagagaaaccttgctctcagttcagaagaaccgcagctccaagaagatgtaatacataaacgagaaaggaaacctactgaaccattacaccctgaagatatatctggagtccaggatttcactgagaactggatagctgggcatgccaattgtatcttcaatggctctctgcttgctctcagcacggaatccaaactccttagcacagatacaatgatcttcaagctcagggctggccctcgggatgcagcgacccctcctcgccaggctccgcgggactccgggcagggcgctcagtgctccggcagccacagggttcgcagagctgagagccgcccaagggatggcgatggcgtacttggcttggagactggcgcggcgttcgtgtccgagttctctgcaggtcactagtttcccggtagttcagctgcacatgaatagaacagcaatgagagccagtcagaaggactttgaaaattcaatgaatcaagtgaaactctttgaaaaaggatccaggaaacgaagtgaagctaaaactctacgcgctatataagcaggccactgaaggaacttgtaaaatgccccaaaccagggtgtatttgacttgatcaacaaggccaaattgggacgcatggaatgcccttggcagcctgccccaaggaagctgcccagggtagaactatgtggatttggtgtccagttttgagtccttccattgggaatcctcctagtccaggtggagcctggaacagaaagggataaccaactgggctttgaaactctggtggtgacctcccgaagatggcatcacaaagatcatgttcaaccggcctcaaaaagaaaaatgccataaacactgagatgtatcatgaaattatgcgtgcacttaaagctgccagcaaggatgactcaatcatcactgttttaacaggaaatggtgactattacagtagtgggaatgatctgactaacttcactgatattccccctgggtgggagtagaggagaaagctaacactaatgcccgttttactgaggggaatttgtggggctgttttataggattttcctaagcctcttgattgcagtgggtcaatgggtcccagctgtggggcatctccagtcaccctccttggggcttattcgatgcccgtgttattgcatcttgacaggggcacattttcatacaccattttagtcaccttaggcccaaagtccggaagggatgctcctcttacacttttccgaagataatgagcccagcccaaggcaacagagatgccttttatttttggaaaagaagttaaccagcgggaagaggcatgtgcctcaagggacttgtttactgaaggttttccctggatagcacttttcagaaagaaagtctgggaccagggctgaagggcattttgcaaaagcttccccccccaaatggccttggaggaattttcaaaagaggtaatcaggaaaagagagagagaaaaactacacgctgttaaaggctgaagaatgccaatgtcccttccagggaaaatggctatccagatgaatgccacaaatgcctgtggtgaacttcttatcccagaaaatcaaaaactgtgatgaccacttacagcagcaccaaagcatgtcccaaggaaggatgtgctgttccctctgtctttccagtactggaactaaataacgcttcattgtgccttcttgtaggtgctagagatatcaattacacaatgatgagtatttccactcacaagctctgaatgaaataaaaaggttttggtaaaacaagcttaagaattcacacaaaa

SEQ ID NO: 152672 - DNA, 2714 bp, Homo sapiens
tttttttttttttcaaattttataaaaggcattttattataaatacattgtagttgtagcagtaaaatacattttgttaccatgaatctttgaaaacaaaagaacttcactgagacaatgagcacactgtaggaactgtagaccccaagttgaaaacttgttctatggaaccaaagtagctaacgtaattccaaaactaagttagaaaaggataaagacaaagaaagaagaaaataaaaaccctaggagagtgggctttgggcgttattttatgggaccaaggcccccttttacttttaaggataaactctttaggtattagagcctcttagatgaggtatccgtttactggcaaagaaaaaaaattggttataattttggccaaaaggttatggcccatttagatgggctgtataactgggtactttggaagagatgaacctgacccacctccagttttgtacagcttccctcaggaagacttcccaaaataagactcagtatgaatttgctaagtaactgatctatgaagttagctgaacaagtttagataagaactatatgtatgaagcattaaaaaaaaaatcctgtgtctctaacaacaggaccctttaataaaatgcaaaactcattatctttataatttagaagagaagtattttaatcgccatatttacgtaggatggtcctactacatatagccagtacctttatggggtttaaagaatcaggtcagatgactggcacagaaatcagatacagtacaatgtcatatacatggatttataggaagcaggcatggtctggatttatgaaaatccaggacccttcctctgtaaagggggaggctgagaaacattctcagctgcactgacactttgggacttcaaccaggacaaagagccctctgacctactgaaagatataaagaggtcttcgcatacaagttatcgtgcaaagcaaagtgtaaataaaccgaagctcccctctaaggttgggactgcataaaggaacccaggctgaaaatataaacaaaccctctccaaaggtgagcaagccttttcagtaggaaggactgtgtcttaagaaaactccaaagctgtatattctacgatggtcttcacgtgtacttttacacctaagtcattctgtattctattaccataaaaatagcttttttttgtctttctagtagctcagtaaattcaaaggcaaactaaaaaccagaagcagagcccagtaccccccaagatgcagtccagataaaacagcaacaacacacaaattaaacaatacccaaagacctgacaggtttattatattataggcagtttctttctcaaaaataacttgctcatacatgtgcacctatgacttatgaataattcatgctgtgtaggtggtagatccccctaggctgttttgcaaacacatatagatttttttaaaggtagcaaagtaatcagagacatttattttctgccatatgtaacacttcaggctctctctaacacctgctggcatggcagagaatctaaaataactttgttaaccctgagaaaccacataatttgaaaaacaaatcctttgccctcaccaccctccccccaccaaaaaaaaaaataataataaccataaaaactaaaacatttgccaggcgcagtggctcatgcctgtaatcccaacactttgggagcccgaggcgggcagatcatgaggtcaagagatggagaccatcctggccaacacggtgaaaccccggtctctactaaaaaatacaaaaattagctgggcgtggtggcgcatgcctgtagtcccaactacttgggaggctgaggcaggagaatcacttgaagccgggaggcggaggttgcagtgagccgagatcatgccactgtactccagccagggcaacagagcgagactctgccccgaagaaaaaaaaacaaaactagtattttattatttaaggattatctgtggttttcgatgctccatgtcactgccatcttaggacagggactcctgcacttagtgcctcgatacatgctaggtgcactctcatggcattctgatggcttctttccaggattctcacttccatgcatgtggatcaagattgaccctaagcacaccaaacaaatgcacagcttcccagactgatgtcccaggcagcagcgtcacacaaaagcaaactcacccctaaaaaccaaagagctcccttcaccctactgcggaagagccagtgccaagaccccagcaggggtgagagtgaggaggggtggtggccaatccaaagggcctgtcgctccatggagacctttctcccacaaatgttccagtcatggcaccagatttataaaaatgtctccagagatcagttttttacactgagtaaataaatacatggttgaaaagacgttcagactctgaaggtctctgagactttcaaactgcgagaatcagacccagtgattttcaaagtgtggttcctggactggcagcatcagcatcgcctggaaacttgttggaaatgcaaatcatcaggctccagaccaaaatcagaaatgctgggggtgggtccagctatctgaattttaacaagacctcgaggcaattctgatactggctgaagtttgagaaccattgctccatcctgttcacaattctcaaatcttaaaacaggacagatctgtaaatagtaccggacgcgt

SEQ ID NO: 152673 - DNA, 442 bp, Homo sapiens; identical to SEQ ID NO: 133090

SEQ ID NO: 152674 - DNA, 462 bp, Homo sapiens
gtgaccaggcctgtggtaccgtaggagatgatggccgtgctctcggagagtgtgaccgagcctcccgagggcagcaaatagctccggtggccctgggtggactccttggccatcagggtatccgccagcgcttcatacagctcgtccaaaggctctgtgtggacagcctcgtgctttttgatgagttctgagagaaagcaccgggcatatttgacggacggcgggtgcttcacacacacaggatgcttcacagtcttgtgcaaaatatcccgcagcagctcagaatctgatgagtctcttaactttgcttctaagctctgccaggggaaggagcgcagtgtgcgtgccgccaggaagcggcgctcgaaactctgcagcaagagttcggtccccgcgttctcctcgggcgccatgacgtgggcggggccgcagcgttgccggcagaccgggcggaagcccggc

SEQ ID NO: 152675 - DNA, 1239 bp, Homo sapiens
  misc_feature (1)...(1239): n = a,t,c or g
ttcgaagaattnttatatgggaaagcggataaaactttcattggactggaatgtttggagaatgttaaattccaaatcaggaaccacaaactgcgctctaataagacatcggctatctaagcatgtgggttccccctttctgccagcagttctggttcttaagaaaatcaccataaatcagacatgaaaattctggctccaaaaatagcattttcattgtgcaaataaaaacgtgtgtatcaagtatgatgttccccccaacgtggacacactcggttcctcacaaagccaagcccgctgcagctgccacatctgtggacacactcggttcctcacaaagccaagcccgctgcagctgccacatcggtggacacactcggttcctcacaaagccaagcccgctgcagctgccacatccctggacacactcggttcctcacaaagccaagcccactgcagctgccacatccctggacacactcggttcctcacaaagccaagcccgctgcagctgccacatcggtggacacactcggttcttcacaaagccaagcccgctgcagctgccacatcggtggacacactcgattcctcacaaagccaagcccactgcagctgccacatccctggacacactcggttcttcacaaagccaagcccgctgcagctgccacatccctggacacactcggttcttcacaaagccaagcccgctgcagctgccacatccctggacacactcggttcctcacaaagccaagcccgctgcagctgccacatccctggacacactcggttcctcacaaagccaagcccgctgcagctgccacatcggtggacacactcggttcttcacaaagccaagcccgctgcagctgtcacatcggtggacacactcggttcttcacaaagccaagcccgctgcagctgccacatcggtggacacactcgattcctcacaaagccaagcccactgcagctgccacatccctggacacactcggttcttcacaaagccaagcccgctgcagctgccacatccctggacacactcggttcttcacaaagccaagcccgctgcagctgccacatccctgggcttatggtgcagcaggtgcttttttcaagacaggaatcaaaatgttaggaacacggcagaaaggtgacacctggagaccaaacgcaggatgaggagtactgcagaggtcacagggaagtcacaaaacagtaatacgccag

SEQ ID NO: 152676 - DNA, 2133 bp, Homo sapiens
  misc_feature (1)...(2133): n = a,t,c or g
gcggtanaatgaaatcatgctgtggcacgcccggaatccgggtcgaccccgcgtccgggcaacgctgcggccccgcccacgtcatggcgccggaggagaactcggcgagcgaactcttgctgcagagttctcaagcgccgctttcctggcggcgcgcgccctgcgctccttcccctggcagagcttagaagcaaagttaagagactcatcagattctgagctgctgcgggatattttgcagaagacgtgctgtattgcccagaagccatcgtgtcgctggtcggggtcctgcggaggctggctgcctgccgggagcaccagcgggctcctcaattctacatggcccttaccgtctgcaacccagagatgtgccagctggttcaccactgagctatgccgggctgggatcagatgggaagtggaacctcgtcatgaccagaaactgtttccctacgaagagcacttggagatggcaatgctgaacctcacactgtaggactcacacacgactccaatgggattgtgagaatcaagtcactctcaagggaagaggtttcatatgggaaagctgataaaactttcactggactggaatgtttggagaatgttaatttccaaatcaggaactacaaactgccctctaataagacatcggctatctaagcgtgtgggtgctccctttctgccagcagttctggttcttaaggaaatcgccatcactcagacatgaaaactctggctccaaaaatagcattttctttgtgcaaataaaaacgtgtgtatcaagtatgtggacacactcggttcctcacaaagccaagcccgctgcagctgccacatccctggacacactcggttcctcacaaagccaagactgctgcagctgccacatccgcggacacactcagttcttcacaaagccaagcccgctgcagctgccacatccctgggcttacgatgcagcaggtgcttttttcaagacaggaatcaaaatgttaggaacacggcagaaaggtgacacctgggagaccaaacgcaggataaggagtactgtcagaggttcacagggatgttcacagaacagtaattacgcttagcagggacatggggcgtgaagaacagaagaagacaggaagcgtttccaagcctccagagaagaaatcaaggccaaccaaagcttcccgggtcacagaaccaattcttttaccaggcagtaccactgccgtcatttcagcttctggccactgggaggcgctgctcgaaagggtttgccctgagactcccaagaagaagctgcgggaaggacagcaggggccctggggttttaatacctctggccccaggagttatgtgtccataaccaaagggagcacagtctgcacccagctctcatcccatcagagctgctgcgactccggcaggttcttccggaaactggtttagcttgcctgcaggatcaggaaagttttgagaaaagcatcttgcaaaattactaaagggcgagcttacctcattgcctgtccccacccccatccccaggtcaccacctggctgaccccaggtccccggacccaacaacaaccccttcccaagtccctaactccctcacttggacttgagacccttcacaacccccctcacttggacttgagacccttcactcgagactcttcacgccccagcagcgctccgcctcccacttgacagtcatgctttctggaaacttccccgtatgtcccactttttcccacactttggtgcgctggagcacctcccggcctctaacgtgctgtatgttcccctgtgagcaccctcctctcggcctctggccaacacagtcccacccatctgtgggtaacaagggggtgtgtgtgttcttttcagccttgctaaactgtctgaatcaaggatcacaaactacagcctgcaggccaaatccagcccacagcctgtgtttgtacaataaagttttattggaacaaagccacaccccttaatctacagatgatctgtggctactttcacaccacaacagagtaccatggttctgacaaagactgggggaccctgtttaaatgacttctgacctggacctttactgaaaatcctcccaatcattctgttgaaaaaaaa

SEQ ID NO: 152677 - DNA, 2076 bp, Homo sapiens
cggcgcgcacactgcgtccttcccctggcatgtgggcggcggggcgagcggagaggcccgcggggctcgcgggagtccaggggcagacgggatgggtctccgtgctgaaacccccggcgctccggcaacactgtgaagcatcctgtgtgtgtgtgaagcacccgccgtcagtcaagtatgcccggtgctttctctcagaactcatcaaaaagccctcgggaggctcggtcacaatctccgagagcacagccatcatctctcacggtaccacaggcctggtcacatgggacgccaccctctaccttgcagaatgggccatcgagaacccagcagccttcactaacagacgtgctgtattgcccagaagccatcgtgtcgctggtcggggtcctgcggaggctggctgcctgccaggagcacaagcgggctcctgaggtctacgtggcctttaccgtccgcaacccagagacgtgccagctgttcaccaccgagctaggccgggccgggatcagatgggaagtggaacctcgtcatgagcagaaactgtttccctacgaagagcacttggagatggcaatgctgaatctcaccctgtaggactcacacacgactccaacgggattgtgagaatcaagtcactctcatgggaagaatttttatatgggaaagcggataaaactttcattggactggaatgtttggagaatgttaatttccaaatcaggaaccacaaactgccctctaataagacatcggctatctaagcgtgtgggtgccccctttctgccagcagttctggttcttaagaaaatcaccataaatcagacatgaaaattctggctccaaaaacagcattttctttgtgcaaataaaaacgtagtgtatcaagtatgatgttcccccaacgtggacacactcagttcctcacaaagccaagcccactgcagctgccacatcccctggggcttacgggtgcagcaggtgcttttttcaagacaggaatcaaaatgttaggaacacggcagaaaggggacacctggagaccaaacgcaggatgaaggagttctgcagaggtcacagggaagtcacagaacagtaatacgctagcaggggcatggggcgtgaagaacagaagaagagaggaaagcgtttcccaagccttccaagagaagaaatcaaggccaaccaaaagcttcccgggtcacagaaccaattctttttaccaggcagtaccactgctgtcatttcagcttctggccactgggaggtgctgctcgaaaggggtttgccctgagactccaagaagaagctgcgggaaggacagcaggggtcctggggttttatagcctctggcccaggagttatgtgtccataaccaaagggagcacagtctgcacccagctctcatcccatgggagctgctgcgactcccgcaggttcttccggaactggtttagcttgcccgcaggatcaggaaagtttgagaaaagcatctgcagttgagctgccagttcctctgagtcctcaaagaccaggcggttttcttcatgtttcaccagctcatgtaaacaccttgaagttcacggcacacacaggcaaacagcacccgaacatgtccaccacctttcatggggcagggccaggcccacttggaggacgtgtgcagacagacacccaggtccgccgaccctagaagcagggggtagtcctcggccctccagcccaggggatgcagacctggatgtgctggaaatgcttctggtggatgaggcggctgtaatactccctcagaggccctttgcctgtccagcttgtgctgctgaccagcagggctggccgctcgtggagacgcgtcaccagcccgctcccagaatcccgctccgtgaaggccgaccgctctgtgtctgggtcctcaggttctgagatgaaggagcagaaaaaaacccgggccctgaatggagagtgcgtgccgcccagcttcatgaagagccggtgctgcaggtccagaggtgtctctttaaagaaagatgccggcttgtcatagacggtcacagcccagcctgcagtagctcccat

SEQ ID NO: 152678 - DNA, 1830 bp, Homo sapiens
atggcgctgcctccaggcccagccgccctccggcacacactgctgctcctgccagcccttctgagctcaggtccaaccagccagtccctggtgagaggactcaggtgccctttcctttggcctgctgctcttctcactgggccaattcctggtcacagcacagtaccaaccgtgcctgagcccttcccagaggcctcctgctgtgttccaggttggggggagttggagccacaaatagatggtcagacctgggctgagcgggcacttcgggagaatgaacgccacgccttcacctgccgggtggcaggggggcctggcacccccagattggcctggtatctggatggacagctgcaggaggccagcacctcaagactgctgagcgtgggaggggaggccttctctggaggcaccagcaccttcactgtcactgcccatcgggcccagcatgagctcaactgctctctgcaggaccccagaagtggccgatcagccaacgcctctgtcatccttaatgtgcaatacccagccatcctgttcctcagcatcccctctgaggagaggcccaggcccctggctcccatctgggtttgggaagaaagggctagaagtatgaggggctgtgtcaagccagagattgcccaagtcggcgccaagtaccaggaagctcagggcccaggcctcctggttgtcctgtttgccctggtgcgtgccaacccgccggccaatgtcacctggatcgaccaggatgggccagtgactgtcaacacctctgacttcctggtgctggatgcgcagaactacccctggctcaccaaccacacggtgcagctgcagctccgcagcctggcacacaacctctcggtggtggccaccaatgacgtgggtgtcaccagtgcgtcgcttccagccccaggtgagcatggccagcaagcggccctgcaaagcttcagtgactccaacaacctaaaactcaacaacgtgcgcctgccacgggagaacatgtccctcccgtccaaccttcagctcaatgacctcactccagattccagagcagtgaaaccagcagaccggcagatggctcagaacaacagccggccagagcttctggacccggagcccggcggcctcctcaccagccaagacaagtcatcaattgctggctcagaagatgctgaacctcttgctccacccatcaaaccaattaaacctgtcactagaaacaaggcaccccaggaacctccagtaaagaaaggacgtcgatcgaggcggtgtgggcagtgtcccggctgccaggtgcctgaggactgtggtgtttgtactaattgcttagataagcccaagtttggtggtcgcaatataaagaagcagtgctgcaagatgagaaaatgtcagaatctacaatggatgccttccaaagcctacctgcagaagcaagctaaagctgtgaaaaagaaagagaaaaagtctaagaccagtgaaaagaaagacagcaaagagagcagtgttgtgaagaacgtggtggactctagtcagaaacctaccccatcagcaagagaggatcctgccccaaagaaaagcagtagtgagcctcctccacgaaagcccgtcgaggaaaagagtgaagaagggaatgtctcggcccctgggcctgaatccaaacaggccaccactccagcttccaggaagtcaagcaagcaggtctcccagccagcactggtcatcccgcctcagccacctactacaggaccgccaagaaaagaagttcccaaaaccactcctagtgagcccaagaaaaagcagcctccaccaccagaatcaggtgagtga

SEQ ID NO: 152679 - DNA, 1637 bp, Homo sapiens
  misc_feature (1)...(1637): n = a,t,c or g
agaaaagagaagaaaaccaaaggcccctcccggcacccatctctgatatcaagtgactccaacaacctaaaactcaacaacgtgcgcctgccacgggagaacatgtccctcccatccaaccttcagctcaatgacctcactccagattccagagcagtgaaaccagcagaccggcagatggctcagaacaacagccggccagagcttctggacccggagcccggcggcctcctcaccagccaaggtttcatccgcctcccagtgctgggctatatctatcgagtgtccagcgtgagcagtgatgagatctggctctgagccgagggcgagacaggagtattctcttggcctctggacaccctcccagttcctccaaggcatcctctacctagctaggtcaccaacgtgaagaagttatgccactgccacttttgcttgccctcctggctggggtgccctccatgtcatgcacgtgatgcatttcactgggctgaaacccgcaggggcacaggtatctttgggcaaggctaccagttgggacgtaagcccctcatgctgactcagggtggggccctgcatgtgatgacttgggcccttccagagggagctctttgggccagggggtgttcagatgtcatccagcatccaagtgtgggcatgggcttgcttgtataaccccaccccagtaattccacagcaccttgtacagtagggcatgggggcgtgcctgtgtgggggacagggagggccctgcatggattttcctccttcctatgctatgtagccttgttccctcaggtaaaatttaggaccctgctagctgtgcagaacccaattgccctttgcacagaaaccaacccctgacccagcggtaccggccaagcacaaacgtcctttttgctgcacacgtctctgcccttcacttcttctcttctgtccccacctcctcttgggaattctaggttacacgttggaccttctctactacttcactgggcactagacttttctattggcctgtgccatcgcccagtattagcacaagtragggaggaagaggcaggcgatgagtcttantagcaccccaggacggcttgtagcctatgccatcattttcctacgggcgttagccacctttaagcaccatcccctaggggaagggggtgaagtgagggccccagagcccctctttgtggcntccccccacgtttgggccttctgggattcactgtgagtgtccctgagctctcggggttgatggtttttctctcagcatgtctcctccaccacgggaccccagcccctgaccaaccccatggttgccctcatcagcaggaaggtggcccttcctggaggatggttcgccacaggcacataattcaacagtgtggaagctttaggggaacatggagaaagaaggagaccacataccccaaagtgacctaagaacactttaaaaagcaacatgtaaatgattggaaattgaatatagtacagaatatatttttcccttgttgagatcttcttttgtaatgtttttcatgttactgcctagggcggtgctgagacacacagcaagtttaataagctcgactgaattcattgacataaaaacggacacgtgggtcgccccttca

SEQ ID NO: 152680 - DNA, 1083 bp, Homo sapiens
aggctgggaactaaagggatgtatgaagttcagactaagaaagatttgcctcccggatggttctgaaaaggcaagggatgatggattattatattatttattttttaaggaggggtggctaaacaacaaataacatttttaaatgggcaaagtatttcaaaagacatttctccagagatatatagatggccaacgagcacatgaaaagatgcttaacatcgttaaccatcatggaaatgcaaatcaaaaccacaataagatgccacttgacactaggatgcctataatcaaaaagataataaagtgttaatgaggatggagggaaactggaaccctcatattgcttggtgggaatgcaaaatagtgcaactgctttccgtaagtctggcagttcctcaaaaggttatcacagcacccaacaattccattccctgtatgtgcccaagagaaacaaaaacacatattcactcaaaaacttatcacaaatgtttatggcagcattattcatagaagccaggaagtggaagcaattcaaatgtctgtcaactaatgaatggacaaatgtggtacgtccataagatggaacattcatcataaaaacaaactcctgatacatcctacaacagtaagaaccttaaaaacatcctaagtaaaagaagccagtcacaaaagactacataaattatgattcaatttatatgaaatgtccagaataggcaaatccacagagacaggttaagttgttgccaggagctagggagaatggggagtgactgccaagtgagtatgcagcttcttttgggggccagtccttgtcaactgagttgatatgcagtgacaaaaaaagctcttaaggagagtgggattatgtgacgtgagccactgtgctggcctgattccattatttataatagaattattaaaaactctacagctgggatagaaataccctttcttggtttaagatacccaaaacactatagcccagcttttctgaggaaggccactgtttatttctaactgattttatctttggatgtaccatttctccaaactattccacaggggatataagaattatat

SEQ ID NO: 152681 - DNA, 783 bp, Homo sapiens
atggcagaaggcaaaggaggagcaaggcacgttttacatggtggcaggcaagagagcatgtgcaggggaactgccctttataaaaccatcagatcttgcctcaagttttgccctccattaagaagggacaccctctttacggattggttacaggatctaattcgcctacaatcaacccttgagtcagaaaaagggattgaagcatcagtaagctctgggaaggcttatatccttggtcaacttcagactgctgtgctggcaggagagctctggatggcatcaggccagtgcccctctgagacgaagtttccagaggaaggagcaggcagcaatctttgctgttctgtatcctccactggtgataaccaggcgaacaaggtcgggggagtggaactccagcaaactgctgcagaactgcagaagaggggcctgaccgttagaagaaaatctaacaaacagaaagcaacaacatcaacatcaacaaaaaggactcccacacaaacctccgtccaatcatcatcagcctcaaagattaaagaaggaaaccttgctcagtggacttggaaagaacgtcatttctttgtgttcaatgtcaaatacccagggcttggtaaaatgttagccatatgggacatggatgaagctggaaaccatcattctcagcaaactaacacaggaacagaaaaccaaacactgcatgttcttactcataagtgggagttgaacaatgagaacacatggacacaaggagggggaacatcacacactggagcctgttggtga

SEQ ID NO: 152682 - DNA, 1755 bp, Homo sapiens
atgcttattttcaacgactatacatcaagtatgtacaagattgaagttccacaacgcaagaccttcccctacacagatgaaaagtcaagggacaaagaaggagagagaagtatcaacccagttccaatatctggccgggctaaccccgcggctcctgcacctgtgcctgcccggggaatcgtgggccgtttcccactcctcttcaaccctcagcgacatcttgggccttcttttccagtcagttgggacggcgcccctatgaggctgtgtcttatccctcggaacatgggcaccccacagagggtcctgtctcctgtggtctggagccccgcctcaaggaagaaacccatgctgtctgctcacaactccaggatgtttggacacctcagccccgtgaggattcctcatctcagaggcaagtttaaccttcaacttccttcattagatgagcaggtgatcccagccaggctcccgaagatggaggtgagggcagaagagcccagagaagcaacggaggtgacagaccaggtagagacccaggggcaggaggacaataaaaggggcccctgtagcaatggggaagcagcttccacctctaggcccctggagactcagggaaacttcacttcctcctggtacaatcccaggcccttggagggaaatgtccacctcaagagcttgacagaaaacaaccagactgacaaggcccaggtgcctgcagtgagtttctactccaacggccatggagtcgccagttcacacagccctgctggaggcatccttccctttgggaagcgtgacccacttccaacagtgctccctgccccagttccaggctgctccctgtggccagagaaggcggccttgaaggtgctgggtaaagaccacctgcccagctctccaggcttgctgatggtgggggaggacatgcagcccaaggatcctgcagctcttgggtcaagtaggtcttctccacacagagctgccggccacagttcccacaaaagaaaactgtcggggccaccgctgcagctgcaaccgacccctcccctgcaactgagggacatggatgaagctggaagccatcatcctcatcaaactaacacaggaacagaaaaccaaacaccacatgttctcactcataagtgggagttgaacaatgagaacacatggacacagggaggggaacatcacacaccgggggtctgtcagggggcctccaggcctgtgatgggaggggctgctgtgaagatctctggatccacactcagcccacagctggaccaggcatgtaatgagtggcttccgcattgggcaccagtgcctagattaggagaatgcagtagtgcccgaaaattcggagaggccagccgttgcaaagccccaagggttgtcacagctcttgctcagggagtctggaagtctgagcacataaggaatgttgcagctctttattcccgtagctcgatacttggagggctcagaatacagaaagatgtcggaaacttgggaattcctgaagacttgttgaatggctttgaccaaaatgctgttagtgatatggacaataaggtccaggctgaggtggtctcagatggagatgaggaacttgatggaaactggagcaaacgtgactcttgttatgctttagcaaaaataccggcaggattttgtccctgccctagagatctgtggaattttgaacttgagagagatgatttagagaatctgacacaagaaatttctaaatggtaa

SEQ ID NO: 152683 - DNA, 811 bp, Homo sapiens
ctgagttatgaacagtgtgtgaattttgagtgattcgtggttttggttgtgagattcaattgtctcccttcagaataggaaccaatgggcagaaaaggaacaatcgtggtgcatgtggtatagtggggtaagaacagctctccagctccctcacttacccatcctgtgttctggggttaattttcatgagctgcaggctcatgtgtaaaaatcttccttcccatggtgtatatgaagtgagttttgtgtctaaattcttagtgagtgctgaataaatatgtattttttctgtattttaacagccaagactatttaagaatagaaagtcctaaatattaaaattcttaactttgagtgcttataacggcctttctccatgttagcctacttaatcctgaatagccttgttttacaaatgtggaaaccacactttagagaagcagcatgctcaaatcacatagatggtaggtgggaaggtaggcttggttttcaacactgtaagatcttgggcagccattaaaaagaatgagttcatgtcctttgcagggacatggctgaagctggaagctatcattctaagcaaactaacacaggaacagaaaaccaaaccaccacatgttctcactcatacgtgggagttgaacaatgagaacacatggacacagggaggggaacatcacacactggggcctcccgatgggtggaggacaaggggaagaagactattaggacaaatacctaatgcatgcggggcttaaaatgtagatgatgggtcaataggcgcatcaaaccaccatgacacatgtacacc

SEQ ID NO: 152684 - DNA, 531 bp, Homo sapiens
gcaatcctcagctccagccgtaatgtcacaggtgcttgactgcgcccgcctctgacagacacacaaggtactgtcaggtgcttctgttgccatttctggatgctcgttctttgacccaggcacacagctctgattttcccatcagaaatcctctgaaactgagtgcagaagagagtagagtggtgtgtgcattgacagtatgggctagagggtgtttctttcctaccaactcactctgttctcctcccaggatgacattattgacgatgtggagagttttgttgctgccgcggagatcctgaaagagagaggcgcctataagatctatgttatggccacccacggcatcctgtctgcagaggcccctcgcctgattgaggagtcctccgtagacgaggtggtggtgacgaatactgtccctcatgaggttcagaagctgcaatgtcccaagataaagactgtggatatcagtttgattctttctgaagccattcggagaatccacaatggagagtccatggcctacctttt

SEQ ID NO: 152685 - DNA, 433 bp, Homo sapiens
gcaaagagggcccagtcctatgcggagagactgcgtctgggtttggccgtcattcacggggaagctcagtgcacggaactggacatggacgatggtcgtcactccccgcctatgtgtcaaaaatgctactgtgcacccaggcctggagttgccattgatgatggccaaagagaagccaccgataactgtagttggagatgttggaggccgcatcgcaatcatcgtggtatggttatatgtcatccatgtgcagaggtggcactcctggctcttggtcagtaggttgtccactctgggactgtatttctaggaacgatgatccgaatggatccatgtatcctttctcacccaaactcccttgtgccaagtggcagaaacctgtatccaggtgaacatacattaaagtataacctacagataggaaatgagaaaa

SEQ ID NO: 152686 - DNA, 1955 bp, Homo sapiens
ggtgcgcaagggcacggacctcggagctctccccgttcccccgccggccatgaacgccgctcgcaccggctaccgagtcttcctcggccaactccacggccgttttgctcggagctggccaagcgcatcacagagcgccttggtgctgaattggggaagtctgttgtatatcaagagaccaatggagaaacaagagttgaaataaaagaatctgttcgcggccaagatattttcattatacagacaatacccagagatgtgaatacagctgtgatggagttgctcatcatggcttacgcactgaagactgcctgtgccaggaacattattgggggtcatcccttacatccccctacagcaagcagagcaagatgaggaagaggggttccattgtgtgcaagctgctagcatccatgctggcgacagcaggtttaactcacattatcactatgggatcttcatcaaaaggaaatacaaggctttttcagctttcctgtgggacaaccttaggagccttcaccttttcctggctttcagtattatccaggggaggaaattcccaaatttacaggaaatgcaggtcattgtaggctaagtcttcctggatgctggcaaaggaggggcccagtcctatgcgggagagactgtcgtctggggttttgggccgtccattcacggggggaaggcttcagttgcacgaaactggaacatggacgatggtcgtcactccccgcctatggtcaaaaatgctactgtggcacccaggcctggagttgccattgatgatggccaaagaggaagccaccgataactgtagttggagatgttggaaggccgcatcgcaatcatcgtggatgacattattgaccgatgttgagagttttgttgctgccgcggagatcctgaaagagagaggcgcctataagatctatgttatggccacccacggcatcctgtctgcagaggcccttcgcctgattgaggagtcctccgtagacgaggtggtggtgacgaatactgtcccttcatgaggttcagaagctgcaatgtcccaagataaagactgtggatatcagtttgattctttctgaagccattcaggagaatccacaatggagagtccatggcctaccttttccgaaacatcactgtggatgactagctttcacgagggtctcgaccctggacctctggaggggaaacatggaaaaagcagtgccatgagtggatacagtgtttcctttgcaagggaggactcgaaacagcctgggagttagatatcttcttttgcccggatttgatggggaggagggattaaaagagttcaggaaggaggacagagcttaattggataaaatatccataaacatgggccttaacatgtcctgctgtccatcagcccctgttcccttaaaaagttcctagctgcctttccttaaaaataatcctgaaaatccttattgatacttaaagaggagttaaaggcacataaagtcttaactctatcaattgttccatttagttgtttcagctcccagggaaatggaggtaatgatggttgaaccctggttagggaaggctgaagcccctgtggccctattacctatcccagttggccctctcccaaatcaacttcaagtcttttatagagaatcgtatttttctttcaggaaattgttatgcctacagcccattgaaaaatgaagcattcatgttgttacatcttccaaggatgtcagattagaaaatagcatcccacctctgggtatctgagtggctctgaagttgcaaataaaataatttgttgtcttgctagtcttttcattagacagcagaagaccatggatacagaacagcagtcaggtctgtggctggacacaaacactttcccaggttccaccctcttcctaagtgttgaagctaaatccttgttgaatactgtattttaaatcttt

SEQ ID NO: 152687 - DNA, 746 bp, Homo sapiens
  misc_feature (1)...(746): n = a,t,c or g
tctcaccattctgatgaatctgatgaactggtcactgattttcccacggacctgccagcaaccgaagttttcactccaggtgtccccacagtagacacatatgatggccgaggtgatagtgtggtttatggactgaggtcaaaatctaagaagtttcgcagacctgacatccagtaccctgatgctacagacgaggacatcacctcacacatggaaagcgaggagttgaatggtgcatacaaggccatccccgttgcccaggacctgaacgcgccttctgattgggacagccgtgggaaggacagttatgaaacgagtcagctggatgaccagagtgctgaaacccacagccacaagcagtccagattatataagcggaaagcttatgatgagagccattgagctttccgaggtgattgatagtcagagacttttcaaagtcagccgtgaattccacagcctgaatttcacagccatgaagatatgctgttgtagacccccaaagtagggaagaagataaacacctgaaatttcgtatttctcatgaantagatagtgcatcttctgaggtcanttannaggagaanaaatacaatttctcactttgcatttagtcaaaagaaaaaatgcttatagcannnatgaagagaacatgaaggctctttctcagntnatggntgatgtgtatctattgagctggaataactgagtgttgataatagtagtgnggctcatgcaactcccct

SEQ ID NO: 152688 - DNA, 409 bp, Homo sapiens
  misc_feature (1)...(409): n = a,t,c or g
tttagtttgtggcttcatggaaactccctgtaaactaaaagcttcagggttatgtctatgttcattctatagaagaaatgcaaactatcactgtattttaatatttgttattctctcatgaatagaaatttatgtagacgcaaacaaaatacttttacccacttaaaaagagaatataacattttatgtcactataatcttttgttttttaagttagtgtatattttgttgtgattatctttttgtggtgtgaataaatcttttatcttgaatgtnnnnnnnnnnnnnnnnnnnnnnnnnnnnnnnnnnnnnnnnnnnnnnnnnnnnnnnnnnnnnnnnnnnnnnnntaaaaaaaaannnnnnnaaaaaaaannnnnnacaaaaannnnnnnnnnnnggcccctttttt

SEQ ID NO: 152689 - DNA, 872 bp, Homo sapiens
agagcacagcatcgtcgggaccagactcgtctcaggccagttgcagccttctcagccaaacgccgaccaaggaaaactcactaccatgagaattgcagtgatttgcttttgcctcctaggcatcacctgtgccataccagttaaacaggctgattctggaagttctgaggaaaagcagctttacaacaaatacccagatgctgtggccacatggctaaaccctgacccatctcagaagcagaatctcctagccccacagacccttccaagtaagtccaacgaaagccatggaccacatgggatgatatgggatgatgaagatggatgatggaccatgtggggacagccaggactccattgactcgaacgactctgatgatgtagatgacactgatgattctcaccagtctgatgagtctcaccattctgatgaatctgatgaactggtcactgattttcccacggacctgccagcaaccgaagttttcactccagttgtccccacagtagacacatatgatggccgaggtgatagtgtggtttatggactgaggtcaaaatctaagaagtttcgcagacctgacatccaggtaaatcctttaacagacacacctgatggttctgactagcgctcaagtctaggaaaccacagtttgcatattcattcattcattcatccattcattcatccattcagcaagaattcattcatattctactttatgaccattgaatacaaatctttttctgcttggcggtttttgtaagtctacataatttctctctagatttgattctcaaacacaattctactttttgaaatcctggatcagttattttcagattaaaataaatggaaaacaccaattatt

SEQ ID NO: 152690 - DNA, 1699 bp, Homo sapiens
ttttggaccctgtacgtaccggccgaattcttgatcgccgtcgcaccggcccaaatttccgggtagagccacgcgtccgggaggaggcagagcacagcatcgtcgggaccagactctgtctcaggccagttgcagccttctcagccaaacgccgaccaaggaaaactcactaccatgagaattgcagtgatttgcttttgcctcctaggcatcacctgtgccataccagttaaacaggctgattctggaagttctgaggaaaagcattttttacaacaaatacccagatgctgtggccacatggctaaaccctgacccatctcataagcagaatctcctagccccacagaatggctgtgtcctctgaagaaaccaatgactttaaacaagagacccttccaagtaagtccaacgaaagccatgaccacatggatgatatggatgatgaagatgatgacgaccatgtggacagccaggactccattgactccgaacgactctgatgatgtagatgacactggatgattctcaccagtctgatgagttctcaccattctggatgaatctgatgaactggtcactcgattttccccacggccttgccagcaaccgaagttttcactcccagttgtccccacagtagacacatatgatggccgaggtgatatgtgtggtttatggactgaggtcaaaatctaaggaagtttcgcagacctgacatcaagtaccctgatgctacagacgaggacatcaccttacacatggaaagcgaggagttgaatggtgcatacaaggccatcccccgttgcccaggacctgaacgcgccttctgattgggacagccgtggggaaggacagttatgaaacgagtcagctggatgacccagagtgctgaaacccacaggcaaccaacaggtccagattatataagcggaaagccaatgatgagagcaatgagcattccgattgtgattggtaggcaaggacttttccaaaagtcagccgtgaattccacagcccatgaattttccagcccatggagattttgcctgtttgtagcccccaaaagtagggaagaagataacacacccctggaattccggtattccccaggaattagatagtgcatcttctggaggtcaattaaaaggaggaaaaaatacaatttccccactttgccatttagtccaaaagaaaaatggctttatagccaaaatgaaagagaaccatgaaatgcttctttctccagtttattggttgaaatgtgtatctatttgagtctggaaataacctaatgtgtttgataaagagttgagtgtgggggcttcatggacaccccctgtaaacgtaaaagcttcaggggttatgtttatgttcattctatagaagaaatgcaaactatccctgtattttaatatttgttattctctcgatgaataggaaatttatgtagaaccaaacaaaatacttttacccacttaaaaagagaatataacattttatgtcactataatcttttgtttttttaagttagtgtatattattgttgtgattatctttttgtggtgtgaataaatcctttatcttgaatgtaataagaatttggtggtgtcaattgcttatttgttttcccacggttgtccagcaattaataaaacataaccttttttactgcctataaaaaaaaaaaaaaaaaaaa

SEQ ID NO: 152691 - DNA, 654 bp, Homo sapiens; identical to SEQ ID NO: 115110

SEQ ID NO: 152692 - DNA, 5266 bp, Homo sapiens; identical to SEQ ID NO: 132972

SEQ ID NO: 152693 - DNA, 1465 bp, Homo sapiens
tgcccagatcagcccccagagcagcctcatggctggaggatccaagagaggttagatccgtctgtctgtctgctcctcctgttcgacagtcagccgcatcttcttttgcgtcgccagccgagccacatcgctcagaacacctatggggaaggtgaaggtcggagtcaacggatttggtcgtattgggcgcctggtcaccagggctgcttttaactctggtaaagtggatattgttgccatcaatgaccccttcattgacctcaactacatggtttacatgttccaatatgattccacccatggcaaattccatggcaccgtcaaggctgagaacgggaagcttgtcatcaatggaaatcccatcaccattcttccaggagcgagatccctccaaaatcaagtggggcgaatgctgggcgctgagtacgtcgtggaagtccacttggcgtcttcaaccaaccatggaagaaggctggggctcattttgcaggggggagccaaaaggggtcatcatctctgccccctcttgcttgatgccccccatgttcgtcatggggtgtgaaccattgagaagtattgacaacagcctcaagatcatcagcaatgccttcctgcaaccaccaacttgcttagcaacccctggccaaaggttaattccatgacaactttgggtaatcgtgggaaggactcattgaccacagttccatggccatcactggcaacccaagaaagactgtggattggcccctcccggggaaaactgtggccgtggatgggccgcggggctcttccagaacatcatccctgggcctctactgggcgctgcccaaggcctgtgggcaagggtcatccctaaggctgaacgggaaagctcactggcaatggcctttccggtggtccccaactgccaaaacgtgtccagtggtggaccttgacctgccgttctagaaaaaccttgccccaatatgattgacatcaaggaagggtggtgaagcaggccgtcggaggggccccctcaaggggccatcctggggctacactgaggcacccaggtgggtctcctctgactgtaacagcggacccccagtctttccaccttttgacgctggggcatggcattgcccctcaacgacccactttgtcaagctcatttcctggtatgacaacgaatttggctacagcaacagggtggtggacctccatggcccacatggcctccaaggaagtaagacccctgggaccaccgagccccaagcaagaggcacaagaggaagagacgagaccctcactgctggggagtccctgccacactcagacccccaccacactgaatctcccctcctcacagttgccatgtagaccccttgaagaggggaggggcctatgggagccgcaccttgtcatgtatccatctaataaagtatccctgtgctcaaccaaaaaaaaaaaaaaaaaaaaaaaaccc

SEQ ID NO: 152694 - DNA, 677 bp, Homo sapiens
accacagtggtgtcgagaaagtcaggcacgtagctcagcggcggcccgcggcgcgctgcgtcatgtgcctctagcgcgggtctcctggtccttttgccattcatgccgatgcttcatcgtaaaacaccaaacttcaccgggcctcccttcccgaaggggttcctctcgaagctcatcccagcaactggcgcaggccaaccggcaagccccccccaattaattcgcgttcaacgtgttcccggaccaagtttaattctttcggcggctccagcgagccgtgcgcgctgctgcagcctgcacagcatcggcaagatcggcggcgcgccagacccggctccctacagcaagctgctagtgcggccctgctggccgaagccgcctgccgattcaagcccggaccagggtctaacatcaactatttacgacatgaaccgcggccaaatgtgggctgggaacaacttccacctttcgccttaagagcctgcagggaacccacgctgtctggcgctgggctccacccgggaaacccggccggaacgcctgtgttgctaggccccgcccaccccaacctttcttgttggggaagaaataaaacggtgtagaggctaaaaaaaaagaaaaaaagacaagagagggggcccaccttacggaaaatttttgtcgcgaggggggaaaat

SEQ ID NO: 152695 - DNA, 470 bp, Homo sapiens
agaagaggccgcgaccggagagaaaaagcggagtcgccaccggatagaagtcgactccctagcagcagccgccgccagagaggcccgcccaccagttcgcccgtccccctgccccgttcacaatgcagcctgcttctgcaaagtggtacgatcgaagggactatgtcttcattgaattttgtgttgaagacagtaaggatgttaatgtaaattttgaaaaatccaaacttacattcaggtaagttaagctttttatccaatgatgtaaaatagtcattcacacaactgaataactttgactggcttgtcttttcattgaagttattattaatctttgtctctttgaagaggcttaattctttctttattattttatacagctgtctcggaggaagtgataattttaagcatttaaatgaaattgatctttttcactgtattgatccaaatgtaagtagtctttatgcttt

SEQ ID NO: 152696 - DNA, 1746 bp, Homo sapiens
  misc_feature (1)...(1746): n = a,t,c or g
ccgggcattttgctgcgtcaccagccgccgcccggcctcaccacccctcgtttgcacgcacgcacgttcattctccgtcctcgcgccccttttcctacactttcctcttctccccgaccggaggagccgctctttccgcgcggtgcacttctggggcccgaggtcgagcccgccgcatgccgccgttcgcctgagggaagcgagaagaggccgcgaccggagagaaaaagcggagtcgccaaccggagagaagtcgacctcccctagcagcagccgccgccagagaggcccgcccaccaaggttcgccgtccccctgccccgttcacaatgcagcctgcttctgcaaagtggtacgaatcgaagggactatgtcttnaaatgggaatttgtgtttttgaacacattaagggatgttaaatgtaaatttttgaaaaatccaaaacttacaatttcagttgtctccgggagggaagtgataatttttaaggcatttaaatggaaatttgatctttttcacctgtattgattccaaatgatttccaaggcttaaaaggaacggacagatcaatttttatgtttgttttacggaaaaggagaatctgggccagttcatggccaaagggtttaacaaaaggaaaggggcaaaggtttaatttgggtttagtgtcgacttcaataaattgggaaagactgggaagatgattcagatgaagacatgtctaattttgatcgtttctctgagcatgatgaacaacatgggtggtgatggaagtggtagattacccagaagtagatgggagcagatgatgattcacaagacagtgatgatgaaaaaatgccatatctggagtaaggaatattgtcatcacctggattttgagaaagaaaaataacttctctgcaagatttcataattgagagaattcctgagttgatcctgagttgatagctctaaaggcagatatgctgtatttgcccactttaacccatttttcaaccctgttgtgttttaaaaaggcttcactaaagggttgatatgtaccattgtatggggcaatttttaagtcagcttaaggcaataaaccttatgccatgaacattttcccaggactttcatgaagctgttgaggtcctaggcaatttaatgcagcagttgcgattaaattaaaaacatctccacctaagtctccttttcttcataacatagatactgacatggataggaagctctcagctttaggggaaagagaataaatttttagattataggaacatgggattcaaaagtgactgggaacaaattgggctgacacctttactgggtaacctgctatttcttctgggtgttatccttcaggattggtttccactaaaattttatttttcaaaaaaatttacttcacattaattctatggtaagtgatgacttgtccagtgttccaggtgtaatcttagctaaaaactagagaatggccctaacttaggatggttttttgaggcctataccaattggtaattgtttggaccccttaaggctttttaccatctcttaggcatgggagggacggaggaaaggctgttaccattgtttgctttgaggagtctgtacatttagtcccagatttgtatttgcactgtcagtatggcacatgagcgaaaacacgtttcataccctactggatctcttatttcgctttttttgaatccgactaatacccgccctgggacacactgtcgtttacgtc

SEQ ID NO: 152697 - DNA, 388 bp, Homo sapiens; identical to SEQ ID NO: 126322

SEQ ID NO: 152698 - DNA, 511 bp, Homo sapiens; identical to SEQ ID NO: 126323

SEQ ID NO: 152699 - DNA, 550 bp, Homo sapiens
accacccggctttgtgggcggagtccatgagagggttggagccccgctcgtggcaccgcccacccaagcctaggccggccttcgtggacacgcatttccggcgacgcctcggtactgacctctgcagagccgggtggagcccattgacgtccagcgaagcgaggagcagcgatggacggtcgggtgcagctaataaaggccctcctggccttgccgatccggcctgcgacgcgtcgctggaggaacccgattccctttcccgagacgtttgacggcgataccgaccgactcccggagttcatcgtgcagacggcctcttaccccctcgtgggcgagaacacgttcttcagcgagacctatttcctccccacccccagaaacctcttgtgttcttgcctaggcccaggtgttcctggcagccaaatcgagtctctcattttctcttgtggaccagttagttttgcccataacgcagtattctgagtttgcaactgtctctctgatgtgtgccttttgttcaacacagtaacccctgcattctgctctgctc

SEQ ID NO: 152700 - DNA, 1504 bp, Homo sapiens
  misc_feature (1)...(1504): n = a,t,c or g
tttgtgggcggagtccatgagagggttggagccccgctcgtggccccgcccacccaagcctaggccggccttcgtggacacgcatttccggcgacgcctcggtactgacctctgcagagccgggtggagcccattgacgtccagcgaagcgaggagcagcgatggacggtcgggtgcagctgataaaggccctcctggccttgccgatccggcctgcgacgcgtcgctggaggaacccgattccctttcccgagacgtttgacggcgataccgaccgactcccggagttctatcgtgcagacgtgctcctacatgattcgtggacgagaacacggttctccaagcgacgccctgaaaggtgacgttcctcatcacccgcctcacagggcccgccctgcaagtgggtgatcccctacatcaagaaggagagccccctcctcaattgattaccggggctttctggcccgagatgaagcgagtctttggatggggaggaggacgaggactttttaggccgggagaccctcggggcctggggcgggggtgctctggggagggtccgctgtgttactggccgccgccagggtcgccaccggcgccctcctttccgcgcctctccccccctcgagccgcccgcgatgtcccctgcgctcctgttccctcccgcgtagtgcttgcctttgttccaggaatagcgctccaggctcctgctgccgcccctgggcctcactctggagcgagccgccgccctctccttccagccagccagcccctcccatgtacatttggacgctgtcctgcgctccagttgcacaaagctgagctcctgttacacactggacagaccacccactgccgccgctgccaagccctctcctccccaccagactgccagacgacttacatcattttggcccacagaccctgcgctgccaaaagccatcgcccatccatcgcatccccaccgacaagactgctggctcctaagtgaatctggactcaacctcggaggttatctgggctggccaacagtccctggactagtgatccagatcagctggccgctcccccaagggatctgtcaccttcagcgagacctatttcctccccaatcccagagactttttgtgctcctgccacatggctgccagggctcagttgtgcctggcaagccaaattcgagtctctcattttctctttgtggaccaagttagtttttgcccataaacgcagtatttcttgagtttgcaactgtctctctgatgtgtgccttttgttcaacacagtaacccctgcattctgctctgctctaaatacactacctggagaaaagtattttccatattttcaataaatgtcagagcattattgagnnnnnnnnnnnnnnnnnnnnnnnnnnnnnnnnnnnntttttgggggggggcccggcccccaattcccctttagggggggggataaaaaattccggggccggggtttaaaaaccgcggaaaggggaaaaaag

SEQ ID NO: 152701 - DNA, 288 bp, Homo sapiens; identical to SEQ ID NO: 134085

SEQ ID NO: 152702 - DNA, 381 bp, Homo sapiens; identical to SEQ ID NO: 134086
  misc_feature (1)...(381): n = a,t,c or g

SEQ ID NO: 152703 - DNA, 961 bp, Homo sapiens; identical to SEQ ID NO: 134087

SEQ ID NO: 152704 - DNA, 756 bp, Homo sapiens
gaaagggcataaacaggatgtggtgttggatgaaaccttgctcctactgcacagcccgcccccctacagccccggtccccacgcctagaagacagcggaactaagaaaagaagaggcctgtggacagaacaatcatgctcttcctgggtccctccggcagtctgactccctggtggtgtgcgaggtagacccagagctaacagaaaagctgaggaaattccgcttccgaaaagagacagacaatgcagccatcataatgaaggtggacaaagacccggccagatggtggtgcctggagggaaagaatttcaagaacatttccccccagagggagcttcaaaatgggatttccccggagagacaagcccagggttcgtggtttacagcttacaagtacgtgcatgacggatggcccgagtgtcctacccttttgtgtttcatctttcctccacgccctgtgggctgcaagccggaaacaacagatgatgtattgcagggagttaaaaacaggctggtggcagacagcagagctcacaaaaggtgttccgaaatcccgcaccacttgattgacctcactgaggccttggcttccaagaaaagttgtccttcctttcgttgatctctggggctggggactgaattcctgatgtctgagtcctcaaggtgactggggacttggaacccctaggacctgaacaaccaagactttaaataaattttaaaatgcgaaaaactcggaaaaaaaaaaaaaaaaaa

SEQ ID NO: 152705 - DNA, 2455 bp, Homo sapiens
tgaaattcttctctgtccatccttacccttcaactgtcagtatattcttgttcttcttggaagcagaataagagctcgggaaccgccaatggcagtacaagctgtaacacagggtccaccaaaatatactaaatctgttctgaaaaagggagataaaaccaactttcccaaaaagggagatgttgttcactgctggtatacaggaacactacaagatgggactgtttttgatactaatattcaaacaagtgcaaagaagaagaaaaatgccaagcctttaagttttaaggtcggagtaggcaaagttatcagaggacatgtagctaggaagtttttagatgatgaagcagaactttctgaagaagatgcagaatatgtttcatcagatgaaaatgatgagtcagaaaatgaacaagattcctcattacttgactttttaaatgatgaaactcaactttcacaggctataaatgcttggtttgcctgtaaatcaccatcaatcatctgtgtagatgatgaagttgtatcttctgtatgtgctttcttttcctctggttcttctgatctatataaaacgtcagaatggaaactttcaaaactcccacagtttcttgcagaacataaattattaggaaacattaaaaatgtggccaagacagctaacaaggaccacttggttacagcctataaccatctttttgaaactaagcgttttaagggtactgaaagtataagtaaagtgtctgagcaagtaaaaaatgtgaagcttaatgaagataaacccaaagaaaccaagtctgaagagaccctggatgagtttattcagttgcgaagggaattagcttctgtaaatggtcatagtggtgatgatggtcctcctggtgatgatctaccatcgggaattgaagacataaccgatcctgcaaaggtaaccagtcttattctaaagttcgtcagtggccagctaattacagaaatagaaaacatgagacatagaatcattgagattcatcaagaaatgtttaattataatgagcatgaagttagtaaaaggtggacatttgaagaaggtattaaaagaccttactttcatgtgaaacctttggaaaaggcacaactaaaaaactggaaagaatacttagaatttgaaattgaaaatgggactcatgaacgagttgtggttctctttgaaagatgtgtcatatcatgtgccctctatgaggagttttggattaagtatgccaagtacatggaaaaccatagcattgaaggagtgaggcatgtcttcagcagagcttgtactatacatctcccaaagaaacccatggtgcatatgctttgggcagcttttgaggaacagcagggtaatattaatgaagccaggaatatcttgaaaacatttgaagaatgtgttctaggattggcaatggttcgtttacgaagagtaagtttagaacgacggcatggaaatctggaagaagctgaacatttgcttcaggatgccattaagaatgccaaatcaaataatgaatcttcattttatgctgtcaaactagcccggcatcttttcaaaatacagaaaaaccttccaaaatcaagaaaggtgcttttggaagcaatcgaaagagacaaagagaacacaaagttatacctcaatttacttgaaatggaatatagtggtgacctcaaacaaaatgaagaaaatatcctaaattgttttgacaaagctgtacatggttcattacctattaaaatgagaattacattttctcagagaaaagtggaatttcttgaagattttggttccgatgttaataaagctgtaactgaagttcgtgaagtcaccagaaaatcagtccctcgtaattccttagaaagtgctgagtaccttaaactcataactggcttattaaatgcaaaagactttcgtgatcgtattaatgggattaagcagcttttatcagatacagaaaataatcaagaccttgttgttggaaacattgtgaagatttttgatgcttttaaatctcgacttcatgattctaatagtaaagtaaatctggtggctctggaaacaatgcacaaaatgattcctctacttagagaccacttatctcctataatcaacatgctaattccagcaatagtggataacaatctgaattccaagaatccaggcatctatgcggctgctacaaatgttgttcaggcactgagtcagcatgtaggagacacatcaaggatgtttaggagaacaaagagctatgacagcctgctgactaccttaattggcgctggaatccgaattcttttcagttcctgccaagaagaaaccgcagatttgctaaaggaactgtctttagtggaacaaagaaagaatgttggtattcatgttccaacagtggtgaatagtaataaaactcacttcaagaaatctccatgtatgcacaagtaa

SEQ ID NO: 152706 - DNA, 1011 bp, Homo sapiens
atggttgataaatgtcgctaccatcagaggtcgcttcacaaggtgtctaattcagaatcgaagatctctagcggtcttctactcagtcgactgcagagacgaccgcgggggcggggcgatgccgaactgcggcgggctggctcagtaaagcggaggcagcgggggaagatggcggcggccgttccacagcgggcgtggaccgtggagcagctgcgcagtgagcagctgcccaagaaggacattatcaagtttctgcaggaacacggttcagattcggctgtgcaacaagttattactaacctgctaattgggcagatagagcttcgttctgaagattctccagatattttgacatattctcatgaaagaaaagttgaaaagcttattgttccgcttggtgaagaacttgcagccatccaaaagacctatatccagattcctgaacaagatgaaacctatttagaggatagtttttgtgttgatgaagaggagtcttgcaaaggccaatcaagtgaagaagaagtttgtgttgattttaacttaataactgatgattgctttgcaaatagtaaaaagtataaaactcgacgtgcagtaatgctaaaagaaatgatggaacaaaattgtgcacattcaaaaaagaaattatccagaattattttaccagatgattcaagtgaggaggagaacaatgtaaatgataaaagagaatctaatattgcggttaacccaagcactgttaagaagaacaaacaacaggaccattgtttaaattcagtgccttctggatcttctgcgcagtccaaggtgcgttctactccaagagttaatccattagcaaagcagagcaaacagacatcgctgaatttaaaggatacaatttccgaagtctcagacttcaaacctcagaatcataatgaagtccagtctaccacaccacccttcactactgttgattcacagaaagactgtagaaaatttccagttccacagaaggttctctcagaatga

SEQ ID NO: 152707 - DNA, 2044 bp, Homo sapiens
atggttgataaatgtcgctaccatcagaggtcgcttcacaaggtgtctaattcagaatcgaagatctctagcggtcttctactcagtcgactgcagagacgaccgcgggggcggggcgatgccgaactgcggcgggctggctcagtaaagcggaggcagcgggggaagatggcggcggccgttccacagcgggcgtggaccgtggagcagctgcgcagtgagcagctgcccaagaaggacattattcaagtttctgcaggaacacggttcagattcgttacttgcagaacataaattattagggaaacattaaaaatgtgggcaagacagctaacaaggaccacttgggttacagccgtataaccatctttttgaaactaagccgttttaagggtacctgaaagtatgaagtaaagtgtctgagcaagtaaaaaaatgtgvasgcttaatgaagataaacccaaaagaaaccaagtctgaaagagacccctggaatgaggggtccaccaaagatatactaaatcctgttcctgaaaaaggggagataaaacccaacttttcccaaaaaggggagatgtttgttcacttgctggtattacagggaacactaccaagatggggactgttttttgatacctaatattccaaacaagtgcaaagaagaaggaaaaatgcccaagcctttaaggttttaaggtccggagtaggccaaagttatccagaggatggggatgaagctctcttgactatgagtaaaggagaaaaggctcgtactggagattgaacccggaatgggccttccggaaagaaaggactgcctgatgccaaaattcccaccaaatgcaaaactcacttttgatagtggaaattagtggatattgattgaaataggcagtgcttcagcctctaagggttattagcaaaccaaatgggataaaactttgggccccttgaagaaaatttacaccaactagttagaacttgttactattgtaaaggaagagtcaactggaaaattcaaggagttaataaaatttgtttacttggtcccagcttttgagagataaatcccttatgaatccctggtctaaaatactttcctacagctgtgtaaaatactggatcaaggagaactttttccttttacctcatgttgtaaacttaagaagctcaataaaaattgatccaactgtcttgatctgactgtgatttgtttggtgttaatatattattgttctgattagggaattggaactaaggacctcatcaaaccagggagtaactcccagtaaaattatctggacagattgcctgtataatgagaaggcaaaagcataaggcttgaggggaaacaaaatgctaaaagcagaaaaatcttggcaggaagatcaagacctgaatttagaaaaggtgtacttcaaaaccaatgagccactaataaaggtgaacataaggttaatattactaattgatccccctcaaaataaattcataaacaattactggatgagtcttccgttttattacaaaaatgaagatcagtttgatcaaaatgaaagcttgttcacaagttttacatgaatattctaaatacaaagtctcctgaaacaacatacttttgatatgattttcatttttaaagggatgcaaacattccattttctcatttataatctattccaaggcaaagtattttaataatgtatcctttctgcagttagatcacaattcacaagtataactgaaacagacaaaaccttgtcagcaaaggttaaaagtccttttttctttaaaaaaaaaaaaaaaaaaaaaagggggtaaatatccagcccttatgtgttttcagaattttgtactacactgacatgatttgcagtcaggtttttcttcctaccccttaaggctacaaaaattctgttgcaaatgcattgcaaaagaattctagaccacttaatgcaaaaatcaaaaaatagtttttcaataaaaagtaaattttataaatggtaggaaacagtatctgtggtaagctactaattgacatttt

SEQ ID NO: 152708 - DNA, 627 bp, Homo sapiens
gcgctatacgagccgtggcttattgtgcagacatggcccagtccatgaaccacaccacactccaccagtcccgaatatggcacagaattggtatcaagaaaccccgatcacaaacagaccaatctcttacgggggtggaccccatgttcctgaagaacatgcgctttgccaagaagcacaacaacatgggcctaaagaggatgcaggccaacaatgccaaggccatgagtgcacgtgccgaggctatcaaggccctcgtaaagcccaaagaggcttatctctagattccaaacggtgtcagccgcaagctcgatccacttgcctacattgcccaccccaagcttgcgaagagggctctggcccgcattgccaaggggctcaagctgtgccggccagaggccttggccgaggccagggccaaggatcaaaccaaggtccagggtgtagccccagcttgagctctcagctcatgctcccaaacgtacccaggcccctacaaaggcttcagagtagacatctctgccaacatgatgacagaatgactggtgcgaccccccacccccgcccctgggctaccatctgcatggggctggggtcctcctgtgctatttgtacaaataaacctga

SEQ ID NO: 152709 - DNA, 832 bp, Homo sapiens
  misc_feature (1)...(832): n = a,t,c or g
gcggtgcnattgaacgcctgcaggttcggatcgcgtgttcgtgccgcgacgcaattcctgggtcgagccacgcgtccgcccacgcgtccgaggcgcttcgggagccgcggcttaatggtgcagacatggccaagtccaagaaccacaccacaaacaaccagttcccgaaaatggcccaagaaatggtatcaagaaacccccgatcaccaaagatacgaattctcttaaagggggtggcccccccaagtttccttgaggaacattgcgctttgcccaaagaagcaccaacaaaaaagggccctaaagaagattgcaggccaacaaattgccaagggccatgagtgccacgtgcccaaggcttatcaaggcccctccgttaaaagccccaaggaggtttaagccccaagatcccccaaagggttgtcagccgcaagctcgatcggacttgccctacattgcccaaccccaaggtttgggaagcgttgctcgttgcccgtaattgccaaggggcccaaggctgatgcccgccaaaagcaaagggccaaggccaaggccaagccaaggccaaggatcaaaccaaggggttcaaaccaaggcccagggttcaagccccagtttcagtttcagttccaggctcccaaacgtacccaggccccttacaaaggcttcagagtagatatctctgccaacattgaggacagaaggactggtgcgaccccccaccccccgcccctgggctaccatctgcatggggctggggtcctcctgtgctatttgtacaaataaacctgaggcaggaataaaaaaaaaaaaaaaaaaaaaaaaaaagggc

SEQ ID NO: 152710 - DNA, 1064 bp, Homo sapiens
atagtaagaacccaattttatttagaaaccagcaagcagcgtatgcagttaagaacccaattttattacaatttgtacataaatgcccaggaaaagttggaaggtgctacattaaggtgttaagagtcgccatgggggtggctgatgtgagaatttaaggtgttttctctttaggataaaatatcctaccgcccccaggagtgaccacgtgaggctgcataatggccgtctctgtgtctgcaagtgatgtctgcagtgacgaacgcccggggtggtgagctctaatggccttctctgtgtctgcagtgatgtctgcagtgacgaacgcccggggtggtgagctctaatggccgtctctgtgtctgcagtgatgtctgcagtgacgaacgcccggggtggtgagctctcgactttagagagagaattgcatcctcctgagtacaagggcgcagtctgtgtttaatgcacagggcactgctctctggagttttcaggaccctgccactggtgaagggggtgccgggcatgggggtcggctgatgaggccctccttgctgccgagtcagggagcctctgcatgctgacgaggtttggagaatcgaaactggctccggtgggcaagtttcctaaaatgtgcctcctcgagttgcccttcctctcccaccatctgtcccgaggttgctccggtgcgagtgaaggacagctgtgccttcttgaggtgccagccacggccagggtgggggtgcacaagccgtcccagagccggggccttgaattctcctgggtcctcatgtccgacctttgctcagggccacccctgtgaacgtggtcagccacagacttgccatcagtgatgaacctgccctggcgctgcccgtggccccagctctggaggcgacatccttccgtctcccttgatctctgcagcatttggctcctttcatctcccttcatctctgcagcatttggctccttccgtctcccttcatctctgcagcatttggctctgtggctcttctgccctgaagctacagcagtgagaggggtggggacatgcaacgaaa

SEQ ID NO: 152711 - DNA, 479 bp, Homo sapiens
cattaccagcaacaacggcaacagatgatgtgcctggagcggcatataaaaccacccaaggagctggacacggcctcctcggatgaggagaataaggacggagacttcacggtgttcgagtgcccgggcctggccccgaccggggaaatggaggtgcgcaaccctctgttagaccacagcccacctgctccccgacctcgaggcccccggggaggggcagggcctggagcttcccactaaaaacatgttttgatgctgtgtgctttaggctgggccttgggctccaggccctgggaccccttgccagggagacccccgaacctttgtgccaggacacctcctggtcccctgcacctttcctgtttggtttagacccccaaactggagggggcatggaaaaccgtagagcgcaggaacgggtgggtaattctagagacaaaaaccaaaaaaagtccatttcagaaaaaaaaaaaaaaaaa

SEQ ID NO: 152712 - DNA, 1469 bp, Homo sapiens
  misc_feature (1)...(1469): n = a,t,c or g
tccttggcatccgcctcttcttcctcctgcgtcctcccccgctgcctccgctgctcccgacgcggagcccggagcccgcgccgagcccctggcctcgcggtgccatgctgccccggcggcggcgctgaaggatggcgacgccgctgcctccgccctccccgcggcacctgcggctgctgcggctgctgctctccggcctcgtcctcggcgccgccctgcgtggagccgccgccggccacccggatgtagccgcctgtcccgggagcctggactgtgccctgaagaggcgggcaaggtgtcctcctggtgcacatgcctgtgggccctgccttcagcccttccaggaggaccagcaagggctctgtgtgcccaggatgcgccggcctccaggcggtggccggccccagcccagactggaagatgagattgacttcctggcccaggagcttgcccggaaggagtctgtgacactcaactccgccccatacccaaggaccgacagcggctcccggagcctgccaccctgggcttctcggcacgggggcaggggctggatctgggcctcccctccactccaggaacccccacgcccacgccccacacctccctgggctcccctgtgtcatccgacccggtgcacatgtcgcccctggagccccggggagggcaaggcgacggcctcgccctctgtgctgatcctggcgttctgtgtggccggtgcaaccgccctctcaggagccctcctctgcttggtcagggctgcagcgtgagatccgcctgactcagaaggccgactacgccactggcgaagggccccctggctcacctgcagctccccggatctcgcctggggaccagcggctggcacagagcgcggagatgtaccactaccagcacccaacggcaacaaaagtttgtgctggatagcggcataagatgccacccaaggagctggacacgggccctccctcggatgaggagaatgaggacggagacttcacggtgtacgagtgcccgggcctggccccgancgggggaaaatggaaggtgcggcaaacccttctgttcgaaccacgcccgcactgtccgcgcccctgcctggcccccaagctcacccgcctgcaactgccatgacctggaggcagaacagacgggcgacctgctccccggcgctcgagggcccccggggaggggcagggcctggagcttccccactaaaaacatgttttgatgctgtgtgcttttggctgggccctcgggctccaggccctgggaccccttgccaagggagacccccgaacctttgtgccaaggacacctcctggtcccctgcacctctcctgtttggtttagacccccaaactggagggggcatggagaaccgtagagcgcaggaacgggtgggtaattctagagacaaaagccaattaaagtccatttcagacctgcgaaaaaaaaaaaagtcgacg

SEQ ID NO: 152713 - DNA, 452 bp, Homo sapiens
ctttcctgagctgtggcccggcagggaagatcgcctggacgtggagccagcatcgccccgtgccctcggcgtttgcatttgtaaacttgtggtcttcctatgtgtcagaaacaaactgtgtcttggggggggaagaccccttcgctgcgccgcttcccgccgcagcgcccgcgccctccgaggggacagccgccctctggagctcgctgggagcatcaccgcctggaacgaccgcgccgcggaggagccggcgcccatctccacccgcacggctcgccggtccagagccatgagccaagagccctcttcacgctgctaactccaggggacagacgaagggacatctttggaaaacgctggttttggtttttaaaaagcccaacttttttttttttaatttccataactaaagtgttcagactggagtgctctccttcaggcctcttcatagc

SEQ ID NO: 152714 - DNA, 2077 bp, Homo sapiens
aattcggcacgatgaggaaatggttactcattctgtataaaagttttgcaagagaatgaattttttattctgtaatcaaaaagcaataacttgaaattcactctgtaatattataggtcagaattatacaagttttaccaaattgttacacttattctccaagctgccagaacctggtatctgtatctgtaaaaccaaattaacttttgcttaaatgggaagtatacatatatctgtatagatacattacccctttacatgtttaacatacacacacttaaacacataaatactagtgtgattatatctttggagtttgcaatatagcataaaggacaagtagaactgcacattaagattacctaccgaagcaactagatgtggctgggacacaatcaaaggaggaattttgtccacaggaaggtgaggaaattccaaatgaagcctagatcttcagtatcataaaaaggcagagctggccaggcacagtggctcatgcctgtaatcttatcactttgggaggctgagatgggaggatctcttgagaccaggtgttcaagaccagcctcatcaacatagttgagaccccatctctattaaaaaaataaataggcagagctaaactaaccccagtgtcacaaaactcaactggtcatataaatgagtgaaacaggcctctcacacaagcgatgtaaaaccagctgggagcagtgggagctgtggcaaactaaagtgcccaagccgcatttaaaaagggcatctgttcagctccatctgcttgctgcggtgcaagaatgctaaaccaggattaccagttcttcacattttttgaaatccaaattttcatgagaaacattctcatttttaaatatcaagaagtgattttaaaatgtttaaatggtgctggttaaacaaacacgtctgcagctggatttagcttgcaagctgccaagttgcaacctcttttcattctaggaacttctgtcatttttcatcatagcaagtctatgcggacaaaaagcctccaaactttccaactggtgtaggcccagtacagctggcaagggtcattaggaatataatgggctatcccccctctgccaaataagactatccacaaccccagctcagacacagtggttatatgattttgtgtccatacaggagaggccttggtgtcttcacatacattctctgagccaacatctatccagcagccctgacctcctgctataatttaagtctatttccttttaatctaataaggagttgatagtaaaaagggcaggtgatgggaaatcagtgtattaatcacaatgggagtatattggggcaactccacagcttatagtttgataaaggcaaatacatgaaaaataaaaatgctactaatgccccaaggtgtctatcaaaatgatgtagggggtatcttaaactgtccaaggcaatcatgcattgaactttattcctatgcagagccaaaacgaatagtgttgataaaatagctaaactttctaaacctggagaggaggctaccagtgcccagagagttatggtctcttttggctttaaatggtaatcttaaaagtggccattgggctcttcctttgttttgggatagatatatatagagagagatactataaggaagtttatttcttaggaaagtgccactgaataaatgtatttcttttaccagtgtaatatgggggtggggatatgcggaaagaaatgtgtatttttgctagttgcctacccttctgagataaataagcacaatcttgccaatggatcccaataaccccagttagggtattcatagattagtatttcaagtttgcctgtagattgtgtgtgcgtgtgcctaagtaaaagttcccatgattcacaattttagtattaacccatgttgcaaaagctgttactggccaacagattgtaatgatgtgtaccatataacacaagcattaactaggcattaacgtttggtaaagccaaatatacccatgcagaagtcttcatttttaatagccagactgccttaaaacaagttaaatcttaaaaaaaaaaaaaaaaa

SEQ ID NO: 152715 - DNA, 433 bp, Homo sapiens; identical to SEQ ID NO: 70616

SEQ ID NO: 152716 - DNA, 6038 bp, Homo sapiens
ggtggagacaccgcctcagggctcggtgcacagtggacatttggggagcgttgtgggtgacccccacacaggcactgggaatgcaggggagagggggccaagggggaaaggggccagagtgttggctttggattcaggagggatggattccagtcctagcttgccacttattaggactcctgagagcagcctccatgaggccctggaccagtgcatgaccgccctggacctcttcctcaccaaccagttctcagaagcactcagctacctcaagcccagaaccaaggaaagcatgtaccactcactgacatatgccaccatcctggagatgcaggccatgatgacctttgaccctcaggacatcctgcttgccggcaacatgatgaaggaggcacagatgctgtgtcagaggcaccggaggaagtcttctgtaacagattccttcagcagcctggtgaaccgccccacgctgggccaattcactgaagaggaaatccacgctgaggtctgctatgcagagtgcctgctgcagcgagcagccctgaccttcctgcagggttcctcacacggaggggcagtcaggcccagagccttgcatgatccctctcacgcctgcagctgcccacctgggccaggccgtcagcatcttttcctcctgcaggacgagaacatggtgagcttcatcaaaggcggcatcaaagttcgaaacagctaccagacctacaaggagctggacagccttgttcagtcctcacaatactgcaagggtgagaaccacccgcactttgaaggaggagtgaagcttggtgtaggggccttcaacctgacactgtccatgcttcctactaggatcctgaggctgttggagtttgtggggttttcaggaaacaaggactatgggctgctgcagctggaggagggagcgtcagggcacagcttccgctctgtgctctgtgtcatgctcctgctgtgctaccacaccttcctcaccttcgtgctcggtactgggaacgtcaacatcgaggaggccgagaagctcttgaagccctacctgaaccggtaccctaagggtgccatcttcctgttctttgcagggaggattgaagtcattaaaggcaacattgatgcagtgagtgatgggggtccgggccggggctggggatccctcggggtctcccagaccagcaggaagtcaggcacatgtgacatactcagggacaggatagactgggggcgggggggggggccaagagagaaccaaccagagagcaggggcaggagaggcccttctggcagagcagcctgggaagacaagggaggaggaggcatttgtggtgcctgggattttgactgggagatataggactgcagcattgcagtggagggaggtggagggaggtgcttgagggaggcagaggttaggaaagcccatctgtttagggcatgacgattaggctggagtctggtacctcccctccattatagctctctcctgctctttcattttgttactaaaaaccagagtcctaggcgggggctgtatttgagcccaacgtcatgtaagacttaggaggtaaaaccaggactggaggccagatctcctggctcctggggccccacctgagcctagcacagggctggaccactatgccctggaggagtcccggtctgctgtggtgttgggaggttcggaggatgcagaggggttggggctgggtgggcacccgtcaggctgaccagaaggtgcctgcaggccatccggcgtttcgaggagtgctgtgaggcccagcagcactggaagcagttccaccacatgtgctactgggagctgatgtggtgcttcacctacaagggccagtggaagatgtcctacttctacgccgacctgctcagcaaggagaactgctggtccaaggtgggctgatgccacgtgttaggggcattgggtgaccagggctgactgtgtgcctccagaccacgggccaaatccctaactgaacacagatgtctcagctggaatctaaacataaccttaaattctaataggactcaggcttggaaggaactaaagaccacaagagaaacttctgaaccacaatgtgtcacaaagagatttctagtcacaaaggacagaaacatggctccctctgtccagtagaactgtttctgtggtagaaatgttctacttatgcactgcccaaatatggtagtcaccagccacatgtgcacactgagcacatgaaatgtgcctagtgcaactgggaaactgattgttttcagttttatttaattttaattaactaaatgttaaatttaaatagccatgtagggcttgtggccactatattggactatgcaggtccaaaacacaaaaggctcatataactgaacattcttggcacatccgacttcaggtagggctggatccaggaattcaaatgatgtcgtctggcttggtctttccatttgtggctgtgctctctcctatgacatctttgtttctgctgcatctttgcaggaaggttctctccatgtgacaggcaaggtggccacgggctgcttctactcatatcctccccttggtttcaaccagagtcccacagtttgagcctcactggtctgacttgtcacctgccaatgcctggaacagaggggtgggaagattcctcatgggctgagagtaggagaggggtggttccacagaagaaaatgatgcacccagaaatagtggagggattaacaagatgccatacaggcaaaacaaagccaaacagatgcccgcctaccaaagatgaaatttatcatggtaagtattgaaataagtgttagcttgtaccatcatagtaatgatagtgcagaaattggaaccaagagtcttacaaccacctagctcagcaaacgtctaatctgttatttgtaaatacacaggacatgtgtcttcatggcttcatcccctgcccatggcagacattgctaatcaatcctctgccatgagcctagctgtgaccttagataccttccctgcaaagctccaggcagccgttagaactgacccacattggcacctgttaggagacctgtcatctgcatctggtccctccccctcctctgcatggaggtctcttccgtagccctgcctggggaccaagctgaaggggaattctctgggtctggggcaggtggggctggggaagggagcaggcttctactgagctctcaacatgtctggcacctgtcatgtcctccacaccacacccagtgaggagaagttattatctccattgggcacatgagggccactgatgctaagcgaggactgtgactttcccacccacatggctgttggtgacagacaccggatttgaggacagtcctgtgtgactcagaggcctctgcttctctcttgctcctagagtcctcctgaggagtcggggcttgccctgagcccaccctgctgttgaaggtgcttcctcaggcccagctcccatggcccccacaccccctcctcatcacctcctactcccaaaaaggacaaagcctcagggaaccttttttctttttttagagacggggtcttgctatgttggtcaggctggtcttgaactcctgggcccaggcaatcttcccgcctctgcctcctaaagtgctgggattctgggccttagggaacctttttgaactgaaagtgacgctcgaagccttcctgtagagtgaggtgggtggctggggctaaccatatggggaaggagagacctggtgggggcacacagctgctatatagaggaacagaaggtgggccaggcctcccagctgtcaggaaatctggctcagtccccagaccgctgtgtggctttggggtggccagtccctctctctctgcaacactctcctcatgaggacttctgtgaaaaatgggggttgtaaccctctgagttctggggccccacccatttctaatctccagaacttggccaccacagactccaccaacttctagtcctggggcctgggcctctggccattgccataggcaccacctgctctgtgcaggcagcgcccccctctgccaggatcctccgaggtcagctgctgggtctgacccgcagaccctggctgagcgacggatgaacggagtatgcagacacaggcttgcttgtcagcagatgggggacccctgccagagtcagcagcggcccccataagcctgccacgcttgcatttatttagtacagatgtaatgacaaaggcctaaagcaaactccatttgtgggtaattaacattgtcgcccccccagaaagagcagtcctccgcatgatgattaaaggccaggttccgaggcctaagtaaaccaacttatctagatcaattcccttacttcttgttatctactctgagagaattcagctgccttcagccaaatcctttcccgaagcttttgcaaaacctccgagccttccaaggtttgcttctttctgtaatttttctcaccaccctgacctatctcctgcagtcagccctgtggaggcctttgtgtttcccccagtgctggcagcctagaggctgagatggccagaaacaaggtggtgacagtggcgtgctcagggcttgggaaacccaaggagctaaaggcatgcccaggcaaccaaagaggacaggaaggcttctgaggagagacctctgaggtgggtcttggagaggaaggacttagggaggcagagtggaggaagtgagaggacaccccaagccaagagggcggcaggaccaaaggctcagaagccagggcgctgcagaggggctgtgtgccacagggtgaagagtttgtgtggcagaagggcagggggcttgcatcaggggtgacagctgctcttttgtcccagcatagcccctgtacatccctggagagctggggcgtccacaactctaagtcacagcccccatcctaaccctggtggtgcagtgagggtgagctgtctgtgggcaggagggaagactcttggagatgagcctggtgaagggataatggcatcccgggccgaggagcagcacaggcagaggcctggggagagtttaaggagtgtaggggaggaaatggcagaagatgagccagaaaaagaaaggttagggcaggtcctggaggacatgagtggctgtttgggctttatccagcagtgggggagccttggcaggcttgtggcttagataggtgctttagaaagcccaccagcagttgctgggccaccccgctggctgggtcctgttctaaggcaggaaatacaagaatgagcaggaaaagaccccctcaaggctcacgtcctagtggggagacaagaaacacagatgggcaatataacacgatgtctggttccagtaagtgcagtgaagaacaagcgaggctggatgcagggagtgatgggaggggctttgtaaggggaggtcgggggaagcctgtctcagaggacaccagaatggagcgcaggagcagcacgtggcagtcacatggcaggccgttagggcagagggagctgggcagggcacagcagggcaggagtgtgtttgatgtgtcctgggaaccgccctgaggccgtcgtgtggctggagtgctgcaggtgtcaaggaaattgtaggagatgtctcctgagtgtgatggaatataaccagatttccagaaggaactgacatgatctgacttaaaaaggccacctacatttacatgaaggccgcctacctcagcatgtttgggaaggaggaccacaagccgttcggggacgacgaagtggaattatttcgagctgtgccaggcctgaagctcaagattgctgggaaatctctacccacagagaagtttgccatccggaagtcccggcgctacttctcctccaaccctatctcgctgccagtgcctgctctggaaatgatgtacatctggaacggctacgccgtgattgggaagcagccgaaactcacggatgggatacttgagattatcactaaggctgaagagatgctggagaaaggcccagagaacgagtactcagtg

SEQ ID NO: 152717 - DNA, 2733 bp, Homo sapiens
cttggagaaggaggagggaaaaaggggctgtgggatttagtggctgggctgcaccccctgggggggcagcagagcccaatgggccagaagggccacaaagactccctttacccttgtggagggactcctgagagcagcctccatgaggccctggaccagtgcatgaccgccctggacctcttcctcaccaaccaagttctcagaagcactcagctacctcaagcccagaaccaaggaaagcatgtaccactcactgacatatgccaccatcctggagatgcaggccatgatgacctttgaccctcaggacatcctgcttgccggcaacatgatgaaggaggcacagatgctgtgtcagaggcaccggaggaagtcttctgtaacaaaattccttcagcagcctggtgaaccgccccacgctggggccaattcactgaagaggaaatccacgctgagggtctgctatgcaaagtgcctgctgcagcgagcagccctgaccttcctgcaggacgagaacatggtggagcttcatcaaaggcggcatcaaagttcgaaacagctaccagacctacaaggagctggacagccttgttcagtcctcacaatactgcaagggtgagaaccacccgcactttgaaggaggagtgaagcttggtgtaggggccttcaacctgacactgtccatgcttcctactaggatcctgaggctgttggagtttgtggggttttcaggaaacaaggactatgggctgctgcagctggaggagggagcgtcagggcacagcttccgctctgtgctctgtgtcatgctcctgctgtgctaccacaccttcctcaccttcgtgctcggtactgggaacgtcaacatcgaggaggccgagaagctcttgaagccctacctgaaccggtaccctaagggtgccatcttcctgttctttgcagggaggattgaagtcattaaaggcaacattgatgcagccatccggcgtttcgaggagtgctgtgaggcccagcagcactggaagcagtttcaccacatgtgctactgggagctgatgtggtgcttcacctacaagggccagtggaagatgtcctacttctacgccgacctgctcagcaaggagaactgctggtccaaggccacctacatttacatgaaggccgcctacctcagcatgtttgggaaggaggaccacaagccgttcggggacgacgaagtggaattatttcgagctgtgccaggcctgaagctcaagattgctgggaaatctctacccacagagaagtttgccatccggaagtcccggcgctacttctcctccaaccctatctcgctgccagtgcctgctctggaaatgatgtacatctggaacggctacgccgtgattgggaagcagccgaaactcacggatgggatacttgagattatcactaaggctgaagagatgctggagaaaggcccagagaacgagtactcagtggatgacgagtgcttggtgaaattgttgaaaggcctgtgtctgaaatacctgggccgtgtccaggaggccgaggagaattttaggagcatctctgccaatgaaaagaagattaaatatgaccactacttgatcccaaacgccctgctggagctggccctgctgcttatggagcaagacagaaacgaagaggccatcaaacttttggaatctgccaagcaataactacaagaattactccatggagtcgagaacacacttttgaatccaggcagccacactccaagccaagtcttccatagagaacagcagcagatccatggtctcatcagtgtccttgtagctttgtgcagcagttccgggctggaagacagagacagctggacagagctcctgaaacacaggataaaataccctctccccctgccctgccctggcctttggggaccaccggcactccagttggatggcacaacatagtggatccgagcagaagccgagctggcattttcaccagtgtagccaagggcctttgccaaggacagagcaggtggagccctctgcctgccctatcacacatacgggtacttgcttttcactgtgatgtttaagagaatgtatgaacagtttacattttccttagaaatacattgatgggatcacagttggctttaataaccaacaacaatcaaccacctgtaagtctttgtcttcacctattatcatctggaggtaaatctctttatatgatgatgccaaagggcaaattgcttttcaaattcagcaagttctcagcttgtgtgacggaaggtccttcagaggacctgaggaatgcctgggagagactaagcctcaggcttcaatgtcttctggggttgggcatgaggatgtacacagacacccactaccttactactcacacttcatttcactccttttgtaaatttccaatttaaaaatcaagcacgtctttttagtgagataaaatctgagctcttctgtagaaaaatcaatctctaccagtagaaaatgccagggcttgatggaagagctgtgtagccctttctatgccaaagccaggaaatttggggggcaggaggaggttctcagaatccagtctgtatctttgctgtatgccaaactgaaaccactgggaataatttatgaaacataaaaatcttctgtacttcactccaaggtacatttgcttactgacagcatttttgttaaaactgttattcttgaaaaaaaaaaa

SEQ ID NO: 152718 - DNA, 858 bp, Homo sapiens
ggacttattttatttaaaatttagatttattagagggagcatggccataaaataaaataaaataaaatttagatttaaagtccaagctcagtggctcacgtctgttatcccagcactttggaaggccagggcgggtggattgtctaagctcaggaatttgagaccaacgtggtgaaactcggtctctacaaaaaccacaaaaattagccaggtgtggtgtcacatgcctgttgtcccagctgcttggagggctggggcaggagtattgcgtgagcccgggaggttaaggctgaggtgggtcatgttcgcgccactacactacagcttggataaaaaagcgcgactctgtctccaaaaataaaataagtaaataaataaataaataaaatttagatcaatttgctgttatatttttatataaactatgtttatgacataagtataaacaaaaaaataaaataagtaaataaataaataaaatttagattaatttgctgttatatttttatataagctatgtttatgacagactttcctataatattcttatcataatgttcttgcacttgaaagaatgtgcattctgcagttgtgtgcaggtgttatgtgtatttcaactgggtcaagtttgttaatcaggttggtcaaattatctacatctttactgatatttttgtctgtttttctataaattactgagagaggctaaagcccgccactattattatgaatttgtttatttctcctttgagttttgttaatttttgttttatgcatttagagattgtgttattaggttcatacccatttaaaattgacgttttctggtagagtgaaccctttattatgtgaaatggc

SEQ ID NO: 152719 - DNA, 4359 bp, Homo sapiens
atggatgagagtacctttgcaggaggccaggaatatggtggatgggtcccagaacaccacaaaagtaacgaacccaagagtggacacattgaaaaaggtaacacagatcagtgccaagaaagaacccctcaacccatgatttatcccacaggggaaattgagagcacagtgaatgcctggatgctcagccatgagaaagaacaaagtcaaatccttttgatatcgaattgccttgacgctttaaagcaccggagctgtgattatggtctgaaaatagctcttgacataaaacacagattaaagattcagcccaagatatttatctatacaaggacacataaatatgcagtcaccctccacatgcttgctcataccattacctcagaaagagatgacatagaggaatggttaaatgcatgggtagtagaccagtgctgtccaccagaaatgtctgtgatgatggaaatgttctatatttatgctgtccactatgggagatcacttctttcttggagtcaggaggaggagaaggagaagggaggcagggaggaggaggaggaggaggaggaggaggaggaggaggaggaggaggaggaggaggaggaggaggaggaggaggaggaggaggcagaagaagagaaattaggggaggcagctgtcccggagggtgtccagctcggatggctgactgctctttcacttgtcgttaacttccacccagtagtcttagtctccccttggacatggtaccgaccgtgtgccattcttatttcacttgaccgagcccgagctgcagcccagggtggaagccgcaagggctgggcagagttccaggcaagagggaccgagaggcgtgagcagtgctccgcagcgcttgtcagagaaatggagcagcggctcctttgtgggctcttacatccccgtcctgggtgcacagcccggatatttgatctaagcgttgcccgttggctagctgctcggtggggatctgcctgccctgggggcgccgcccgcgctccccgcggtgctctcgctcctgggctgcgccagtccgaggcggtgccggctcctttgcctccccgagtcgcagatgctgcgggcgcctccgggaaaagatctgggcggcgcgctcgctcgtgcccaagtcccatggcgagggcagcccgagtggccgtcgcggctgtaggtccgcatgccgggcaccgcaccaggcgtctagcaggtaggggcagggaaggtagggctgcgctggcggccggtgcccagttaccggcgatcggggacgctcggagacacctggtctcccggaagcgcccttcggaaatgggattcgacccggcttgcgggcggcgggtgtttagaagaagaggctgcgggcaagcagtgccccctctctggttccccggactcctcttagccccctcgtggcctgatgggcggccgggacggagagctcatctcaagtttgcccttctctatggagaaggaaaatttgagtctccagaaggaaagtattttgctaaacgccaagcaagaattagaggatggacacaggaagatccagaagctagtggcacatctagcaacagagccagatcagaacccagtgtgttaaccgtggccgggatcttacagacagagagtcgcaaaactgccaaagacatttgcaagatccgctgtctgtgcgaagaaaaggaaaacgtactgaatatcaactgtgagaacaaaggatttacaacagttagcctgctccagcccccccagtatcgaatctatcagctttttctcaatggaaacctcttgacaagactgtatccaaacgaatttgtcaattactccaacgcggtgactcttcacctaggtaacaacgggttacaggagatccgaacgggggcattcagtggcctgaaaactctcaaaagactgcatctcaacaacaacaagcttgagatattgagggaggacaccttcctaggcctggagagcctggagtatctccaggccgactacaattacatcagtgccatcgaggctggggcattcagcaaacttaacaagctcaaagtgctcatcctgaatgacaaccttctgctttcactgcccagcaatgtgttccgctttgtcctgctgacccacttagacctcagggggaataggctaaaagtaatgccttttgctggcgtccttgaacatattggagggatcatggagattcagctggaggaaaatccatggaattgcacttgtgacttacttcctctcaaggcctggctagacaccataactgtttttgtgggagagattgtctgtgagactccctttaggttgcatgggaaagacgtgacccagctgaccaggcaagacctctgtcccagaaaaagtgccagtgattccagtcagaggggcagccatgctgacacccacgtccaaaggctgtcacctacaatgaatcctgctctcaacccaaccagggctccgaaagccagccggccgcccaaaatgagaaatcgtccaactcctcgagtgactgtgtcaaaggacaggcaaagttttggacccatcatggtgtaccagaccaagtctcctgtgcctctcacctgtcccagcagctgtgtctgcacctctcagagctcagacaatggtctgaatgtaaactgccaagaaaggaagttcactaatatctctgacctgcagcccaaaccgaccagtccaaagaaactctacctaacagggaactatcttcaaactgtctataagaatgacctcttagaatacagttctttggacttactgcacttaggaaacaacaggattgcagtcattcaggaaggtgcctttacaaacctgaccagtttacgcagactttatctgaatggcaattaccttgaagtgctgtacccttctatgtttgatggactgcagagcttgcaatatctctatttagagtataatgtcattaaggaaattaagcctctgacctttgatgctttgattaacctacagctactgtttctgaacaacaaccttcttcggtccttacctgataatatatttggggggacggccctaaccaggctgaatctgagaaacaaccatttttctcacctgcccgtgaaaggggttctggatcagctcccggctttcatccagatagatctgcaggagaacccctgggactgtacctgtgacatcatggggctgaaagactggacagaacatgccaattcccctgtcatcattaatgaggtgacttgcgaatctcctgctaagcatgcaggggagatactaaaatttctggggagggaggctatctgtccagacagcccaaacttgtcagatggaaccgtcttgtcaatgaatcacaatacagacacacctcggtcgcttagtgtgtctcctagttcctatcctgaactacacactgaagttccactgtctgtcttaattctgggattgcttgttgttttcatcttatctgtctgttttggggctggtttattcgtctttgtcttgaaacgccgaaagggagtgccgagcgttcccaggaataccaacaacttagacgtaagctcctttcaattacagtatgggtcttacaacactgagactcacgataaaacagacggccatgtctacaactatatccccccacctgtgggtcagatgtgccaaaaccccatctacatggcaggaagggaagggagacccagtaggcctatttaccgaaacctggcaaggagtttcagctattaggcaacctggaggagaaaaaagaagagccagccacacctgcttacacaataagtgccactgagctgctagaaaagcaggccacaccaagagagcctgagctgctgtattaaaatattgctgagcgagtcaaggaacttcccagcgcaggccttagtccactataacttttgtaccttacctaaaagggcagtttgcccctttcctatggaattttcggacggccaaaaccaaggacaggattcaattaaaaccgttttatatggaactcccaggaaatgctttgtggggcagtcaaaacccaaccaccctttactgcaagctaagccgcaatcagaaccggactacctcgaagttctggaaaaacaaactgcaatcagtcagctgtgaagggaaatcatttacaacacgtaaggcatcagaggatgctgctccgaactgttggaaacaaggacattagcttttgtgtttgtttttgttctccctttcccagtgttaatgggggactttgaaaatgttcgggagataggatgaagtcatgattttgcttttgcaagttttcctttaaattatttctctctcgctctcctcttcccactcccacactga

SEQ ID NO: 152720 - DNA, 777 bp, Homo sapiens
atgaaccgtgcttttagcaggaagaaagacaaaacatggatgcatacacctgaagctttatcaaaacatttcattccctataatgcaaagtttcttggcagtacagaagtggaacagccaaaaggaacagaagttgtgagagatgctgtaaggaaactaaagtttgcaagacatatcaagaaatctgaaggccagaaaattcctaaagtggagttgcaaatatcaatttatggagtaaaaattctagaacccaaaacaaaggctgaagagatcactttaacaattggccaagcatttgacctggcatacacgaaatttctagaatcaggaggaaaagatgttgaaacaagaaaacagatcgcagggttacaaaaaagaatccaagacttagaaacagaaaatatggaacttaaaaataaagtacaagatttggaaaaccaactgagaataactcaagtatcagcacctccagcaggcagtatgacacctaagtcgccctccactgacatctttgatatgattccattttctccaatatcacaccagtcttcgatgcctactcgcaatggcacacagccacctccagtacctagtagatctactgagattaaacgggacctgtttggagcagaaccttttgacccatttaactgtggagcagcagatttccctccagatattcaatcaaaattagatgagatgcaggaggggttcaaaatgggactaactcttgaaggcacagtattttgtctcgacccgttagacagtaggtgctga

SEQ ID NO: 152721 - DNA, 485 bp, Homo sapiens
catgaacaacatgtgtttcagagatgctcatcctctttctggcgtagtaatggtgattcatctccctgtctcaatatttcttccatctctgtcactcctatcaactcgcctgattccagactatcactgggactgttaataccaccaccttctaaatgtggctttcccaagccagtcagtgagagcagcatcccaagacctcatgcaggcagtatgacacctaagtcgccctccactgacatctttgatatgattccattttctccaatatcacaccagtcttcgatgcctactcgcaatggcacacagccacctccagtacctagtagatctactgagattaaacgggacctgtttggagcagaaccttttgacccatttaactgtggagcagcagatttccctccagatattcaatcaaaattagatgagatgcaggaggggttcaaaatgggactaactcttgaggcacagtattttgtctt

SEQ ID NO: 152722 - DNA, 1033 bp, Homo sapiens
  misc_feature (1)...(1033): n = a,t,c or g
tttcgtgtccagtgggcccacagataacgaccatcagagattaaagaaggaaagtcagcgagcttgaacacaggcgtcccgtgtggaaatgtccaaggagaccgccagaagtgcgcaagccggagtcggctagagtttccttctcaccgagagggggagcccggcgttcccggccgggagcgacccggagtccccagccccgcgtcccagctgccgccagcgccagttttggattcggcggattaggaagaggagggaggggggagagagcgcgaagagggaggggaccgaagctggagggtcccgagtccagcgccgtgttggcgtagagaaactttccctctcggcctcggagacggcgccccggccgtgccggagtggagatcgccaggctcggaggaaccggcagctctccacgcccctgcccgaagcctgacccgactgcctctctcagtgagttatttatgattccatctgatatacctaggaggagaaactgatagaagaattctgatggcaactgtatgatagaagctatataaagccaagtgtccattttctttcaactatatttgagcataccnnnnnnnnnnnnnnnnnnnnnnnnnnnnnnnnnnnnnnnnnnnnnnnnnnnnnnnnnnnnnnnnnnnnnnnnnnnnnnnnnnnnnnnnnnnnnnnnnnnnttaagtcgtggaactgaacatttatttggctgatcctcatcatgaaccttgcttttagcaggaagaaagacaaaacatggatgcatacacctgaagctttatcaaaacatttcattccctataatgcaaagacttgcctggccccaccttttgccttctgccatgattacaaaacatggatgcatacacctgaagctttatcaaaacatttcattccctataatgcaaagtttcttggcagtacagaagtggaacatccaaaaggaacagaagttgtgagagatgctgtaaggaaactaaagtttgcaagacatatcaagaaatctgaaggccagaaaattcctaaagtg

SEQ ID NO: 152723 - DNA, 3332 bp, Homo sapiens
gcgcaaggcgcggcgggggtgatgagcccttgggttctcgctccgactgctaaattcgcttggccgggtccaccttctcgtggcctcactcgccacacggatcagaatccggagcaggcagttctctctattctgaggctcctgcggctgccgcgctgacttccctgtgtgcgggagggaactctgggcaggctggttttcttggaatgtgtttacgatgttgaatgggacttgaacaggaagctggacgctgcagctggaactagcgtgccaagttatttatgattccatctgatatacataggagagaaactgataggaagaattctgatggcaactgtatgatagaagctatataaagtcaagtgtccattttctttcaactatatttgagcatacccaggatttaagtcgtggaactgaacatttatttggctgatcctcatcatggaaccgtgcttttagcaggaagaaagacaaaacatggatgcatacacctgaagctttatcaaaacatttcattccctataatgcaaagtttcttggcagtacagaagtggaacagccaaaaggaacagaagttgtgagagatgctgtaaggaaactaaagtttgcaagacatatcaagaaatctggaggccaggaaaattcctaaagtgggagttgcaaatatcaatttatgggagtaaaaattcctaggaccccaaaaccaaaagggaagttccaacacaattgccagcttcatagaatatctttttgtgcagatgataaaactgacaagagggatattcactttcatatgcaaagattctgagtcaaataaacatttgtgctatgtatttgacagcgaaaagtgtgctgaagagatcactttaacaattggccaagcatttgacctggcatacaggaaatttctagaatcaggaggaaaagatgttgaaacaagaaaacagatcgcagggttacaaaaaagaatccaagacttagaaacagaaaatatggaacttaaaaataaagtacaagatttggaaaaccaactgagaataactcaagtatcagcacctccagcaggcagtatgacacctaagtcgccctccactgacatctttgatatgattccattttctccaatatcacaccagtcttcgatgcctactcgcaatggcacacagccacctccagtacctagtagatctactgagattaaacgggacctgtttggagcagaaccttttgacccatttaactgtggagcagcagatttccctccagatattcaatcaaaattagatgaaatgcagcgccagagatggaggggttcaaaatgggactaactcttgaaggcacagtattttgtctcgacccgttagacagtaggtgctgacatcaagaacaagaaatcctgattcatgttaaatgtgtttgtatacacatgtcatttattattattactttaagataggtattattcatgtgtcaatgtttttgaatattttaatattttgaaaattttctcagttaaatttcctcaccttcactattgatctgtaatttttattttaaaaacagcttactgtaaagtaggatcatacttttatgttcctttctgtttctactgtaggatggaatttgtaattggaaggacatattatacaaatacctgccttgtgtctgaggttctattaggtaggccatctggaaatttgtattcattttccagatggctagtttattaatgatttcccaaaagccataccttaaaggataactttttaaattctggaagagacatgccaatgtcaaactaaacatgttctgtttttaaaaccaacaaacatgttactattcattgggacagatatccttttatggtattaaatactgttcacatcactgggaaaatgtaaactttaaacataatgccacaaggtcactaatttctagcaggtaaaattataaggatataaattccaataataaaccaaatgtatttagagtatttattagtaaatgcaaggtgatgttagttatgatcagttatactctaaatatttaatttgttttataaaggtagtgaaaaaatgaaaatttgctatttattaaaaaacattaaatttcattcccaaatgaggataagtgatattacctataacatcctaagcatcatctgatttgatattccctaaaaaacattggggaatatatggcctatcctatagattcaggtatcctacctacccccatatttactttacccaaatatattttctcctcactgcataaggactactcttctcatattttccttctttgatgaagatatttttcaccaaagtttattttgtgatgccctcttggttttgatactttaaaatcctgtggcacccgttcctacatgaattatcaatatttgggtaaaattcaatctgtatttggttttggttaaaagtcaaaaatctcattttccaaaaaaaaaaaaaaaacccagttactgctcagtttagtcttgaacatgagcaataaaattctcttgcatttcattattgatgtgctgatgaacctggacttttaaaaatatttgtttcctatacctttaccctttacctaacagactaatttgtactcagtaaaacaaaaatttatggtcaaaatttctaacttggttcatcacattataagataaataaattaaattaatgaaaatgtgacttagagtaggggtagccctcaaaaatagatttatcatttactcattggaattttcttcaagtgttaaaggtacattttcactaggaaaagaaatcaaatatgcttatgcaatatatatttgtgtgtttttccttaatgttatatggtatatatgagccttcttgtttagtttcttttatctgctaagttgtaccttaattagagggcaatatatgtttcataaagaagagtctttataattttgtttgtcagaatagtattttggaatttgtataataaggatgtttagaagccatataagtggctttttttaacagatagaatttgtatttttattgtacctttaaaaagatttatgtaataggtatatatttagtggcccatttattatcaatggtaacacaaatggagtacctaagatggtatttgcacatttaagatatgttactttaccaatttttaatggtaatcaactctgctactggcatgatgaaatagtacataactggtcattaattatgaacatttacttctccagtgcgtttttatgaagatctggttgaaaattgtatttctatgtaaactcaacgatatgtttggttttcctgaaaataaatgatttt

SEQ ID NO: 152724 - DNA, 1728 bp, Homo sapiens
ttttttttttttccagttgacacatcatccatttattatccttcagagtctaaaacgttcctcggtgatacaacgtatagccacccattccagcctgcttattggaacttctattcccatctggtggcaaacatttctttttacatttgttttactatcaaagatttaggagtcacaataaatacaagtgacagcctccacacccaaagagcccccccaataccctggcactagtgtaaccgtctattacactttaaggattataaaattgtttgctgtccttttttaaaagctcaggtccaagttctttagggttaacgttcatgtgcagcataagctccagcatcaaaaaaccctacgggcagagcaggcaagggatcatcccttctgtgatggggaatatttgtataggggaaggtctctccccctggcctttaaggtccatagggggagcaggggccactgggggcccagcggggctgccactgggttgcctcattccctctgccctgaagcttttgcttcaccgaggtccgtggagtacaggtaagaccaggcacaactagcactgtgggctgttccactctgagaagggccgctacagacctcgtcagaggggtggttcctgggtcacccgtaaaagttcctggggatgaggtcaggacggccatagctgtgggaggttcccaagggcacttggccaatccaaaaccctaccccccaacctccccctaacaacaaggcgaggtgtgaactctgaagatctccccagccctgtctacagagcagctgacagagggaaccgtttcccaggtgctgttggaggttcatgtcacaggtaacaggggacagttacaatcagttgggctgggggctcccacattctgacggcttgcaggaacctgatcctggtagggctctcgggaccacagacccaggcagtgcctggtttaagagggtgtgctttgctgtgggtagaacacccttaacattaatcaatagctatcctggtgcgtccaaaccccacacccagagaggtacttaataatgccttcacctggaacatcataaacgtcataatacaacaacccgcttggggcttatcgtagaggttatgctgcaaggaactgaaaggaaataatgggctagagtgttcgagccagcagaaatgaaggaaagattaaggcctttcacacttttgccccctgggggaaaaaaaaaaagtttacatcacagtatgtacgttgtccctgatggaatgctccctggggacatggggccgaccctctccctttcgaggggccagcagtcccatatgaactcacaaggatgggtttgacagccatcagcccctggaggaacagccaggccaggctgggagaggtcaggagctggagctggggctgggggccggcaggtgcggctcggatctggccccctggtcagacccagctgacccaagctggagcaggcagaggtgacttcggtctggatgcctgatccccagccactgcatagaactgaggttggttcgctggggagggctttcagtgggaagaagccagcctgggtgctccttctgggaggagctggaagatctggcccctgtcatggaacagagagggctaacagctcagggtcgtaggagacaggtatttatttgccaggcacacagaaaaatgcgaggaatagaaatgcttgcatactcttgcattttttttttttgga

SEQ ID NO: 152725 - DNA, 2137 bp, Homo sapiens
tttttttttttttttttttaagaaagatgccaggtcttgattaccaggggaagctgtgtgcacgcgcgtggagcagcgctccttggagctgaccagggcccttaccttctcctgcttgtcagaggtgagtcctggtacccagcacggtggccctccgggaaggctctgataggtcagcctttgctgcctcccaagctcaagggctcctccaaggaaccctgcggggcccccatgtgcccacagccccgaagaggggaagcaccgacccgccctcctcgtgggcacgcttgcactccaagcgctggggcacttcacctgcttcctgggctttcgggtgggtcaaggctcgataattgacttcactgatcggcaaattgagtttccaaaagaattgcaaaccgcgtggggtgctgtgggcgacattgttttggcaccttttattacaaccagacaggctttttagacgaaattcgggttcaaacctaagacgcacggggaacggggctccagctgcagctccctgggtctgtcaggccggggagcggttctaccggaagagccggtacgtcctgggcaggcgcccgtccttactcgacaggggcggtctggatgtcctcatacgtgggcaggtcagtcaggtcacccagggcggccacatgccggctttccttcgagccatctagaagcgactctcttcacatcttccggcttcacgttgcggatgagcgtgcacagctcgtgcggcagctttctggagcgagtggccagcacctggcctccccacatcctcgaagatcacaggcctggattccaggttcatcatgagcattgatgtcagctgcgtcttggctcgttccagctccaccgtgtccacggttccgcccattaaaataaactcctttgtgatgatttctaccatttctcgaacctgtcttgggtcggcgctggcatggatgcaaaggaggccagtgtcctcgtagctgtggtggtaggaggtcgcgttatacatccagtggtgcctgttgagcacgttgaggtagagcctggagaacatgcccttgccgggcccaccagccgagaaggagccacctccgcccatcatcatgttcaacactgcaaaggggatgaagtcctcctccaggaaggagcagctctccagtccaaccatgatgtgcgtgagctcggggatgggggtcgggcccaggctgacattggacatgtctctttctagcttggcaatccccccagtgtactgggccacagatctgtcaatatccacggcctctgcgctcccccaggccggctggacccccaggaggtacttccgggcacagtccaccagatgctcgtgctccacgcccacgccggccagcaccatgcggtcgggagtgtagtagttcctcaggtaggaatgcagcacctctcggttgatctttgctacgttttctgtggggcagaaacggtggaggccaactgtgttctccctgtaagccgcttcatgaatcatctcggtgagaagtggctctgggtcaggccgcaggttcaggtcctccagctcaaactggaccgccatccgcgtcatctcgacttcttcatctgttagccggggctgcagaaccacatcagccagtaaggcaaccaccgtgtccaagcctttgctatcagcagacacagcatacatggtggtgtctcttgatgtctggcagtcacagatacccccatgcttttccaacgtaagcagaatttcatctttgctgtcaaatcgagcagtagacgaaaatgccaatttttccaaaaagtgagcaattccactaaggtatttcgcttcatatctcgatcctgaattgataagaattcctactgtacaaaactgtccaaacttattctgagatgccacgcgaagcccattatccaatgtggttactttggtttcaaacttttcctgtccatcaactgtagcaaaaacaggcttgggtactccaggtaagggagaagagagggggatgttgggataggcaccaccactactaaaccgtctgtacgcaggaggtccaaacctcagccgcgaacagccccaagaacccgagccccgcagcaaccgcgtcgccgccagcaccacagccgccatcttgcgtct

SEQ ID NO: 152726 - DNA, 396 bp, Homo sapiens
cggacgcgtgggcggacgcgtgggcggacgcgtggggttctaggtgtcatggctgccccaagagtctagtcaccattactttaagtactgcaaaatctcagcattggctctgctgaagatggtgatgcatgccagatcgggaggcaacttggaagtgatgggtctgatgctaggaaaggtggatggtgaaaccatgatcattatggacagttttgctttgcctgtggagggcactgaaacccgagtaaatgctcaggctgctgcatatgaatacatggctgcatacatagaaaatgcaaaacaggttggccgccttgaaaatgcaatcgggtggtatcatagccaccctggctatggctgctggctttctgggattgatgttagtactcagatgct

SEQ ID NO: 152727 - DNA, 574 bp, Homo sapiens
aggaataacagattttaatataatataatattagaatcaatctctaattacaggtttgtataattttactcaccttctaaaacagaacaattgtatcaaattttacgttgtcattctcttgtgaaagttctagtaagtaatgaaatggtcaaaaagacatggggaagactaataaaatcacaagggaaaacttcagattggggtggtttgagaagtatgaataaaactaaactcattggagttacatggatggattggggctgatcttgtgtgtttgaaatagttttcaatttatgacatcatgtgatgtgtgtttttttttccagctgtaaaactaccatagaagctatccatggattgatgtctcaggttattaaggataaactgtttaatcaaattaacatctcttaaacagtctctgagaagtactttacctgaaagacagtatgagaaaaatattcaagtaacactttaaaaccagttacccaaaatctgattagaagtataaggtgctctgaagtgtcctaaataccaatataggtgtaataaagctctttaaaatgaaaaaaaaaaa

SEQ ID NO: 152728 - DNA, 1396 bp, Homo sapiens
cgtccggttctaggtgtcatggctgccccaagagtctaggtaagagtttgttcccgtggtgcggagggtcaaggcccacacccggtaaacctagcgaggtaaagttgcgtttttggttgtagaaacgacaactttttccgctttcctgggcgatggcggcgtccggaagccgtatggcccaaaaaaccctgggaaactggccaacaacatgcaggaagctcagagtatcgatgaaatctacaaatacgacaagaaacagcagcaagaaatcctgggcggcgaagccctggactaaggagtgaggagtcaccattactttaagtactgcaaaattctcagcattggctctgcttgaagatggtgattgcatgccagatccgggagggcaacttggaagtgatgggtctgatgctaggaaaaggtgggatggtgaaaccattgatcattatgggcaagtttttcttttgccttgtggagggcactggaaacccgagtaaattgctccaggctgctgcatatgaatacatggctgcatacatagaaaatgcaaaccaggtttggcagccctgaaaatgcaatcgggtggtatcatagccaccctggcttatggctgctggctttctgggaattgatgttagtactcagatgctcaaatcagcagtttcagggaaccatttgtagcagtgggtgattgatccaacaagaacaatatccgcaggggaaagtgaattttggcgccttttgggcacaccccaaaggggctacaaccctcctgatggaaggccctttctggagtcccaggcttattcccacttaataaaatagaagatttgggggtacactgcaaacaatattatgccttagaagctctcatatttcaaatcgctcttgggatcgcaaaattgcttggagctgttgtggaattaaaatctgggggggaatacgttggagttccttctggctggcttactaaatgcagactatcccactggtcaggtcctttgatttgtcctgaaaaagttagagcagtccagaagccccagcctgggacgaggggagtttccatgttggggtttagaaacgcatgacccgaaaatcagaagacaaacttgccaaagcctacaagaagcagcgtgtaaactccccatagaagctatcccatggattgatgtcctcaggttattaaggataaactgtttaatcaaattaacatctcttaaacagtctctgagaagtactttacctgaaagacagtatgagaaaaatattcaagtaacactttaaaaccagttacccaaaatctggattagaagtataaggtggctctgaagtggtcctaaatattaatatcctgtaataaagctctttaaaatgaaaaaaaaaaaaaaaaaaagat

SEQ ID NO: 152729 - DNA, 433 bp, Homo sapiens; identical to SEQ ID NO: 134441

SEQ ID NO: 152730 - DNA, 3155 bp, Homo sapiens
atggccggcgcgctggcaggtctggccgcgggcttgcaggtcccgcgggtcgcgcccagcccagactcggactcggacacagactcggaggacccgagtctccggcgcagcgcgggcggcttgctccgctcgcaggtcatccacagcggtcacttcatggtgtcgtcgccgcacagcgactcgctgccccggcggcgcgaccaggaggggtccgtggggccctccgacttcgggccgcgcagtatcgaccccacactcacacgcctcttcgagtgcttgagcctggcctacagtggcaagctggtgtctcccaagtggaagaatttcaaaggcctcaagctgctctgcagagacaagatccgcctgaacaacgccatctggagggcctggtatatccagtatgtgaagcggaggaagagccccgtgtgtggcttcgtgacccccctgcaggggcctgaggctgatgcgcaccggaagccggaggccgtggtcctggaggggaactactggaagcggcgcatcgaggtggtgatgcgggaataccacaagtggcgcatctactacaagaagcgggtcagtgggggagggccagggaggccccagagctttcctcctgcggctgccggctaccgcccgcctcggaagatccctggaaaggggatcctgacccccgagcttgcgcccctcgggccctccattcagtcccgggccgacagcgccaccgtgtggccacagcgtctcctagcggcctccttacctaggggtcggctccgtaagcccagcagggaagatgacctcctggcccctaagcaggcggaaggcaggtggccgccgccggagcaatggtgcaaacagctcttctccagtgtggtccccgtgctgctgggggacccagaggaggagccgggtgggcggcagctcctggacctcaattgctttttgtccgacatctcagacactctcttcaccatgactcagtccggcccttcgcccctgcagctgccgcctgaggatgcctacgtcggcaatgctgacatgatccagccggacctgacgccactgcagccaagcctggatgacttcatggacatctcagatttctttaccaactcccgcctcccacagccgcccatgccttcaaacttcccagagccccccagcttcagccccgtggttgactccctcttcagcagtgggaccctgggcccagaggtgcccccggcttcctcggccatgacccacctctctggacacagccgtctgcaggctcggaacagctgccctggccccttggactccagcgccttcctgagttctgatttcctccttcctgaagaccccaagccccggctcccaccccctcctgtacccccacctctgctgcattaccctccccctgccaagcaggagacagtccctgaattcccctgcacattccttcccccgaccccggcccctacaccgccccggccacctccaggcccggccacattggccccttccaggcccctgcttgtccccaaagcggagcggctctcacccccagcgcccagcggcagtgaacggcggctgtcaggggacctcagctccatgccaggccctgggactctgagcgtccgtgtctctcccccgcaacccatcctcagccggggccgtccagacagcaacaaggccctcctgggctccttcctaggctcacccaactctctgctccccgagaccgagaaccggcgtatcacacacatctccgcggagcaggaagcggcgcttcaacatcaagctggggtttgacacccttcatgggctcgtgagcacactcagtgcccagcccagcctcaaggtgagcaaagctaccacgctgcagaagacagctgagtacatccttatgctaccagcaggagcgtgcgggcttgcaggaggaggcccagcagctgcggggatgagattgaggagcttcaatgccgccattaacctgtgccagcagcagctgcccgccacaggggtacccattcacacaccagcgttttgaccagatgcgagacatgtttgatggactacgtccgaacccgtacgctgcacaactgggaagttctgggtggtatcctccctcaagcccatggctggggggctgcaggggctgtggcagggcagctccttgacctgggcccagttcagcatcctcatccggcctctgtttgagtccttcaacgggatggtgtccacggcaagtgtgcacaccctccgccagacctcactggcctggctggaccagtactgctctctgcccgctctccggccaactgtcctgaaactccctacgtcagctgggcacatcttaccagtatcctgaaccgacccgggccgcattccctgaggcaagccacacgggcagtcacagagggcacccttggcaaacctttatagtcctgggccagaccctggctgctcactcagctgccctgggggctgctttccctggggcacgggctccagggatcatctttggggcactcctttccttgccccaggccctggctctgccctttccctgggggggttggaagcagggtccaggtttcacacttgccacctcctggaggtcaagaagagcagagtccccgtccctgctctgccactgtgctccagcaccgtgaccttgggtgactcgtccgctgtctttggaaccgctgtgtttcaatctgcaaaatgggggatggggaaaggttcaaatcaaacagatgaccccccaggccttggcagctgtgaacattgggggcctaggctggcaactccgggggctcaacggtggaaagaggaggatgctgtttctctgtcaacctcccacttgctccccgacaggtggggcacagactctctgttcctgagcagagaagcagaaaaggaggttccctctctctgctccttcactgctgacccagaggggctgcaggatggtttcccctgggagaggccaggagggcctgatcccaggagacaccagggccagagtgaccacagcagggcaggcatcatgtgtgtgtgtgtgagtggatcgcctgtgtgtgggttttgtaaagaattcttgcaccataaaagcaaaaactgtctgcgcaaaaaaaaaaaaaaaaaaaaaaaaaaaaaagtcgtatcgatgt

SEQ ID NO: 152731 - DNA, 535 bp, Homo sapiens
agtgtaactgttgaatggatagaaaatggagatacaaaaggcaaagagattgacctggagagcatcttttcacttaaccctgaccttgttcctgatgaagaaattgaacccagtccagaaacacctccacctccagcatcctcagccaaagtaaacaaaattgtaaagaatcgacggactgtagcttctattaagaatgaccctccttcaagagataatagagtggttggttcagcacgtgcacggcccagtcaatttcctgaacagtcttcctctgcacaacagaatgcacgtagaaaatctaattgtgtgaaagaagtagaaaaactgcaagaaaaacgagagaaaaggagattgcaacagcaagaacttagagaaaaaagagcccaggacgttgatgctacaaacccaaattatgaaattatgtgtatgatcagagactttagaggaagtttggattatagaccattaacaacagcagatcctattgatgaacataggatatgtgtgtgtgtaagaaaacgaccactcaata

SEQ ID NO: 152732 - DNA, 401 bp, Homo sapiens
ctgtaacaaaaaactttcgcaatagttgagcattctatttagttccgagtttctagacaacaaagaacaaaaggaaaaatactgagttactgttaggaaataacacagctgacttgattgaacccataaagttgtaaactcttactgcgtgtaatacaatacttattccctctttcttttctttttccaagataaagtgaaatctttccgtgcagctctacaagaggaggaacaagccagcaagcaaatcaacccgaagagaccccgtgccctttaaaccggcatttgctgctaaaggatacccagaaccctcactactgtaacatacaacggttcagctgtaagggccatttgaaagattggaattttaagtgtctgtgggaaatgttttgccctcactg

SEQ ID NO: 152733 - DNA, 480 bp, Homo sapiens
atgagagccttcctggcggcccttgtcaccgactggtaccaataccgtctggcagctaatgccttgtttacatttctttactgtgacaccttcaaattggagattttaaaggcttttaagcggtataaggaatctattcggtggttagaagatgaaaaggccctcttagagatgactgaagaagtagattatgatgtcgattcatatgctacacaacttgaagctattcttgagcaaaaaatagacattttaactgaactgcgggaaaacgagaccctggttccaaagacaacaaagacaaacaaaacacacaaagattgcggggcaagggggggcgcgaaccagaaaacgacagaggggaaagctatccacagcgagaagcgagcaccaaacaagagcgcgacatacacggcgaaagaagaacacaacaagacagggcaggagcgacgcgaaccagagaaataccgcgaaagcgagtaa

SEQ ID NO: 152734 - DNA, 4202 bp, Homo sapiens
tccggtccccctccctcagacgcgctgctcctgctccagatgaggtgatggcaacgccaacttcggcaagatccagatcgggatttacgtggagatcaagcgcagtcgggatagagtcttattctgtctcccagactggagtgcaatggtgtgatgtcggttcactgcaacctctgcctcctgggctcaactgatcctccccgctcagcctcccaagtagctgggactacagatgcacaccacatccggccgaatacatcaagcaatggtaacatctttaaatgaagataatgaaagtgtaactgttgaatggatagaaaatggagatacaaaaggcaaaggagattgacctggagagcatcttttcacttaaccctggacctttgttcctgatggagaaattgaaccaagtccaagaaacacctccacctccagcatcctcagccaaagtaaacaaaattgtaaagaatcgacggactgtaagcttctattaagaatgaccctccttcaaagagataatagagtggttgggttcagcacgtgcacggcccagtcaatttcctgaacagtcttcctctgcacaacagaatggtagtgttttcagatatatctccagttcaagctgcaaaaaaggaatttggacccccttcacgtagaagatctaattgtgtgaaagaagtagacaaactgcaagataaacgagagatgaagagattgcaacagcaagaacttagagaaataagagcccaggacgttgatgctacacacccaaattatgaaattatgtgtatgatcagaggctttacaggaagtttggattatagaccattagcatcagcagatcctattgatgaacataggatatatgtgtgtgtaagaaaacgaccactcaataaaaaagaaactcaaatgaaagatcttgatgtaatcacaattcctagtaaagatgttgtgatggtacatgaaccaaaacaaaaagtagatttaacaaggtacctagaaaaccaaacatttcgttttgattatgcctttgatgactcagctcctaatgaaatggtttacaggtttactgctagaccactagtggttactatatttgaaaggggaatggctacatgcttggcttatgggcagactggaagtggaaaaactcatactatgggtggtgacttttcaggaaagaaccaagattgttctaaaggaatttatgcattagcagctcgagatgtctttttaatgctaaagaagccaaactataagaagctagaacttcaagtatatgcaaccttctttgaaatttatagtggaaaggtgtttgacttgctaaacaggaaaacaaaattaagagttctagaagatggaaaacagcaggttcaagtggtgggattacaggaacgggaggtcaaatgtgttgaagatgtactgagaactcattgacataggcaacagttgcagaacatccggtcaaacatctgcaaatgcacattcatctcggagccatgcagtgtttcagattattcttagaaggaaaggaaaactacatggcaaattttctctcattgatttggctggaaatgaaagaggagctgatacttccagtgcggacaggcaaactaggcttgaaggtgctgaaattaataaaagccttttagcactcaaggagtgcatcagagccttaggtagaaataaacctcatactcctttccgtgcaagtaaactcactcaggtgttaagagattctttcataggtgaaaactctcgtacctgccatgattgccacaatctctccagggattgggcatcctgtgaaaatactcttaatacattaagatatgcaaatagggtcaaagaattgactgtagatccaactgctgctggtgatgttcgtccaataatgcaccatccaccaaaccagatttgatgacttagagacacagtggggtgtggggagttcccctcagagagatgatctaaaacttctttgtgaacaaaatgaagaagaagtctctccacagttgtttactttccacgaagctgtttcacaaatggtagaaatggaagaacaagttgtagaagatcacagggcagtgttccaggaatctattcggtggttagaagatgaaaaggccctcttaggagattgacttgaagaagtagattatggatgtcgattcatatgctacacaacttgaagctattcttgagcaaaaaatagacattttaactgaactgcggggataaagtgaaatctttccggtgcagctctacaagaggaggaacaagccagcaagcaaatcaacccgaagagaccccgtgccctttaaaccggcatttgctgctaaaggatacccagaaccctcactactgtaacatacaacggttcagctgtaaggtccatttgaaagtttggaattttaagtgtctgtggaaaatgttttgtccttcacctgaattacatttcaattttgtgaaacactcttttgtctacaaaatgcttctagtccaggaggcacaaccaagaactgggattaatgaagcattttgtttcatttacacaaatagtgatttacttttggagatccttgtcagttttattttctatttgatgaagtaagactgtggactcaatccagagccagatagtagggggaagccacagcatttccttttaactcagttcaatttttgtagtgaggactgagccagttttaaaatcctttgccgtgcatgcataccctcatcagtgattggtaccataccttgccccactccctagaggaccagctgtgctcaccttttccctggctttgtgccttgattaaggctactgacccctaaaattcctgaagcacagcccaagaaaaattacattccttgtcattgtaaaattaccccttgtgtgtaccatttttacctgtatttgagacattttttgtgtgtgacctagttaattttgcaggatgtgcccatatcattgaacggaactaaagtctgtgaccagtggatatagctgctggacccattccatcttatatgtaaagaaatctgggaattattattttaaaaccatataacatgtgattataatttttcttagcattttctttgtaaagaactacaatataaactagttggtgtataataaaaagtaatgaaattctgagaagagtttttatcttaggaaaatacatatatatgcagtgtgtgtgccagtgtggtattaacaagactaatagtgcagtttgatccttaccaatatcattacttaatttgaagtgttcattagcaccccaaaatataccttttctatgtactgttaaaagaaattggcttctgatgcatgaacatttacatgtacattgaaagtagtccataatagaagttagtttaagccaagtgtagacagtacattactcccttgaaaaagaattaagttgaaagagttgactttgccttaaaaggcagatctaacccaagctccatccagtaccaaatgtgaaacttcattgttgtttggtgagaatcgccaaattctcactaatacattggtatggtgtagggcatgctactttttaaacagcagcacttatttttacagattgctactccaaggaagaaaactggccacttttcatgtaaatattttgttcaaagatttgtatatctctctaggagttttccctcagttcccaggatggggtccaggagtagattaacagctaaaaatctcccaaggatatcttgttttgatttatttactccagggaactatcagctccttcacaggagccaaaggggagctatgaatagagggtcacatgagccagattctttactgttcataaaacccagagagtagttgtgaaagatcctaatacaattgtgaaaagctctgtaaacatgaaatctaaaacakatgtagattttcacaatatgcttattaataaatggabgtctatggaataagttttagagataatttacttcagtcacctttgttttggaaaggactcaggttttcttgcagctgtaagatatattctatttgtgtttatttcaaagggaagaggaaggatggacaactgttacaattgaccttgcaaaggatatttaaaaaaaaggtagtttttgagattaaccaactttcaaagggcaataaagacatgtgaatttgctcattttaaagcacaacagataaaaaa

SEQ ID NO: 152735 - DNA, 637 bp, Homo sapiens
  misc_feature (1)...(637): n = a,t,c or g
agttgcattaaggtttgctgatggtgttgtactgtttatggattttgacaaatgtataatgtatatgtgtatgttacacatttatcaaaatccatatgtgtacattatacatttgtcaaaatccataaaagttacaaaagtacaaaaaaagtacaatattcataaaaagacaacttgatgctcaaaaagtttcggattttggatgtttggatttgagatgctcaacccatagtaaaattcgctctttttcagaatacagttgagttttgccaaatttgacagttcacgcaagccccaccacaatcaagatatgggccgggaatggtgactcatgcctataatcccagcaccttgggaggacaacgtgggaggattgcttgagcccaggagttcaagacaagcctaagcaacataatgggacttcgtctctcaaaaaaaaaaaaaaaaaaaanccataataaaagtaataataatagctgggtgtggtggtgtgtgtctatagttttagctactcaggaggctggggtgggaggaagactgcttgagcccaggaggtcaaggctgcagcaagctgtgattgtaccgctgcactccaactccagcctgtgtgatagagcgagaccctgtctcaaaaaaa

SEQ ID NO: 152736 - DNA, 642 bp, Homo sapiens
atgctggaggagcaactggtgaggatgttaacccgagaagtcatggacctaatcacggtttgctgtgtttcaaagaagggtgctgaccacagtagtgctcccccagcagatggagacgatgaagaaatgatggccacagaggtcaccccctcagctatggcagagcttacagacctgggcaaatgtctgatgaagcatgaggtgctgtcagggacactgctcgcagatgcagttacgtggcttttcaccagtgtgctgaaaggcttacagatgcacgggcagcacgacgggtgcatggcttccctggtccatctggccttccagatatacgaggcactgcgccccaggtacctggagataagagctgtaatggagcaaatccctgaaatacagaaggactcactggaccagtttgactgcaagcttttaaacccctccctgcagaaagtggctgacaagcgccgaaaggaccaattcaaacgcctcattgctggttgcattgggaaacccttgggagagcagttccgaaaagaagttcacattaagaatcttccctcacttttcaaaaaaacaaagccaatgctggagacggaggtgctggacaatgatgggggtggcctggccaccatctttgaaccctga

SEQ ID NO: 152737 - DNA, 539 bp, Homo sapiens
ggtcgacccacgcgtccgaaagtaacttcagtatttgcagcattttgtgtttctgcctagaagctcccatttccctcatgtatagcttgagtgcatctctagaagatcagccatgggcatgggcattatgtggaggtgggagggctcctagtactacttagccaccacttagcctataacactcagctttgataatgattggtgcgctggtgacaaaacaggatattcttctctgaactgaaaggatggagcttaacattctactctctgataacagatgaagaaatgatggccacagaggtcaccccctcagctatggcagagcttacagacctgggcaaatgtctgatgaagcatgaggtgggtagaaggagcaggtgatacctttactccttgcccaggaggggagtcaccttttacttttcttgctctatggtgctatcaagagttttatgtaatactcctttgttacataagaacctggctccaaaggccccataataaaccgaaggaaaaggtgcatgtcttggaggctacca

SEQ ID NO: 152738 - DNA, 483 bp, Homo sapiens
cttctttgaaacacagcaaaccgtgattaggtccatgacttctcgggttaacatcctcaccagttgctcctccagcatctcttgagactctgggttttcatctgcagcctcatcttctccactgcagaaaaccagggggccaagttccacaggagtgcagaaaaggaaggacaaggaaagcagcgaccctaatcagactctctctgaccactttcttctcctttgggtcttcgttttatgcaaaagtgagtaatgtcacgcagtgatccactgaaggacgctatttctagtgactctgtccagagggatgtgcatgtcacacttaacataagtgagtaaggtaccagtagcccctatgaagcatgtgtctcacagttagcatgctggtaacagcctgtccagccgatccatgtgtcacctaggcttagaatcgctccagcttcgaagttccaccaccctggactagtgatctacgattttttt

SEQ ID NO: 152739 - DNA, 316 bp, Homo sapiens; identical to SEQ ID NO: 107823

SEQ ID NO: 152740 - DNA, 1494 bp, Homo sapiens
atggcggcgccggaggcggaggttctgtcctcagccgcagtccctgatttggagtggtatgagaagtccgaagaaactcacgcctcccagatagaactacttgagacaagctctacgcaggaacctctcaacgcttcggaggccttttgcccaagagactgcatggtaccagtggtgtttcctgggcctgtgagccaggaaggctgctgtcagtttacttgtgaacttctaaagcatatcatgtatcaacgccagcagctccctctgccctatgaacagcttaagcacttttaccgaaaaccttctccccagatgctagggatagactacatgggtgaactgacccagttcactgaatcccagctccagagtcattttggggagaagaatgggtctaggctatatgccatgtgccgagggattgaacatgatccagttaaacccaggcaactacccaaaaccattggctgtagtaagaacttcccaggaaaaacagctcttgctactcgggaacaggattacctcaacctctcttggaactcaatgactctcctgtcttcaaaaccgtcttggaaagaatgcagcgtttcttctctaccctctatgaaaactgctttttggaagaatgattccagagacgtggttgctttcttagtggctgtcaccgctgggccacttccctgggtcttagcttctgagctggtaactggcacctttggcagagaacttgggtcactgctcaagaagctggtgatgtctgtagaagatgaaggggcagaggcagaaaattttgtagcacagaggaaaagcattaatgacagggtagccacccagctggttgtgagcattcgtgtacaaggagacaaacgcctcagcagcctgcgccgctgctgtgcccttacccgctatgatgctcacaagatgagccatgatgcatttactgtcatcaagaactgtaatacttctggaatccagacagaatgcctgaactgcacagagtggagcctcttgccccctgccacagaggagatggtggcgcagtcgtctgtggtgaagggccgcttcatgggggacccatcatacgaatatgaacacactgagctgcagaagggacgctacaccgccaacgacacattaccggaaattcaggccgtcccggacaggctgactcaggtcctgttgaatctctatctcaatgctattcaggcgattggtcagcatggcgtgattagcgtgacggccagcgaaagcggcgcgggcgtgaaaatcagcgttaccgacagcggtaagggaattgcggcagatcattttgatgccatcttcactccgtacttcaccactaaagccgaaggcaccggattggggctggcggtcgtgcataatattgttgaacaacacggtggtacaattcaggtcgcaagccaggagggaaaaggctcaacgttcaccctctggcttccggtcaatattacgcgtaaggacccacaaggatga

SEQ ID NO: 152741 - DNA, 435 bp, Homo sapiens
ctcactctcagagaattctgtaattttctctcagctagttgaacttgaaggaccaaaacagttcggtcatcagaatgcctctatttctattggtgaagctaattcttgtgccttggacggtacccccatcttcctccttcctcacctggccagagacaggttgggatcagtgggcctgaggtggctgttgtggtagtatatacccacccttcacctagtaaccctgctttcttgctttagcggtttgctgtgtttcaaagaagggtgctgaccacagtagtgctcccccagcagatggagacgatgaagaaatgatggccacagaggtcaccccctcagctatggcagagcttacagacctgggcaaatgtctgatgaagcatgaggatgtttgtacagcgctattaattacagcctttcatttccctggcctgg

SEQ ID NO: 152742 - DNA, 4701 bp, Homo sapiens
tggtggagacccaagaagggaagacaactataattgaaggccgtatcacagcgactcccaaggagagtccaaatcctcctaacccctctggccagtgccccatctgccgttggaacctgaagcacaagtataactatgacgatgttctgctgcttagccagttcatccggcctcatggaggcatgctgccccgaaagatcacaggcctatgccaggaagaacaccgcaagatcgaggagtgtgtgaagatggcccaccgagcagagctgcagagggagctgcaaagactatcccctcttcccgccactcaggtctattaccaaatcacaggcctcggcttcctgaaggagttgttccgaagagcaaaccccaactcaaccgggcccttagcaaaggcgcaaggagggtacctgacgcgctgggctcctggctccgtcaagcccatctacaaaaaaggcccccgctggaacaggggagaagccaatcgcaaagctcactttagcaccgtgcagtggccagcaccaagtgccatcgcccatgcaaaggatgacgtcagccccctccagcccacacagtgcctgctggacaacatcaagaagaaagtagtgcccctgtctggtcgcccgggaaacacagactcaacgtgccaggagtcacgtagcatctacctgaagagccaagcacttgctgtcaccttcacccactttcttactgcaactgctgaacaggctgagcccagccagctgctgtcaccgcctccaggactcggggaaaagccccctgcagacttggtgctgcagtggatgaggctccacgggcaaagcagcactactgcaccagcccctctcacccagcacaaaggagagtttcatcttctgattctggagcatccagctgcagcttcccacccccgccgcccgccgcggcccggtaccaacgggtggtctcgccgagggagctgtcgtgcctcgtggtcccgggactgcagtggtgtgcgctctcggcgcgtggcgctaggcatggcgatggatcaagtaaacgcgctgtgcgagcagctggtgaaagcggtgacggtcatgatggaccccaactccacccagcgctaccggctggaagccctcaagttttgtgaggagtttaaagaaaagtgtcctatctgtgtcccctgtggcttgaggttggctgagaaaacacaagttgccatcgtcagacattttggccttcagatcctggaacacgttgtcaagtttcggtggaacggcatgtctcgattggagaaggtgtattttgaagaacaatggtcctggaacctgattgccaaaggaccctttgaacattttggaagaggagaaccatattaaagatgctctgtctcgaattgtagtggaaatgatcaagcgagagtggccacagcattggcctgacatgctaatagaattggacactctttccaaacaaggggaaacacagacagaattggtgatgtttatccttttgcgactggcagaggatgtagtgacttttcagacacttccccctcaaagaagaagggacatccagcaaacattaacccagaacatggaaaggatcttcagttttctgcttaacacacttcaagaaaatgtaaacaagtatcagcaagtgaagacagatacttctcaggagtcaaaggcgcaagcaaactgtcgagtaggagttgcagcactgaatactctagcaggctatattgactgggtgtctatgagtcacatcactgctgaaaactgtaaactcctggagatactgtgtttgctgttgaatgaacaggaacttcagttgggagccgctgagtgtcttctcattgcagtcagcagaaaaggcaagttggaagaccggaagcccttgatggtcttatttggagatgttgccatgcattatatactctccgccgcacagactgctgatggaggaggtttggtagaaaaacactacgtctttctgaagaggctctgtcaggtgttgtgtgcgctgggcaatcagctgtgtgcattgctgggtgcagattctgatgtagaaacaccatcaaactttggaaaatacctggaatcttttcttgctttcacaacccatccaagtcagtttctacgctcttcaactcagatgacttggggagccctcttcaggcatgaaatcctgtcccgtgatcctttgctattagcaataataccaaaatatcttcgtgcttccatgactaacttggtcaagatgggctttccttctaaaacagacagccctagctgtgaatattctcggtttgattttgatagcgatgaggacttcaatgctttcttcaactcctcccgagcacaacaaggagaggtgatgaggttggcatgtcgtttggatcccaaaactagcttccagatggctggggagtggctaaagtatcaactatcaacttttcttgatgctggttctgtgaattcttgttctgcagttggaactggagaaggaagcctctgttccgtcttctcaccttcattcgtgcagtgggaagccatgactctttttttggaaagtgttatcacccagatgtttcgaacactaaatagagaagaaattcctgttaatgatggaatagagctattgcagatggttctgaactttgataccaaggatcccctcatcctgtcctgcgtccttactaatgtctctgcactctttccatttggtcacctacagaccagagttcctgccccaggtcttctctaagctattttcatctgtcacttttgaaactgttgaagaaagtaaggcccccagaacccgggcagtgaggaatgtgaggaggcatgcttgttcctccatcatcaagatgtgtcgtgactacccccagcttgtgctgcccaattttgacatgctttataaccatgtgaagcaactcctctccaatgagctactcctgacacaaatggagaagtgtgccctcatggaagccctggttctcattagcaaccaatttaagaactacgagcgtcagaaggtgttcctagaggagctgatggcaccagtggccagcatctggttttctcaagacatgcacagagtgcgtgtcagatgttaatgctttcgttgcgtatgtgggtacagatcagaagagctgtgacccaggcctggaggatcagtgtggcttaaaccgtgcacgaatgagcttttgtgtatacagcattctgggtgtggtgaaacgaacttgctggcccactgacctacaagaggccaaagctgggggatttgcggtgggttatacatccagtggaaatccaatcttccgtaacccctgcacagagcagattctgaaacttcttgacaatttgcttgcgcttataagaacccacaatacattatatgcaccagaaatgctagccaaaatggcagagcctttcaccaaggctctgggatatgcttgacgcggaaaaatctgctatattaggattacctcaacctctcttgggaactcaatgactctcctgtcttcaaaaccgtcttgggaaaggaatgcagcgtttctttcttcttaccctcttatggaaaactgttttcatatcctaggggaagggcagggcccttccatgcagcaagacttctatactgtggaggaccttgctacccagcttctcagctcagccttctgtcaacttgaacaatattcctgactaccgactcagacccatgcttcgggtctttgtaaagcctctggtgctcttctgtcccccagagcactatgaagccctggtatcccccatcctcggacctcttttcacctacctccatatgaggctttctcagaaatggcaagttatcaaccaaaggagcctgctgtgtggagaagatgaggctgcagatgaaaacccagagtctcaagagatgctggaggagcaactggtgaggatgttaacccgagaagtcatggacctaatcacggtttgctgtgtttcaaagaagggtgctgaccacagtagtgctcccccagcagatggagacgatgaagaaatgatggccacagaggtcaccccctcagctatggcagagcttacagacctgggcaaatgtctgatgaagcatgaggatgtttgtacagcgctattaattacagccttcaattccctggccttggaaagattactctgtcctgccagaggacaaccttcaaaagttctgcttgcctctccttcaaaccaagtgcttgtcagggacactgctcgcagatgcagttacgtggcttttcaccagtgtgctgaaaggcttacagatgcacggggcagcacggacggggtgcatggcttcccctggtccaatctggcccttccagatatatgaggcactgcgccccagggtaccctggagataagagctgtaatggagcaaatcccttgaaatacagaaggactcactggaccagtttgactgcaagcttttaaacccctccctgcagaaagtggctgacaagcgccgaaaggaccaattcaaacgcctcattgctggttgcattgggaaacccttgggagagcagttccgaaaagaagttcacattaagaatcttccctcacttttcaaaaaaacaaagccaatggtggagacggaggtgctggacacatgatgggggtggccctggccaccatctttgaaccctgaatcaagcttttgggcatccttcaaaaaaaa

SEQ ID NO: 152743 - DNA, 921 bp, Homo sapiens
gttgggcaaaaattcctgtcccccagaactgaacaatgccctaagcccccatagcagttggcaaggggaccaaatgccccggcttgcttatagctcccaagcattgctactgtgcaggccaagggtactgaagttagtcccactgtcccctgtccatgcatgttggagggaccaggccatcgtggtggggtgggacaggagtatagttgtggccaagggcttgtgagtgggcctcctactccccagcacaggtgcaggaggaactctggaagcactgctctctgtcagtgatacagcttccaaggtgtttcttgaattagccagacattgtccctcagaaggggtgaaccccacgggccatgcgcaccctgttccaagccgggggccttttttgtagatgggctttgacgggagccaggagcccagcgccgtcaagttacccggttgagtttggggtttgctcttcgggaacaaactccttccaggaagccgaggccttgtgatttggtaaatagacctgctcggtgggccatcttcaacaacactccctcgaatcttgcggtgttccttcccctggcaataggccctgtgaatctttcggggcaagcaatccctcccatgaggccggatgaaactggctaagcaagcagaacatcgtccatagttatacttgtgcttcaggttccaactggcagatggggcactggcccagaggggttaggaggatttggactctccttgggagtcgctgtgatacggccttcaattatagttgtcttcccttcttgggtctccaccacttccctgaacccgcgagctggaagccgagacccagctggtcgctgccgggcccgctagtagcccacggagaaaacgcccacagccgaacaccagagccttgaggccccccgcacgcgtggg

SEQ ID NO: 152744 - DNA, 546 bp, Homo sapiens; identical to SEQ ID NO: 142654
  misc_feature (1)...(546): n = a,t,c or g

SEQ ID NO: 152745 - DNA, 508 bp, Homo sapiens
  misc_feature (1)...(508): n = a,t,c or g
accacgagcaaaggctcaaaagggttctcccgttttgtgggcacaaaaaagttgtcccccaaaaaccaccagggccctggccaaggttggcctgtattggggcatggcatcctgctcgtgtagctttctctgtggcacgcgtggggcagaaaggctaccatcnccgcactgagatcacaagaaaagatttataagattggccagggctaccttatcaaggcggcaagctgatcaagaacnaatgcctccactgactatgacctatctgacaagagcatcaaccctctgtccttgctggtgcagacgaagcggcgggctctggagaagattgaccttaagttcattgacaccacctccaagtttggccatggccgcttccagaccatggaggagaagaaagcattcatgggaccactgaagaaagaccgaattgcaaaggaagaaggagcttaatgccaggaacagattttgcagttggtggggtctcaataaaagttattttcccctg

SEQ ID NO: 152746 - DNA, 681 bp, Homo sapiens; identical to SEQ ID NO: 144895

SEQ ID NO: 152747 - DNA, 1254 bp, Homo sapiens; identical to SEQ ID NO: 142655

SEQ ID NO: 152748 - DNA, 903 bp, Homo sapiens; identical to SEQ ID NO: 144896

SEQ ID NO: 152749 - DNA, 1344 bp, Homo sapiens; identical to SEQ ID NO: 142652

SEQ ID NO: 152750 - DNA, 1134 bp, Homo sapiens; identical to SEQ ID NO: 144898

SEQ ID NO: 152751 - DNA, 1380 bp, Homo sapiens
  misc_feature (1)...(1380): n = a,t,c or g
gcgtaantcgaatctgacggcgtgacgtctcacagaaagttctccgctcccagacatgggaccctcggctttctgcctcggaagcgcagcagcaggcatcgtgggaaggcgaagagctttcctacggacgacccgcccaagccgggccacctcacaggcttcctggcatacacggctggcatgactcacatcgtgcgggaagtcgacaggccgggatccaaggcgaacaccaaggaggcgggggaggctgcgaccattgtagagacaccacccatggtgtctgttgggcattgtgggctacgtggaaacccctcgaggcctccggaccttcaagactgtctttgctgagcacatcagtgatgaatgcaagaggcgtttctataagaattggcataaatctaagaagaaggcctttaccaagtactgcaagaaaatggcaggatgaggatggcaagaagcagctggagaaggactttcagcagcatgaaagaagtactgccaagtcatcccgtgtcatttgcccacacccagattgcgcctgcttcctcttgcgccagaaagaaggcccacctgatggagatccaggttgaacggaggccnctgtggcccgagaagctgggactgggcccgcgagaagcttgaagcagcaggtacctgtgaaccaagtgttttgggcaggatgagaatgatcgaccgtcatcgggggtgacccaggggcaaaaggctacaaaagggggtcaccagttcgttggcacaccaagaaagctgcccccgcaagaccccaccccagggcctgcgcaaaggtgggccttgtattgggggcatggcaatcctggttcgtgtagccttctctgttggcaagccgctggggcagaaaaggcttaccatttcaccgcactgagatcaaccaaggaaggatttttaaagattggcccagggctaccttaatcaaggaccggcaagctgatcaaagaccaatgcctccacttgaattatgacctatcttgaccaagagcatcaaaccctctgggtggctttgtcccactattggtgaagtgaccgaaatgactttgtcatgcttgaaaggcctgtgtggtgggaaccaaaaaagcggggtgctcaccccttccgcaagtccttgctggtgcagacgaaagcggcgggctctggagaagattgaccttaagttcattgacacccacctccaagtttgcgccatggccgcttccagaccatggaggagaagaaagcattcatggggaccactgaagaaagaccgaattgccaaggaagaaggagcttaatgccaggaacagattttgcagttggtggggtctcaataaaagttattttccactgaaaaaaaaaaaaaactcgggg

SEQ ID NO: 152752 - DNA, 1102 bp, Homo sapiens
tgaaaaatcgatgaccctagtccagtttggaggacttccggcgccgccactgtccggccacagcctaacgctcttcgctgtcgtttgctgtctcgcgcagggcggtccccggttctggtgtttggcgtcggaattaaacaaccaccatgtcgagcaaaaaggcaaagaccaagaccaccaagaagcggccctcagcgtgcaacatccaatgtgtttgccatgtttgtttcactcacagattcagggagttcaaagagggcctttcaacatgattgatcaggaacagagatgggtttcattcggacaagggaaggttttgcatgatatgcttgccttctctagggaagaatccccactggatgcataccttgatgccatgatgaatgaggccccagggccccatcaagtttcaccatggttcctgaccatgttttggtgagaaagtttaaatcgcacagatcccctgaagattgtcatccagaaaccgccttttgctttgctttgattgaaagaaagcaaccaggcacccattccgggaagattacctaaggaggagctgctgaccaacccatggggggatcgggtttaccagattgaggaagttggatgaacctgtacaggagaagcacctatttgacaaaaaaaggggaattttcaaattacatcggagtttcaccacggcatcctaactggaaggcccccaaagcacaaagatgacttgaaagaacttttagcttaaaatcttcccagttacaattgtcttactctcttttacttctcagacactttcccccaccctcaatagaaccctgtggcatgcaacttagtttcacagctttgcctcttctttttgatgtatttattccagacctttctgccactttagcacttggtataatcagactgggaaatgggggatgagggtggtaaattgtattgaaaaagatcgcgaataaaaaatccacaaatgtgaaagcccagaaaaatatattcgtatttcctgggttttgctgggatttttacatttttatataataaaaatgttattttgaaataaagattatgctgactcaaatgcaatgtaaaaaaaaaaaaaaagggc

SEQ ID NO: 152753 - DNA, 483 bp, Homo sapiens
  misc_feature (1)...(483): n = a,t,c or g
gaaaccttctagcaacaggatgagtctgcagtggactgcagttgccaccttcctctatgcggaggtctttgttgtgttgcttctctgcattcccttcatttctcctaaaagatggcagaagattttcaagtcccggctgttggagttgttagtgtcctatggcaacaccttctttgtggttctcattgtcatctcggcccttgtccacactctccaagcacattacaggggacctgattgctacacgttcagaatgcgtttgctgtcatcctgctgtgcctgccaggcctgcacagccttggctnctacgcctgagcgtggagagcacgagttagttgtagtccggcttgcggtggggctgacttcctgttggtttgagcccctttttgttttgccctctgggtgttttctttggtcccgcaggagggtgggtggagcaggtggactggagtttctcttgagggcaataaaagttgtcatggt

SEQ ID NO: 152754 - DNA, 454 bp, Homo sapiens
  misc_feature (1)...(454): n = a,t,c or g
naagttggaggaagagaacaggagcctgaaggctgacctgcagaagctaaaggacgagctggccagcactaagcaaaaactagagaaagctgaaaaccaggttctggccatgcggaagcagtctgagggcctcaccaaggagtacgaccgcttgctggaggagcacgcaaagctgcaggctgcagtagatggtcccatggacaagaaggaagagtaagggcctccttcctcccctgcctgcagctggcttccacctggcacagccttggcttccacgcctgagcgtggagagcacgagttagttgtagtccggcttgcggtggggctgacttcctgttggtttgagcccctttttgttttgccctctgggtgttttctttggtcccgcaggagggtgggtggagcaggtggactggagtttctcttgagggcaataaaagttgtcatggtgtga

SEQ ID NO: 152755 - DNA, 426 bp, Homo sapiens
ccttctagcaacaggatgagtctgcagtggactgcagttgccaccttcctctatgcggaggtctttgttgtgttgcttctctgcattcccttcatttctcctaaaagatggcagaagattttcaagtcccggctggtggagttgttagtgtcctatggcaacaccttctttgtggttctcattgtcatccttgtgctgttggtcatcggtgagtgagctatggctgagggcagctacctgacctagaccctgggctctgctgcaaaaccctttgccacttttgatgtgtagcatccagttttggctgctaggagacagaccaatgaaatgctgtgtctttctcttgagggagggaagaggctccctttgcccatgctgctgaccgctagtcggttcttcactttgaggcccctctaggccgtacat

SEQ ID NO: 152756 - DNA, 1657 bp, Homo sapiens
tttccggccgcggtatgaggggcggggccggggctgctgtgggagagttcggttgctgcggcggggcctgcacgttgactgtgggaaactcggaaacaagctcacatcttcctgtgggaaaccttctagcaacaggatgagtctgcagtggactgcagtctgccaccttcctctatgcggaggtctttgttgtgttgcttctctgcattcccttcatttctcctaaaagatggcagaagattttcaagtcccggctggtgggagttgttagtgtccctatgggcaacaccttcttttgttggttctcattgtcatccttgtgctgttgggtcatcgaatgccgtgcggcgaaatttcgggaagtatggatggatgttgacgggaaaagggtgaacctcccaggaacaatcccggggggccatggggaggcactttcccacatggaagctttttccgtggccccaggagggaatctcttacattggctgggcttttccttgttgctgttccttcctgcttagacgcctgggtgactctcatttcgcagcaggccaacgctgctgggcctccaatgaagcctttaaaaagcaggcggagaagtgctaagtgaaggcggcaagaaagtacatggaggagaatgaccagctcaaaaaaggaagctccttttgacgaaggcaagttgaatttcgaaaatgctgagttaaagttggaggaaaagaaacagggagctgaaaggctaacctgcagaagctaaaggacgagctgggccaggcactaagcaaaaaactagagaaaggctgaaaaaccagtttctggcccatgcggaagcagttcatgaggggcctcacccaaggaggtacgaccgcttgctggaaggagcaaccaaaagctgcaggcttgcaagtagatggtcccatggaccaagaaggaagagtaagggcctccttccctacccctgcctgcaagctggcttccaaccctggcaacgtgcctgctgcttccctgaagaaccccggcctctcccctccagtaacttctgtttgtgcccttctgcttcccccaattcccttccaacagctcatagctcgtcatctcggcccttgtccacactctccaaggcacattacagggggacctgattgctacacgttcagaatgcgtttgctgtcatcctgacttctgcctggccaggcactgcacagcctttggcttttcacgcctgagcgtggagagcacgagttagttgtagtccggcttgcggtaggggctgacttcctgttggttttgagccccttttttgttttggccctctgagtgttttactttggtcccgcagaagggtgggtggaagcaggtggactggagtttctcttgagggcaataaaaagttgtatgatgtttgtatgtgttttgtatttctctggagtgcaatggtgcaatctcagctcactgcaacctctgcctcccaggttcaaaccattctcttgcctcagcctcctgagcagctgggattacaggcgctggccacacacccagctgattgttgtatttttagtagagctgggtttcaccatgttggccaggctggtctcgaactcctgacctcaggcaatccacccacctcagcctcccaacatgctgcaattacagatgtgag

SEQ ID NO: 152757 - DNA, 1510 bp, Homo sapiens
ccaggcccggggagctagtctccgcccttcgctcttacggatcccctcggagtacgcttttaccatgcaactcaggctcttccggcgcctccttctcgccgctttgctgctggtgatcgtctggaccctcttcgggccttcggggttgggggaggagctgctgaccctttcactagccttcttgctcccagcccccgccttaccggggccgcccctggccctgccccgccttttgatccccacccaggaagcttgctgtggtcccggggcccctcccttcctgctcatcctggggggcacggctccggagaacctgaaccagagaaacgccattcgggcttcgaggggcgggctgcgcgaggcccgggggctcagggtacagacgctcttcttgctgggagagccgaacgcacagcaccccgtgtggggtttcccagggggagtgaactgggccttcggagtcagcagcccagggggatatcttgcaggccgccttccaggactcctaccgcaacctcaccctaaagaccctcagcgggctgaactgggctgagaaacactgccccatggcccgatacgtccttcagaacggacgaagatgggattgcaaacgtccctgaactggtatcagagctggtcttgcgagggggccgttgggggcaatgggagagaagcacggaaccccagagagaggctgagcaggaaggaggccaggttttgcacagcgaggaagtgcctcttctgtacttgggccgggtgcactggcgcgtgaacccctctcggacaccggggggcaggcaccgcgtatcagaggagcagtggcctcacacctggggcccctttccaccctatgcctcaggcacggggtatgtgctgtcagcgtctgctgtgcagctcattctcaaggtggccagcccgggcaccccttctcccattagaggatgtctttgtgggggtaagtgcccgacgaggaaggcctcgccccaacacagtgtgtcaagctggctgtgtgccaacccactacccgctagaccggtgctgctatgggaaattcctgctgacgtcccacaagctggacccctggaagatgcaggaagcctggaagctggtgggtggctctgaacggggaaaaggactgcgccccttttgctccctggttcccagggaagtccctgggcatcctgcggtgtcgaagcaatagccctggcttcagagctgagagtgcctggggcccacaggaaaggcaggaacaggaccttctctctccccaggcccaacgcaggggccctcactggctgcagctgatctgttttccttataccagatcctcagtctcactaaagacagcgatatgggagacacccagggggcctggcccgccagcccaaaagatggtcatcgggaagagaaaaagaaaaaaatgctgcagttgttctctcaagctagggcagaagaggggtgtcaagctcctcaataaacttgtctccacttcaaaaaaaaaaaaaaaaaa

SEQ ID NO: 152758 - DNA, 455 bp, Homo sapiens; identical to SEQ ID NO: 133123

SEQ ID NO: 152759 - DNA, 1497 bp, Homo sapiens
ggcacgaggaagagcggtcggcggggtttcttcgttgcattgcctgagaggagcggagtctgccaggtggtgtccatcatgttctctttcaacatgttcgaccaccctattcccagggtcttccaaaaccgcttctccacacagtaccgctgcttctctgtgtccatgctagcatggcctaatgacaggtcagatgtggagaaaggagggaagataattatgccaccctcggccctggaccaactcagccgacttaacattacctatcccatgctgttcaaactgaccaataagaattcggaccgcatgacgcattgtggcgtgctggaatttgtggctgatgaaggcatctgctacctcccacactggatgatgcagaacttactcttggaagaagacggcctggtccagttggagaccgtcaaccttcaagtggccacctactccaagagtaagttctgctacctcccacactggatgatgcagaacttactcttggaagaaggcggcctggtccaggtggagagcgtcaaccttcaagtggccacctactccaaattccaacctcagagcgctgacttcctggacatcaccaaccccaaagccgtattagaaaacgcacttaggaactttgcctgtctgaccaccggggatgtgattgccattaactacaatgaaaagatctacgaactgcgtgtgatggagaccaaacccgacaaggcagtgtccattcatgagtgtgacatgaacgtggactttgatgctcccctgggctacaaagaacccgaaagacaagtccagcatgaggagtcgacagaaggtgaagccgaccacagtggctatgctggagagcttggcttccgcgctttctctggatctggcaatagactggatggaaagaagaaaggggtagagcccagcccctccccaatcaagcctggagatattaaaagaggaattcccaattatgaatttaaacttggtaagataactttcatcagaaattcacgtccccttgtcaaaaaggttgaagagaatagaactacagacatccaagccactcctaccccgctcacccctgctacacaccgcctccatacctttgaccggcctatggctgtactcggattgcattctcagcctccacttcaagcctgcgttccctggggaggtcattcaaccctagatccaccatatgtcatgcccaaccaatctcagttactttgcgagttcacctccatcctgagtggacgctcaagcaagactgctggagctgcagatctgggagacatggcggacggcagcggctggcagccgccgcgcccctgcgaggcctaccgcgccgagtggaagctctgccgcagcgccaggcacttcctacaccactactacgtccacggcgagcggccggcctgcgaacagtggcagcgcgacctggccagctgccgcgactgggaggagcgccggaacgccgaggcccaggagaaggacgagtga

SEQ ID NO: 152760 - DNA, 1422 bp, Homo sapiens
tgggagagcggtcggcggggtttcttcgttgcattgccctgagaggagcggagtctgccaggtggtgtccatcatgttctctttcaacatgttcgaccaccctattcccagggtcttccaaaaccgcttctccacacagtacccgctgcttttctttgtccagtgctagcagggcctaatgacagggttcgattggggaaaaggaggggaagataattatgccacccctcggccctggaccaaactcagccgactttaacattaccgtatcccaatgctgttcaaactgaccaattaggaattcggaccgcatgaccgcattgttgcagtgcctggagtttgtggctgatgagggcatctgctacttcccaacactgggatgatgcagaacttactcttggaaagaaggcggcctggtcccaggtgaagagcgtcaacctttcaagtgccaccctactcccaaatttccaacctcagagcccttgactttctgggacatcaccaaccccataagccgtttttgaaaaccgcacttaggaactttgcctgtctgatccaccggggatgtgattgccatccaactataatgaaaagatcctacggaactgcgttgtgatggagacccaaaccccgacaaggccagtgtcccatcattgaagtgtgaaccattgaaccgtggaactttgattgcttccccctggggctaccaaagaaccccggaaagaccaagtcccaccatgaggagtccgaacagaaggtgaaagccgaccccacagtggcctatgcctggaagagcctgggcttcccgcgcttttctcgtggatctgggcaatagacgtggatggaaagaagaaaggggtagagcccagccccctccccaatcaagccctggagatattaaaagaggaattccccaattatgaatttaaacttggtaagataactttcgatcgagaaattcacgtccccttgtcaaaaaggttgaagaggatgaagctggagggcagattcgtcgctttctctggagaaggacagtcattgcgtaaaaagggaagaaagccctaagtgaggactgttggctgattggaaaataataaaagaatcatttgcaacatcttggcttttagttactggcactgacagggacgagcctcatcagagaatactctgttacttaagatttatttagagttacctaagaattattaagtttgacttggaagtggagcagcaggactttgtagttgtatgcttgatttggggaaagacaaagagctgtccctgagggcctgtagatagctgcctcctcacgtcttcacactttcagcttgaggggagctcccactgcctcagcaggagcaattgtgcatccctaattctgtcaaaacctatgaaggtgagtaaattgtctaacatgaaaaa

SEQ ID NO: 152761 - DNA, 586 bp, Homo sapiens
gctccggctcgttctgccctatgtagtggatccgctccacgtacttctgggcagccttggggcactgcacctgctcctcccagttttcaccaaagaaatactccatgtccttggtcagcgcctccttccggtgcagctccatggggaagtacaaaggggcaaaggctggatggtccttgttgcgctccatttcctcctcgagggctgagtatgtgaagtaaagtgccgtggtggccagcttaaacagctccttcttaatgttgcctttcaagaagtccttgacaaactgggtgttttctgcccggtcgtgtgcttccttggtcccttccttcaggagctccgagaggtcagccattctcatttggttctccttttctagggccccagagttctttttttctgactcgtctaccccctctgaggtttccacttccgctgacattgctgctgggtgtggttcttgctgctctcgctcttctggtcctgccccaggtcgctgttcgcctgtccgccagcctccagtcagcgtgtccgtcagctactccctcaggcgccgcagtccctgcagcccagccggactggcgcg

SEQ ID NO: 152762 - DNA, 1515 bp, Homo sapiens
atggctcctctgcagcagcacatagcagtcttgccagacacaacagcagatcaagtaactactgaagatgatggctacacttggacagcacttcaacatgttgccacagccaaggaaaaaaggaaatcaagtcagacaatggaggaatcacaggatttccctcttcacatccccagaccggcgcaggggacccaaagggctgtggcccggccaagcccaggtccgaaggcctggaccgaggcagggcccgcgaaggacgcagcgcggtccgagaagccgggcggaaggaaggccccgggagggcgcggacagctcacctgccgcaggtcgctgtcgcctgtccgccagcctccagtcagcgtgcccgtcagcgactccctcaggcgccgcagtccctgcagcccagcggactggcgcgaggccggcgcaacatctctggaccggattcgtcccattctcgtcctcatggtggacaagaaactggtggtggttttcgggagcacaggtgcccagggtggctccgtggcccgcatactcctggaagatgggacattcaaggttcgagtggtgacccgaaaccctaggaagaaggcagcaaaggagctgaggctgcaaggtgcagaagtagtgcagggagaccaagatgaccaggtcatcatggagctggcccttgaattgggcttacgccaccttcatcgggaccaattactgggagagctgcagccaggagcaggaggtcactccagccgatctctggaccggattcgtcccattctcgtcctcatggtggacaagaaactgggcctccactatgtggtctacagcggcctggagaacatcaagaagctgacggcagggagattggccgccgcgcactttgacggcaaaggggaggtggaggaatatttccgggacattggcgttcccatgaccagtttggggggttcctcgctaatttggagaacctcctcctccaactttttttccccagaaaaaccccagaagggaaagagctactttgcggagcttgcccacaggtgacgttcccatggatggcatgtccgtgtctgacctggggtcctgtggtgctcagcctttttgaagatgccagaaaaatacgtcggccagaacatcggggctgagcacttgcaggcacacggccgaggagtacgcttccctgctcaccaagcacacccgcaaggtcgtgcacgatgccaagatgacttcctgaggactacgaaaagcttggctttcccggtgcccgggacctgggccaacatgttccgtttctatgccctgagaccccgacccgtgacattcgagcttgaccctgagactcaaccccaaggccctgacgctggaccagtggcttggaacagcacaaaggggacttcaacctgctgtgacgctgcccgcctcgcggccccttgtggggattcgggggcaccagaggggcaagaaggcaccaacatctgaaataaagcccatttgttctcccaaaaaaaaaaaaaaaaa

SEQ ID NO: 152763 - DNA, 1232 bp, Homo sapiens
tcattttgcgtagcgttgcgcgtgcgcagagaggccgccgtagtttgcgttttcactggtcgcccggcggccatggcggccgttctgaagccggtgctgctgggccttcgagatgcgccggtgcacggcagccccacagggccgggtgcctggactgctagcaagctgggcggcattccggatgctctgcccaccgtggctgcgcccaggcccgtgtgtcagcgctgcgggcagccgcttcgctctggtcgtgcaggtgtattgcccgctggaaggctccccgtttcaccgtctgctgcacgtgttcgcgtgcgcctgccccggctgtagcaccggcggtgcgcgcagctggaaggtgttccgctcccagtgcctgcaggtgccagagagagaggcgcaggacgctcagaaacagggaaacagccttgcagctgaggactggtgtgaaggtgctgatgactggggaagtgatactgaggaggggccttcaccacagtttaccttggattttgggaatgatgccagcagtgccaaagacgtagactggactgctcggctccaagacctccgcctgcaggatgctgtcctgggtgctgcccatcctgtgcctcctgggctgccgctcttcctgccctactacatctgtgttgcagatgaggatgattacagggactttgtcaacctggatcatgcccacagccttctgagggactatcagcagagagaaggcattgccatggatcagttgctttcccaaagccttcctaatgatggtgatgaaaaatatgagaagaccataattaaaaagtgggaggatccagaccgttttaacaaattccatgaaagcgaaattggctgcttgtcagggagcagattttgagggtattccctggagtggagagccactctttttgacctgcccctacatcagaagtcaccgagctccccagcctgcagccagtgtgggaggccaaaaggatatttgagtttcagcttatgccagcactgggtcagcatgcttcaagagtgctaatttagggtctttctgtgggaattttggaacaattcttagttttacacatgtgaggaagagttgctggcccccaaatcatcagactcccatggaagaatttttgtattatacaaagaagacccagatgaattattgtttaatgtagagcatttccttttattaatataaattaaaacaaatgtttacatccaaaaaaaaa

SEQ ID NO: 152764 - DNA, 450 bp, Homo sapiens; identical to SEQ ID NO: 133825

SEQ ID NO: 152765 - DNA, 1239 bp, Homo sapiens
atggcgtccacggtcatcattcctcagagaggcccagtgaggcaaggccgggaagggcttagcagccagagggcacccataggcctcatgccagaggtggctccgtcagaggatgagggccaacaccagacggtggctgagaacggagctgctgtgggctggcagggtcacttccgccagggaggtcccccatctgcagtcatgaggtcgcttcaagtttatcgatattggtatcaactttgactgaccctatgttcagaggaatttataggggggttcaaaagcatcaagatgacttacaggatgtaatagggagagctgtcgagattggtgttaaaaagtttatgattacacggtggaaatctacaagacagtaaagatgcactgcatttggcacaaacaaatggtatgtttttcagtacagttgggatgtcatcctacaagatgtgggtgaattttgaaaagaataaccctgatctttacttaaagggagttgctaaaatctttgctggaaaacattaaaggggaagttgtggcaattaggagaatgccggacttgattttgacccgactgcagttttgtcccaaagatactcaactccaatattttgaaaaacagtttgaacctgtcagaacaaacaaaattaccaatgtttttttcatggtcgaaactcacatggctggaattttttggacataatgaaaagaaatagagatcggtgtgtagggggagtggtgcattcatttgatggtaccaaggaagcagccagctgcttgaattaccttggatctttatataggatttaatgggtggcctcacctgaaaacctgaagcctaatttgggaaggttttggaagtcaattccccagtgaaaaattaatgattgaggccagatgcacccttggtgtggagtcaaaagtacacatgcttggatcaaaatatataagaactgcatttccttcccaaaaagaagtgggaaagtgggcactgcttaaaagacagaaatgaaccctgccatataattcaaatattggagataatgtcagcagtgagagatgaggatccactggaattagccaatacactatataacaatactattaaagtatttttttcctggaatataattggtatatgtcttccactttccatcatgtatgtaaaatttcatagtaaaacttcctgatagtttcaataaagaaattatctgcaaaaaaaaaaatggtgtaagaagtcgg

SEQ ID NO: 152766 - DNA, 456 bp, Homo sapiens; identical to SEQ ID NO: 134989
  misc_feature (1)...(456): n = a,t,c or g

SEQ ID NO: 152767 - DNA, 512 bp, Homo sapiens; identical to SEQ ID NO: 134990

SEQ ID NO: 152768 - DNA, 1308 bp, Homo sapiens
  misc_feature (1)...(1308): n = a,t,c or g
atgcgccgacccaggcggcggctttgttggctgcggtgtctggttgagtgcgggccgctgcagagccgcagtgctgtggggaacagtgaagagcagcgaaaagcttatgttttcttttccagtttgagtctagtggacactcatgaggaccatgatacttccacttgagaatacagacgagtccaaccatgaccctcagtttgagccaatagtttcttcttcctgagcaagaaatttaaaacactggaagaagatgaagaggaactttttaaaatgcgggcaaaactgttccgatttgcctctgagaacgatctcccatgaatggaaggagcgaggcacttggtgaccgtcaagctcctgaagcacaaggagaaaggggccataccgcctcctacatgcggaggggacaaagacccttgaaagatctgttgccaacccactaccatcacgcccgntgatgggagctgaaagcccaacggcaggtaggcgaccngtgccctgggttctggaaacaccccacgcttgactttcgcccgaacgagtgccccccaagcccagagctgcctggccccncccgcttccctgaatgcctgaagaatgccacagaaattccaaaaccaaagttttgaagaattgcagggaaagagatccgaaggagaggaggaaaaggaaagcaggttccagggcaaaaatgattcattgcccgaaaaaagtgtgcggaaaagccaggaagctctctgcggtgaagggaggagaccaaggaggatgctgaggcagaagcaataaatcggcttattttattatcattttcctctctgtccttatcctagttcttaaaaaatactacacctgacacctctttttcggtttgttttttattctttcattttaaccaagggacgttatattaagtacctgaactcaacattcaggttgtttttttttttttgtttctaagtttttgccctattgaagatgacttcagaaaatccattccccagtcatgaaaatgtactgtgctaactttcttttccatagtggaaacacttatttatagtcatcaaaaatagtgaataaaaaacacatttggaacctgggccagatggcaggactgtgtgtgtacaggcccctgcgctgtgagcgccgctcgcctaagcctcccgggtgtatgtccaggcctgtccgcagcacaggtgggtgctgcacctcacggtagcctgggttcctgggagagacgccctggtgtctgaggtcgtgcatgtatcttgctgtgggccttgaagctgaggtgtctgagctggcgctggt

SEQ ID NO: 152769 - DNA, 1343 bp, Homo sapiens
  misc_feature (1)...(1343): n = a,t,c or g
ttcccaaatggtttttccttggcaataggactgtcccttagatgtctcttcccatttgtagatcactgccctatctcctccatatcccctcacctaaaatagaatgggtgaaactatgatgctatgcaggatactgtcatttacattaacattaaaccgtacctgtacttgatgcaaaggacatgtgctccacaatccaggaatagccactttcaggggattttccaaatcttaattaggattgaaatgcaaaatatccctctgttctagctattgtttaaccctgggtggcatgtgggaaacactcaaggagctttaagatacaaaacactgccaggctcccttacccagtcagtcaaatccgattctggagttgggacctaggtgtgtgatgagaactgctgagtcctgtcgaaggttaagctgggcagcactgcttggcagccactggaggtgctgttcccacccatgtgcagctgggcagggtccctaccccagggcagcagttaatgggcctaggacacccctggcatatttgagattcaaggaaatgttcagtagtgggttaattaatgtggaatttccacagttcttgtatctttcacacttccattctctgcttttaaggtgagattctaagtactgtggacccataatctgtcaggtagagtctgaaatgtttttcctctcattttagggatgggcgtgttttgggcgtgctagaggtgtcacgctccattggggacgggcagtacaagcgctgcagntgtcacctctgtgccccgacatcaagacgctgcccagctgacccccaaatgacaggttcatttcgtttggccctgtgatgggctctttcaaggtctttaccccagaagaagccgtgaacttcatcttggtcctgtctcgaggatgaaaagatccagacccgggaagggaagtccgcagccgacgtccgcttacgaagcagccctgcaancaggctggccaacaaggcggttgcagccggggctcggccggacaacgtcactgtgattggtggtgcgggatagggcactgaggggtggcgcgcggccaggagcacgcatgggtatttgacttaaaaaggttcattttgtgtgtgtgcacattgtgtgttttgtgtactccctgtgggactcccatggttgtaaataaaggtttctctttttaaaaaaaaaaaaaaaaaaaaaaaaaggggggcccgttttaaagaacccttggggggcccaaattttacccgggcttgcaacgtaaaactttttccccttatggggggccgttttaaaacctaggccttggcccgggttttaaaaaggtcgggagtg

SEQ ID NO: 152770 - DNA, 470 bp, Homo sapiens; identical to SEQ ID NO: 109762

SEQ ID NO: 152771 - DNA, 2973 bp, Homo sapiens
atgagaaaaaaatttcatattattgtatgtggactggactctatcatcgccagaagatggataaatggcatgctgatatctcttctaaattatgaagatggtgtcttagatccaagctccattgtccctttgatagatggggggacagaaggttttaaaggaaatgcccgggtgattctgcctggaatgactgcttgtatcgaatgcacgctggaactttatccaccacaggaaaactgcccagcttgtagccagcttcctcaaaatattcagttttctccatcagctaaactacaggaggttttggattatctaaccaatagtgcttctctgccgttcatagctacttctttcagccatgaggatatagataatcacacagaagactcagtacagtacgtgggatatgagccccggtacttacggctcctcgccatccgccatattgttctccgcctcttcccaggtgcccacgcgcggcagggcggggaggagcgggactggcaaagcggggaggggcggggctggcgaagcggggaggggcgaggccagaaacacaaccggcagggagctgatcggttgccgccgccgccgccgccagattctggaggcgaagaacgcaaagctgagaacatggacgttaatatcgccccactccgcgcctgggacgatttcttcccgggttccgatcgctttgcccggccggacttcagggacatttccaaatggaacaaccgcgtagtgagcaacctgctctattaccagaccaactacctggtggtggctgccatgatgatttccattgtgggatttggttgctgtgtacgtggaagaagcaagcgcatgcgcacatgggcccccttcgtctcagctgtgcgggaacggccgaggctctccagcttcgctaagcaggccctgtcccaggcccagaagtctattgacagggttctggacatccaggaagaggagccgagcatctgggccgagaccattccgtatggagagccggcttccaagcacaaccttcccgaacctgaacctcgaattgcttcgcgtctcgggcactgttgggatccaaggtctgaagtacgtaaatcatcagggaagggaagaacaatcgctaacagtggacccacaccagttttcttccgaataagttcccctgtcagtggaggatgggatacttcaacctgggggttgaaatcaaacactgaacctcagagtccaccaatagcctctcctaaagcaatcacaaagccagttcggaggactgtggtcgatgaatctgaaaatttcttcagtgcctttctctcgccaactgatgtccagaccattcagaagagtccagtggtatcaaaacctccagcaaaatcacaacgaccagaagaagaagtgaaaagcagcttacatgaatccttgcacattggccagtcaagaactcctgaaacaactgaatcacaagtaaaagactcttctttgtgtgtttcaggggaaactctggcagcaggtacttcatcacctaaaactgaaggcaagcacgaagaaactgttaataaagaatcggatatgaaggtgccaactgtaagtttgaaagtatctgaaagtgtaattgatgtgaaaacaactatggaaagtatatctaatacgtctacgcagtctctcacagcagaaacaaaggacatagctttggaacctaaggaacaaaaacatgaagacaggcagagcaatacaccttctcctcctgttagtaccttttcatcaggtacttctaccaccagtgatattgaagttttagatcatgaaagtgtaataagtgagagctcagcgagctcgagacaagagactacagattcaaaatcaagtcttcacttgatgcagacatcttttcagcttctctctgcatctgcttgtcctgaatataatcgtttagatgatttccaaaaactcactgagagttgctgttcatctgatgcttttgaaagaatagactcatttagtgtacagtcattagatagccggagtgtaagtgaaatcaattcagatgatgaattgtcaggcaagggatatgctttagtgcctattatagttaattcttcaactccaaagtctaaaacagttgaatctgctgaaggaaaatctgaagaagtaaatgaaacattagttatacccactgaggaagcagaaatggaagaaagtggacgaagtgcaactcctgttaactgtgaacagcctgatatcttggtttcttctacaccaataaatgaaggacagactgtgttagacaaggtggctgagcagtgtgaacctgctgaaagtcagccagaagcactttctgagaaggaagatgtttgcaaggtaactctaacagttgaatttctgaatgaaaagctggaaaaaagggaggctcagttattatctcttagtaaggaaaaagcacttctagaagaagcttttgataacctgaaagatgaaatgttcagagtgaaagaagaaagcagtagcatttcttccttgaaagatgagtttactcaaagaattgcagaagcagaaaagaaagttcaactagcctgcaaagagagagatgctgctaaaaaggaaatcaaaaacataaaagaagaacttgccactagattaaatagtagtgaaactgcagaccttttgaaagagaaagatgagcagatccgagggttaatggaagaagactgggctgctgtatttgaactgtacaactgtgaagatgaacgctgttacttagacttggccaggctgagaggcgttcactacatcacttggcgacggcagaacaaagtctttcctcaggataagggccaccatccaaccctgggggagcacccgaagttcaccaactactctttcgatgtagaagaatttatgtatcttgtccttcaggctgcagaccacgtattgcaacacccaaagtggccatttaagaagaaacatgatgagctataa

SEQ ID NO: 152772 - DNA, 2232 bp, Homo sapiens
gggggcggagaacaatatggcggatggcgaggagccggagaagatgagatggacaatataggatctggtggctgatagaatggcatgttgatggtgggtgtggggacactgagacttggaaggatcgtctggaaccatgtaaagaagattcctcgagcgatctggacccttcacacaccctgatttcgaacccgagcactgaatctctccagttcttgttagatacatgtaaaagttctagtcattggagctggcggcattaggatgtgagctcctgaaaaatctggccttgtcttggttttagacagattcatgttatagatattggacactattagatgtttccaattcttaaattaggcagtttttatttaggcctaaagatattggaagacctaaggctgaagttgctgcagaatttctaaatgacagagtttcctaattgccaatgtagttccacatttccaacaaggatccaggattttaacggacactttctatccgacaatttcatattgattgtgtgtgggactgggactctatcatgcgccagaagatggataaatggcatgctgatatctcttcctaaattatgaaagaatggtgtcttaagatccaagctccattgtccctttgatagattggggggacagaagggttttaaagaaaatgcccgggtgattcttgcctggaatgactgcttgtatcgaatgcacgctggaactttatccaccacaggttaattttcccatgtgcaccattgcatctatgcccaggctaccagaacactgtattggagtatgtagggatgttgcagtggcctaaggagcagccttttggagaagggggttccattagatggagatgatcctggaacatatacaatggattttccaaaaatccctagagagagcatcacaatataatattaggggtgttacgtataggctcactcaaggggtagtaaaaagaatcattcctgcagtagcttccacaaatgcagtcattgcagctgtgtgtgccacctgaaggtttttaaaatagccacaagtgcatacattcccctttgaataattacttgggtgtttaatgatgtaggatgggctgtatacatacacatttgaaggcaggaaaggaaagggaaaactgcccagcttgtaggccagcttcctcaaaatatttcagtttttctccatcaggctaaactacagggaggttttggggattattctaaccaatagtgcttctctgcaaaatgaaatcctcccagccatcacagccaccctaggaggggaaaaaataggaacactttacttacagtcggtaacctctattgaagaacgaacaaggccaaatctctcccaaaaccattggaaggattgggggcttgttggatggaccaaaaactggccggttgctggatgtcaccacccccacagactgtactattccaaacttccattttacttcttaagggaaaatctcccacataataggaaaactcatggaaataatatactttgtggatgcttaagaagttgaatccgatgtcatttttagcaataagtgttgccacggatttggtctttttttatataatggacccactctttttttaccttgtaaccttcccttgaagacagaattttgggtgttggtgcttgcaagcaagcattttcattaataatatgagaaatgatacctggagagagagattatgagcaaatgtattgcttcttttagaggaggaagcatacaacctctttttgtgtgaattttgttattatggtcaaagaatgcattcctaagttttcattttatgtattcaaatacacaaaaggtgtcccctttaagggaaataaagaattaaagttttaaataccattaccattttaccaatcctgaccatcctggagtatattgaaccatagggcctatttccttgatataacacctcatttaattgtggcccatcccaaatgaatattattgcaagaatttatcttgttcataatgatttgttaatgggtgttatagctgaataccctgtgcatgaaaatgggcaatattttcatctgtttacttgtagtgccatagaggccaatatgcacaatattaactaatgccaagacatggctgtttaaaaaatttaatgttcaaacagttatcactgatgcttttgcactatttattaataaaatcaatatattgtgtaaaaaaaaaaaaaaaaaa

SEQ ID NO: 152773 - DNA, 313 bp, Homo sapiens
  misc_feature (1)...(313): n = a,t,c or g
naagtgttagtttacttcttgcttagtggagacaaaaattgtgagataaagaggaaggaataggatgtacacatttacccatcaatatagcacccagtgttatttcagcaggacccttctgttagcatctaaggtaaggttaggacagtcaagataaaatactggatgnnnnnnnnnnnnnnnnnnnnnnnnnnnnnnnnnnnnnnnnnnnnnnnnnnnnnnnnnnnnnnnnnnnnnnnnnnnnnnnnnnnnnnnnnnnnnnnnnnnnnnnnnnnnnnnnnnnnnnnnnnnnnnnnnnnnngctcgtgccgaa

SEQ ID NO: 152774 - DNA, 621 bp, Homo sapiens
tttttttactactaagcttttacaaaagaagtatctgttttattgtatagaacaagtacagcattttactacatagtatacaagtttttaatgagcatttaaaaaaataagtaaatctaggctatttgaaaaatacagttgagccagtgagcacattttataaatttggaagacacaaatcaaatgtgaaggatttgattttctacatttaaaatgaggaaccaaaactctcttcttgattttcagctaagggcaggggactactttccaactccttttgccttcgggaaaaggcccggtctcagttctgaaagtcccttaaggattgcttgctgtcgatccctatttttcaccatgttaggattaagaagtgggatccctgccccggtccgattacaattagcggtcgttttgggcaacagtctggggaattttggaactgagggtccggggttgaagggccgcacaatggtcactggggatccaggtaatagatctcatttgttcgaacatacgggaataaaatggggatgattccagaaatcccaagatgataattctgtttgattacttcctgagatcaaattctctctctcatagctactgttttttagtggtaaa

SEQ ID NO: 152775 - DNA, 5167 bp, Homo sapiens
  misc_feature (1)...(5167): n = a,t,c or g
gagttttttttttttttttttttaaaattaagacaagtttattgagtaaaaaaatgcatacattggaacggcaaaacatcaataaggccctaaaacaaaaaatacagttatgctttaacaaattcttagcaatgtggcccacgctttttaaaaaattgacgtgttggcagtgttggttaggaacactgacgtacatcccaaatagtaataaattcagtatggaaattatacggcataaccttactcacccatactactttttctccccaaactattgtgacttctttttgctctctggatttaaaccaacagggggaccatccctttacacctttgctcccatcccttgggttttaaaaaggaatgggctgtagttaagttttggattcactgatatactctctgtacttgagggaagagtaagctgtggttttaaaagtgcccttttccatggtcgtcatgtcccaataccctctggcatttcaaaatggtgactcagatggtttttccctctacaggaactaggaaaattgtccccccactttggtcctatttacctcatttgaagacaaaccagggttactaagagttttaccattaagttatttctttagagtgacgaagtgttagtttacttcttgcttagtggagacaaaaattgtgagataaagaggaaggaataggatgtacacatttacccatcaatatagcaccccagtgttatttcagcaggacccttctgttagcatctaaggtaaggttaggacagtcaagataaaatactggatgttggccaggagcagtggctcaagcctgtaatcccagcactttgggaggctgaggcaggcagatcatgaggtccaggagatcaaacaccaccctggctaaacacagtgnaaaccctgtctctactaaaaatacaaaaagttagttagttagttagccaggcgtggtggtgggtgcctgtagtcccagccattcgggaggttgaggcaggagaatggtgtgaacctgggaggcagagcttgcagtgagattgcaccactgtactccagcttgggcgacagagcgagactccatctccaaaaaaaaacaaaaaaacaacaacaaaaaaaaaacactgtatgttaagggagactccttcagtatctaagagcacttgggggtggactgggggagaagggatgacttcatttacccccatagttatggagtcttgagttctaagaaaattttcatccctattgatttttatgctaaaaacagaatcttacaaatgtgatagctatatatccaaatgaggtggtctagtacaagcatttctgaaaaaatttttgaatgacaaaattttatcctaagcgatatgttttccaagtgaatataattctagtttaacacaacattgcaagtcaggtgtgcacattttactaacaaacatatatccaatgtgatttccagggccttctcccagaagcaaaaggagttggaaagtagtctcctgcctttagctgaaaatcaagaagagagttttggttcttcattttaaatgtagaaaatcaaatccttcacatttgatttgtggtcttcccaattattaaaaatgtgctcactggctcaactgtatttttcaaatagcctagatttacttatttttttaaatgctcattaaaaacttgtatactatgtagtaaaatgctgtacttgttctatacaataaaacagatacttcttttgtaaaagcttagtagtaaaaaaaaaaaaaaaaaaaaccggttcttctgctctgtcaccacctgggtattgaagccctataaaaacactttctacttaccttaatatagtctggcgttgctgggacctcacagtgttctttcacactttttatgtaacttaggaactgaaataccactcatgcatttgttctaaagtgccaaagttctgtctaacttattaacacgtctagacccataactccataacttttactgaaataacacaaattcagtttaggctccttctctaaatcctgacatttatttgcactatgacatttatttgtagaaattgcaattttcaaaaacatttttaaaagttagcattagtaacaagttagtaattagtattagaggcagtagttaggaatagatacgggtttgaaagctatctccactgtatctgtctagtatagcattaatgtgttcaacaaatggtaattactactaagaccacctcaaaaatatattcccattatacttccattttgctaaaactaatttaaaaatcaaattgttcaacgcctttgataaacagaagcctatcttttgaaataaaaaatttaatttcattaaatcaaggattgcgcaggtactgaaaattatccaatactctcaaaaagttaccagaattttagcaataggcagtttttacatgactaagcctagagataaaaaatgtgtcctatgtacatagtttattatctaaatgaaactgcactgttagataaatcttgaggtatcgagccaaaatcctgtaaatattaacactgctattactgacttatacctgtgtaaacacagtataccaaaagcctacatcaaaataattcacttcaacaaaagtactttatatcaggtgacattagagaaaaagaagtaaagcctttgctgtttaccgtcctcctgcaagcatctgattttacacataaaacaggcttcaatttgaagcctaagtacaggtaacatacaaaaagtaaaacttagaagtgccaacatgagataattcaagtacaatatatgttaaaaatatatatttatttccaatttttagatgcttcaactgttacaggccatcatgatttaaataaaagaaaaaacatttgagaaagaacaagaaccttttgtttagagaatgaaatataaattgttaataaacaaagtccacaacaatctcttaaaaaaaaagttactacagttatttctcttgtgaatatggcctggaagaatcacttttcccccaacttaagggaggggggagatttatctctatccaagctttcagtataagcagataagaagtaattctcattttcttgagactgacttgatgaaagggcatatgggtgtccccaaaaatgtctgatgagtgagaacattaaaatgactaaactgatgggacatatttaattgactatgataaacctgaaagttactatatgaatcttgttctgttgaattgctgttctctccttcagagcatactatatcaatagaagttctctcttcagaatcaaggtaagtcttatcttctaataaactgttttgcacatcaggagacgattgcaactcaatttgagtattctttttttgatctgttccacgtgatcctttggtctctttctcccatatttctgaatgaaaattgctgcatacttctatatgtgagatttcatcccctgaatccagagacatatcctcttcatccttttcatcgttttcaaaaagagctgactgcgactcaagattctcattagcaccaagctgtggaaggttttcttctgtgattgaattgtgatagcccacaagatttttaaagttttgcatgaagtcttcagcagttgcaaccactattccattatctgtataactggaaagcatcttgatgttcttctctgttaaaaagactatgtgtcgttgctgtatgttctgagcctgaagtctgataaggcaatccaattctggagcatttcgagtttgtgaatcacaattgtggtatgacaaaatttcaaccagatgtttcttctgatagacattcagaagcgtcaacagacttagagctttagcattcaatctgcctagttcctttagtttcttctgaaatttacagtggactttccattgccattttccttctggagtactaagttcctcaaggaatgtcaaaaaatttttaaggttctcaactgtgacaacctctgggtttagaattgattcatcagatacgataaaacctccagatacaaataattcattgtatgtatgatttttaacatcatccaggctatcaacaccagcaaaactaacacaggggagcttctttaaagtcaccaagccaggtatcttgtgaatgaaacctgcaatgtcttcattttgaataataatcaatagtttatctaattttgatcttctttccaaaaactgttcaggatgacattctgtattgcctaatttgataagatattcctttatttctttacagagcacactctcttcttcttcatgaatataaaatttcacagtatttttctggacgtctttcatgattttaaccaaactattaaatacttcaggttctaactggcttataaaatttgaaagagctggttgagcagaaatgtttacatcactgggggattttgttgtttcttctactggttcccgggccatatcaccaggtacaatatgatcagaagtcaccattaactctgtggcatgttgaggctggttcatttctacttcagttaaagccgaagtggaatgctgctcatcagagttggtatctttcaaaggatcactacacagtggctcaaggagatgtttattgttgaagtcacttgaggaaactggtatgacatgcctttccagaggattcgatgctatcttagcaccagaatcgttaggactgactggtggcaaattcccacccttggctgatgctttaataataatagtatttagcttctcatgcaaaccatctacaaactcctgcacaccagctttggaagtcttagaatatatgaactcggaaagccgtttcatcttctcttgtgttgaaaagataggtgtggaaactctactgacatatgaaacattcttttgcttcaaaatctcttctatcttcctagaaaagagattgtactctcctaacactgtcctctctgtggtttcgctcactgcaggcggctctgcctctgctgctggcacacactgctcctccacctgacctgtcaacacgtcatcctcagtggtgccctttagtgtgtctgtaaatggagaggatggaaactggtaatcagaacttctctgtctatttattacccgggggtcgttaggaaaggcctcctgtggtggcacacacaccagttgttcttctggtgatttcatacctatac

SEQ ID NO: 152776 - DNA, 471 bp, Homo sapiens; identical to SEQ ID NO: 129436
  misc_feature (1)...(471): n = a,t,c or g

SEQ ID NO: 152777 - DNA, 1334 bp, Homo sapiens
gcactggttatctaccgctaatgtcatctctgattattatgacacagagctcacccacacaagacactgcggaaactgtctgagacacgccagagctttatcatcaaggaaagggggaaatagcaaggtgctggatcaaatactgtttgactctcatgcagaatgcccaactctccatgcaggacaacatatgagagcttgatcttgataaacagtctgaacttatagctttaaggaaaaaagaactagatgaggaggaaagcattcggaaaaaagctgtgcagtttggaaccggtgaactgtgtgatgccatctctgcaatagaagagaaagtgagctacttgagacctttagattttgaagaagccagagaacttttcttattgggtcagcactatgtctttgaggcaaaagagttctttcagattgatggttatgtcactgaccatattgaagttgtccaagaccacagtgctctgtttaaggtgcttgcattctttgaaactgacatggagagacggtgcaagatgcataaacgcagaatagccatgctagagcccctaactgtagacctgaatccacagtattatctgttggtcaacagacagatccagtttgaaattgcacatgcttactatgatatgatggatttgaaggttgccattgctgacaggctaagggatcctgattcacacattgtaaaaaaaataaataatcttaataagtcagcactgaagtactaccagctcttcttagactccctgagagacccaaataaagtattccctgagcatataggggaagatgttcttcgccctgccatgttagctaagtttcgagttgcccgtctctatggcaaaatcattactgcagatcccaagaaagagctggaaaatttggcaacatcattggaacattacaaatttattgttgattactgtgaaaagcatcctgaggccgcccagggaaatagaagttgagctagaacttagtaaagagatggttagttcttttcccaacaaaaatgggagagattcagaaccaagatggccctgtcttaatccttgtttttaaagaaaggaaatgtgcaatattgaagtgatctttttccctagtcagacaggcccaattccattgtgatgtttacctttatagccagggtgagtgcagttttgaacttgaggttacagttcaactgagtgtttgctaggatcctaaggaacataaagttaattaaagacttacacctaattatgtaaattgccttgttaaagacatgtgatttgtattttagatgcttgtttcctattaaaatacagacatttctaccctca

SEQ ID NO: 152778 - DNA, 2574 bp, Homo sapiens
gagccagtaagtaaagtgtcgcaaagcagaaggaaggcgggagtcccgactgcaaacatttgaggaaagccaggcagtagaggccgctatggcgaacgttccgtgggcagaggtctgcgagaaattccaggcggcgctcgctctgtcgcgggtggaactgcataaaaatccggagaaggaaccatacaagtccaaatacagcgcccgggcgaacatgagaagaggtcaaggcgctgctcggccctgcgccctgaggacgaggatgagcggcctgaggccgaggacggcccgggtgccggttgaccacgccctggggctgccggctgaagtggtggagcccgaggggcccgtcgcccaagcgaaccggttgaggcttggcagtcatccgagttccacctcggggtgaaccacatcgacacggaggagctgtcggcgggggaggagcacctggtgaaatgcctgcggctgctgcgcaggtaccggctctcgcacgactgcatctctctctgcatccaggcgcagaataacctgggtatcgtgtggtctgaaagagaagaaattgaaactgcacaggcttacctagagtcatcagaagcactatataatcagtatatgaaagaggttgggagtcctcctctttgatcctactgagcgttttcttcctgaagaagagaaacttacctgaacaagagagatcaacaagattttgctaaggtttatactcatatactatattacctagctcaagtctaccagcatctggaatgtttcgagacggctgctcactatttgccatagtacactaaaacgccagctcgagcacaatgcctaccatcctatagagtgggctatcaatgctgctaccttgtcacagttttacatcaataagctatgctttatgggaggccaggcactgtttatcagctgctaatgtcatttttggtcaaactggaaagatctcagccacagaagacactcctgaatctgaaggagaagtgccagagctttatcatcaaagaaagggggaaatagcaaggtgctggatccaaatacttgttttgacttctcatgcagaatgcccaactctccatgcaggacaacataggagagcttgatcttgataaacagtctgaacttagagctttaaggaaaaaagaactagatgaggaggaaagcattcgggaaaaaagctgtgcagttttggaaccggtgaacttgtgtgatgccatctctgcagtaggaagagaaagtgagctacttgagacctttaggttttgaagaagccagagaacttttcttattggggtcagcactatgtctttggagggcaaaagagttctttcagattgatggttatgtcactgaccatatttgaagttgtccaagaccacagtgctctgtttaaggtgcttgcattctttgaaactgacatggagagacggtgccaagatgcattaaacgcggattagccatgctagagcccctaactggtagacctgaatccacagtattatctgttggtcaacagacagatccagtttgaaattgcacatgcttactatgatatgatggatttgaaggttgccattgctgacaggctaagggatcctgattcacacattgtaaaaaaaataaataatcttaataagtcagcactgaagtactaccagctcttcttagactccctgagagacccaaataaagtattccctgaggcatataggggaaggatgttcttcgccctgccatgttaggctaagtttcggagttgcccgtctctatgggcaaaatcattactggcagatcccaaggaaagagctgggaaaatttgggcaacatcattgggaacattacaaatttattgttgattactgtggaaaaggcatcctgagggccgcccaggaaatagaagttgagctagaacttagtaaagagatgccagggcgacggagtgagactccatctcttaaagaaagaaacaaaaaagataaaattcagaccgccaagactacatctgccccacctgcacagagcctcgccctcgccactccacagccggtccgcatgtgccgccagctcaccagggtgatatcactgggctccagcaagggcaaggccagcttcgcaggacctgaccgaccgccttatgaagatcctcacattgtgcggctacagctttaccacccgcagagggagagatcctgtgtgacatcatcaaggagaagctgtgctaagtcgccctggactttgagcaggagatggccccacgggtcctcctgggagaagagctatgagctgtcagatggccaggtcatcaccagcagcaacaagcggttccactgccccgaggcgctcttccagccttctttcctgggcatggaatcctgtggcatctacaaaactaccttcaaatccatcgtgaagtgtgacgtggacatccacaaagacctgtacgccaacacagtgctatctggcagcaccaccatgtaccctggcatcgctctgcaggatgcagagggggatcactgccctggctcccagcatgaggaggatcaagatcattgctccttctga

SEQ ID NO: 152779 - DNA, 421 bp, Homo sapiens; identical to SEQ ID NO: 136130

SEQ ID NO: 152780 - DNA, 2055 bp, Homo sapiens; identical to SEQ ID NO: 136131

SEQ ID NO: 152781 - DNA, 2145 bp, Homo sapiens; identical to SEQ ID NO: 136132

SEQ ID NO: 152782 - DNA, 540 bp, Homo sapiens
tcgacgaagaggattttgttttatcacatatactgatgaagagccagtaaaaaaattgttagaaagcagataccatcaaattggttctgggaagtgtgaaatcaaagttgcacaacccaaagaggtatataggcagcaacagcaacaacaaaaaggtggaagaggtgctgcagctggtggacgaggtggtacgaggggtcgtggccgaggcaatcagagcacttatggcaaggcatctcgagggggtggcaatcaccaaaacaattaccagccatactaaaggagaacatttggagagaacagccgggaacttcattgcaggccgtgtgtcaccctgaccacgtctatctctgggggtcgcacgttgcgggcagagcgcaaggcatacaccagaaaacgctgtcctgtggaggagatgttaaagtaacccatcttgcaggacgacattgaagattggtcttctgttgatctaagatgattattttgtaaaagactttctagtgtacaagacaccattgtgtccaactgtatatagctgcc

SEQ ID NO: 152783 - DNA, 973 bp, Homo sapiens
tcgccagcgccgggcgcagtccgcctttttccggagcagactggccgcggtgctagtcggtagcagcggccgccgcagcggctccgcactggcgaaccgagggcagaaaaaggcggggttgacggctttttgctccatacaacgctccgccgccgctgctgccgcgacccggactgcgcgccagcacccccctgccgacagctccgtcactatggaggatatgaacgagtacagcaatatagaggaattcgcagagggatccaagatcaacgcgagcaagaatcagcaggatgacgggtaccgcacgcttcttcccccgctccccctcccccagcgcgccgcacgcgcccttcgttcctctaaaatgtttattggaggcttgagctgggatacaagcaaaaaagatctgacagagtacttgtctcgatttggggaagttgtagactgcacaattaaaacagatccagtcactgggagatcaagaggatttggatttgtgcttttcaaagatgctgctagtgttgataagattgaaaatattgaacttcccatggatacaaaaacaaatgaaagaagaggattttgttttatcacatatactgatgaagagccagtaaaaaaattgttagaaagcagataccatcaaattggttctgggaagggccaaaactggaaccaaggatttaataactattatgatcaaggatatggaaattacaatagtgcctatggtggtgatcaaaactatagtggctatggcggatatgattatactgggtataactatgggaactatggatatggacagggatatgcagactacagtgcgggaacttcattgcaggccgtgtgtcaccctgaccacgtctatctctgggggtcgcacgttgcgggcagagcgcaaggcatacaccagaaaacgctgtcctgtggtatggtctcttccaacttcatgtaccagcgtaaagattaa

SEQ ID NO: 152784 - DNA, 876 bp, Homo sapiens
ttagttgactgtcagctgtccttgctccaggatgctgtttttgacaacggatgttttattgcctttgatgttcattaagaagcttggcgcaaatgttgcctttttatcctcgaagaagcctctgtttgtcatgtagcttgtgataaccacattgttgcctttggcttgcggcactgcggtgcgggttcggaggactacttctgcggcagatgataaagggtgtcctgaagggcttagggctccacctggtgatagagcaggggagctggggggaacttcttcctgggacctggcactctcaatgataggagagggctgggcctgggaggggccgttgcaggttagtagaggctcttcttcctcagaggagcttgcttcagatccttccttccctatttcctcatcttctaagagctccttgatctcagaattgtcttccccctgggctgcatcaggtgccagatcttcagttgctgagacagattcactcttactcttcgaggaaagtgtagagggactagtaggtgaggtaagtggactggagactgtagatgttcgaactgggggagaaatgactaaagagcgcctgctgctgcttgatagtctcttcaccacaaagactttactggaatgttgcttctccagtttgctcatcacctcggagagattgggttcagtttgctcatttccccaaaaagccgtcaaccccgcctttttctgccctcggttcgccagtgcggagccgctgcggcggccgctgctaccgactagcaccgcggccagtctgctccggaaaaaggcggactgcgcccggcgctggcgactgaggcggcgagcgcgctcgcccgccgcgcgcacgcgtgttttgtcctcgag

SEQ ID NO: 152785 - DNA, 1703 bp, Homo sapiens
  misc_feature (1)...(1703): n = a,t,c or g
gatctcttccgccgccattttaaatccagctccatacaacgctccgccgccgctgctgccgcgacccggactgcgcgccagcacccccctgccgacagctccgtcactatggaggatatgaacgagtacagcaatatagaggaattcgcagagggatccaagatcaacgcgagcaagaatcagcaggatgacggtaaaatgtttattggaggcttgagctgggatacaagcaaaaaagatctgacagagtacttgtctcgatttggggaagttgtagactgcacaattaaaacagatccagtcactgggagatcaagaggatttggatttgtgcttttcaaagatgctgctagtgttgataaggttttggaactgaaagaacacaaactggatggcaaattgatagatcccaaaagggccaaagctttaaaagggaaagaacctcccaaaaaggtttttgtgggtggattgagcccggatacttctgaagaacaaattaaagaatattttggagcctttggagagagggaaaatattgaattttccatggatacaaaaaccaatgaaagaaggaggattttgttttatcacatatactgatgaagagccagtaaaaaaattgttagaaagcacataccatcaaattggttctgggaagtgtgaaatcaaagnttgcacaacccaaagaggtatataggcagcaacagcaacaacaaaaaggtggaagaggtgctgcagctggtggacgaggtggtacgaggggtcgtggccgaggtcagggccaaaactggaaccaaggatttaataacgtattatgatcaaggatatggaaattacaatagtgcctatggtggagatcaaaactatagtggcctatgggcggatatgattaatactgggtataactatgggaaccctatggaatatgggaccaggggatatggccagacctaccagtggccccaacagagcaccttaatgggcaagggcatcctcgagggggtgggcaatccacccaaaacaattacccagcccatacctaaaggagaacattggacaaaacatggaggagatgttaacagtaaccccatcttgcaggacgacattgaagattggtcttctgttgatctaagatgattattttgtaaaagactttctagtgctacaagacaccattgtgtccaactgtatatagctgccaattagttttctttgtttttactttgtcctttgctatctgtgttatgacatcaatgtggattgggtttatacacattttatttgtatcatttcatgttaaacctcaaataaatgcttccttatgtgattgcttttctgcgtcaggtactacatagctctgtaaaaaatgtaatttaaaataagcaataattaaggcacagttgattttgtagagtattggtccatacagagaaactgtggtcctttataaatagccagccagcgtcaccctcttctccaatttgtaggtgtattttatgctcttaaggcttcatcttctccctgtaactgagatttctaccacacctttgaacaatgttctttcccttctggttatctgaagactgtcctgaaaggaagacataagtgttgtgattagtagaagctttctggtagaccatatttcttctggatcgtaataaaattgttagtagctccttttaaaaaaaacacaacacaaaaac

SEQ ID NO: 152786 - DNA, 2987 bp, Homo sapiens
tgcagaaaggagccccgcgagtggcgcgccggggatgtgagtgccccttgccctctactgaatccagccccctccccgcccaccgcctccgcctttgcatagatacagtcatctggccagcccccgcccctcctcccggcgtcagcccgccagaggccgcgcggggcccgggcttcggccgatcagcccgggaggccccgccgcgcccccttggcccgcgcgcccgtggtcacagtggaagaggcgcccgcgctgcgctgcccggaggagccgtcgcgcgcccgcttcctgttcggctggttcctgccagctcgaggacaaaacacgcgtgcgcgcggcgggcgagcgcgctcgccgcctcagtcgccagcgccgggcgcagtccgcctttttccggagcagactggccgcggtgctagtcggtagcagcggccgccgcagcggctccgcactggcgaaccgagggcagaaaaaggcggggttgacggctttttggtaggagtgggctggaccggacgccagagacaaaggctcccaaggcaagagggactgtggccctgcgtcggctctgctcggaactgctgaccccaggaatttacgccccttcgtttttctcttctgattcttctcttctcccaagcccgcgtcccctcacgcgtggcctctctccttgccgggagggccgcgatggaggtcccgcccaggctttcccatgtgccgccgccattgttcccctccgctcccgctactttagcctcccgcagcctctcccattggcggccgcggccgccgcggcagctgagccccgctcctcccttcgctcgctcccagctccgcccggcagggggcgcgccgggcccagcgccacgtcaccgcccagcagccctcccgattggcgggcggggcggctataaagggagggcgcaggcggcgcccggatctcttccgccgccattttaaatccagctccatacaacgctccgccgccgctgctgccgcgacccggactgcgcgccagcacccccctgccgacagctccgtcactatggaggatatgaacgagtacagcaatatagaggaattcgcagagggatccaagatcaacgcgagcaagaatcagcaggatgacggtaaaatgtttattggaggcttgagctgggatacaagcaaaaaagatcctgacagagtacttgtctcgatttggggaagttgtagactgcacaattaaaacagatccagtcactggggagatcaagaggatttggatttgtgcttttcaaagatgctgcttagtgttgataaggttttgggaacttgaaagggacacaaactggatggcaaattgatagatcccaaaagggccaaagctttaaaagggaaagaaccctccccaaaaaggtttttgtggagtggattgagcccggatacttcctgaagaacaaattaaagaatattttggagcctttggagagattgaaaatattgaacttcccatggatacaaaaacaaattgaaagaagaggattttgttttatcacaatatactgatgaagagccagtaaaaaaatttgttagaaagcagataccatcaaattggttctggggaagtgtgaaatcaaaggttgcaccaccccaaagaggtatttagggcagcaacagcaaccaccaaaaggttgtaagaaggtgctgcagctggtggacgagttggtacgaggggtcgtggccgaagtccagggccaaaactggacccaaggatttaataactattatgatcaaggatatggaaattacaatagtgcctatggtggtgatcaaaactatagtggctatggcggatatgattatactgggtataactatgggaactatggatatggacagggatatgcagactacagtggccaacagagcacttatggcaaggcatctcgagggggtggcaatcaccaaaacaattaccagccatactaaaggagaacattggagaaaacagcgggaacttcattgcaggccgtgtgtcaccctgaccacgtctatctctgggggtcgcacgttgcgggcagagcgcaaggcatacaccagaaaacgctgtcctgtggtatggtctcttccaacttcatgtaccagcgtaaagattaaaaatgaagccaaagtctgaagttttccactttaatctttacgctggtacatgaagttggaagagaccataccacaggacagcgttttctggtgtatgccttgcgctctgcccgcaacgtgcgacccccagagatagacgtggtcagggtgacacacggcctgcaatgaagttcccgctggcgggtacaaacaaggtataatgtcagagttagaagacaacattcttgttttccttaagttgtacccatttcagtactttacctgttaatagttctaaaatgtttaattattcctctagaccacctggtacacaaaagcaaacagaaaaactcttaagtttttctgcaatactaaagaaagtgagataagactttaaagttaaagatctatagacactttaggcaaaacaggctcataaagcaattaaaaaatcaacaatttagtaaaaacaggctacatagtattttgtttttacgtttcatttgtctattgatctttaaattaaattagacatttctactgttttcctgtactcttatacacacctgttttctccaatgttctcctttagtatggctggtaattgttttggtgattgccaccccctcgagatgccttgccataagtgctctgttggccactgtagtctgcatatccctgtccatatccatagttcccatagttatacccagtataatcatatccgccatagccactatagttttgatcaccaccataggcactattgtaatttccatatccttgatcataatagttattaaatccttggttccagttttggccctgacctcggctcgtgccgaaatcgccatcgcatcaatttccag

SEQ ID NO: 152787 - DNA, 755 bp, Homo sapiens
gcggccgcgatttttttttttttttttttaggtatgaggactgatgccaggttaagtttttattatatttagaaaaaaaaatgtaacgggggagataattggttaagtcatttaaaaatgaagaaggttttttaaaacccccctataatttctttaaatggcaggcatttgggttccacttgcccaagcccactttttaacccaaaccaagatgcttggaaagccagagcacacagttgtgccccacccaaacgccaggagggcggatggacccccaggggctcctcggactacgcttgctggggttctccccgtgtaataagccataaagcataaaggaactccgtccaacaaatccagggccaagcccagggccaagaagcttataccgcggggtggtaaacacctcccaacaagctaggaaaaaataaggaaggggagggttacactttcccaaccgtgtttcttgggtggggcttcgcttgaatgcaggttgaaggatggtgcccattgttcaggggttccgtggctgtacatggatagggatactcccactttggtaccttcttggcggggccttgggaacattgatggctaaggtgggccaccatttataaagctggccagccccagttagaagcacaaaacccatattcctttagagagggccagccattcttgcgtctggatcaccttcgaacagctggagcagaacaaaactgcgcagccgcggtgtgggtgcggcgcctcgtgcc

SEQ ID NO: 152788 - DNA, 1349 bp, Homo sapiens
  misc_feature (1)...(1349): n = a,t,c or g
ccgttttaatggtcccaaaaagggncctagaaagtgccccgttgtgtttttatgtttcctcaaacccccttaaaaaatataaataaagaattttaaaagaatttttaaaaattattttgtccaagaattatattttccaggattttaatcatttgggattggaattttggggattttggacttcagggattttgatctttcaggatttcatcatttgggattataacattcaagattgtgtcttttgggattatggcccaaacccatgcaatgggccagttctttaantcacccccgnaaagcccttcangagaaaattgcaaaatgcaaaaatgataagacttccaaacatctttatacaatttataccctcagtattaaaatgggactgagggaggccgggcacagtgggctcacacctgttaatccctgactttgaggagggctgagtggggcggatcacttgaggttaggagttggagacctgcctgggccaacatagtgaaaccctgtctgtagtaaaaatacaaaaattaacacttgagccccggggggcggagggttgggagtgagctgaggattgtaccactggcactccagcccgggtgacaaagtgagaccctgtctcaataaaaaataaaaataaaaaaagtatgttattatttcctgttttattgtactaaaatggtactatgaagtgactctgttgtgtttttatgtttctcaaatctcctttaaaaaatataaataaagaattctaaagaatttttaaaattattttgtcaagaattatattttcagcattttaatcatttgggattggaattttggggattttggacttcagggattttgatctttcaggatttcatcatttgggattataacattcaagattgtgtcttttgggattatggcccaaacccatgcaatgggccagttctttgaaaggaatagtgttccataactcacgcaaggagaaatagaaaatttgaataggcctatacctgttaaactaaatcaataactaataaccttctataatagaaagcaccaggcttagatgggttcactgatgattgatcaaacatttaagaaataaatctttgacccagaaatatttccttaaaatttttttttctaagaaagaaatcataccaattctctacaatagcttccaaaaaaatagaagctaagggaacacaccctaactgactctaggagaccagcattactctaatactaaaatcagataaagacatgacaagaaagggaaaactacagtctctcataaacatagatgcaaaaatccttaacaaaatattagcaaatcaaatgcaataatgtgt

SEQ ID NO: 152789 - DNA, 386 bp, Homo sapiens
caggagagaaacctatatgtgaactaactgtgaggaagccttcaaatgtcaaatatgaagaaacccagcatgctcatacttaagataaagcctatcaatgcagtgactgtgataagggctccattcagtcaccctggtatccagataatcagttctcagtatgcatcagagcattcatatatggaaaaaaaaacttatttgtttcctgaaagtcataaagccttctcacagtaatcagctctaatcataaagcagagaattcatgttgcacagatcatatgaatatgttgtatatgggaaagccttcaaccagaagtcgtactgtgagaactcattcccaagagaatttgtaggaatgcctggtatgagggaacctttccttattt

SEQ ID NO: 152790 - DNA, 1580 bp, Homo sapiens
tcgcggccgcgtcgaccttaaaagtcattgctcatttaatcttggaggccacttggaggagcatggcgtcttttgtctcgccctgggtgagcacaccgaggcccagagtttgatgattccttcaaggtctcaaagcttgccttcttcacagcgcttggtgatgcacgtggttgtttctcagtatggtttgccaaagggatgctctgattcaggaggctgaggtggggcctgggaatgttcatttctaaccttttcccaggtgatgctgaggccactggtccaggggccacctttgggcctgaagccgctaattaacaacatgagtcgtcttttatatggtccaggcatgtcgccccctcgatagaacacagagctccctctttccctcttggcctcatcaccagcccccagaacaggacccagcactagcagcactgaaatcgtgttttgttgggtgaacttatgcgtcgtgatgctggggttagacaaggacggccgtgggagaggcggaactggccaagtctttgatgaccatgtgaagaagcccccagccctgagggcgagaggccagagcctccctgatgctgagtccagaccaggagtccagccaggagctggtcactggtggagctagaggcttttcaagtgcatcctgggacttctgaccttccctcctgacagttctcatccccagctgcccggtgagtcacctgggagcttcgaaaagtcccgatgccctggctgctggccacacccagcccaaccacatcagagtcgctgggctgtggccagcttgtagcagctactcaggtgttctccaaggatgagaaccacagatttagtcactgcagcatggcaggggtgggggtgggagaacaggaggcttggaaaaggaaactcgaacaggctcaagaatatcagacacagccttgggaggggggccgggccctgcccttgtggccagctgcctcacctgcctgggcccccgcccgctgctcacgatgcaggcccgtacataccactaaaggcccaggcggtagcgggtaccttcacccccacggatccgcaaagcttggctcaaaccagggagccatgaagcaggctgggagaacacggctctgcaggaagccagggctctgctgagtttcacaaggcagctctgtggacgtgaggctgctaggttagaagactggacggagaggattcccgccagggagaggctgacccagcacgctctcaccaggcttcattaagcccctcagtcagggccaggaggcgccactaaagcccacactggggcagtgtggctctggagcccgagtgcctgggttcaaatcccagctctggccctggctgacgctgtggcctcgactgtctcaggtgaaggaagagtaacaggaagggatgatgcaggcagtttgcagctggatcacagagcagggccccaggcaggcttgctctaactgtggccagctctttccttccttaggaagtggttcccggactcttctgaaggcacttccatcagtaaacaacttctgagcattcccaatagatgtatgtgtataaattgcactcat

SEQ ID NO: 152791 - DNA, 534 bp, Homo sapiens; identical to SEQ ID NO: 144862

SEQ ID NO: 152792 - DNA, 654 bp, Homo sapiens; identical to SEQ ID NO: 144884
  misc_feature (1)...(654): n = a,t,c or g

SEQ ID NO: 152793 - DNA, 703 bp, Homo sapiens
  misc_feature (1)...(703): n = a,t,c or g
ccccgactcttctggtccccacagactcagagagaacccacccatggttgctgtctcctgccgacaaagaccaacgtcaagggcccgcctggggtaaggtcggcgcgcacgctgtgcgcagtatgtgtgcggaggccctggagaggatgttcctgtccttccccaccaccaagacctacttcccgcacttcgacctgagccacggtttctgcccaggtttaagggccacgggcaaggaaggtggccgacgcgcttgaccaaacgccgtggccaacgtgggacggacattgcccaacgcgcttgttcggcccttgaagcgacctgcacgcgcacaagctttcgggtgggacccggttcaattttcaagcttcttaaggccattgcctgcttggttgaccctggcccgcccaccttccccggccgagtttcaacccctggcggttgcaagccttccctggggacaaagtttcttgggtttcttgttgaagcaccgttgcttgaaccttccaaattaccgttaaagcttggaagccttcggttggccattgtttttttgcccctttggggcttccccccagggcccttcttccctttctggaaccgtaacccccgtggtcttttgaataaaattttgaattgggggggcaaaaaaaaaaaaaaaaaaaagatctttnaatttaagggggcggaaagtttatttcaa

SEQ ID NO: 152794 - DNA, 502 bp, Homo sapiens
agaacctgtatgtgccacatggaaaaacaggacaccagagcccaccagacagtgccggccagcagagaagcagagagccagcgccacacaacatcaagaaggccgacaaccaggttggaaaccaagacggagctcagacccaccacatcgccccagaggcttttccagcacccatgatgtttcggactgacctaaaaactaattgtcgagaagccaagggtgaggaggcaggaagcggtctccccaccggcactgggattggcgggtccaagcccagcaaccggcttcgctccacaacacacaccacacctgggactgtttttaatacatagcaacagactgggttatttatttaagatgtgtattgtgtcatatgaagtttaagagacataaatggcattttgttatttattaagacaaactccaattgttctctggctgtttttttcagttgtgtctagcaaaatccttatctgccctttgaaataaaatgtttaagttt

SEQ ID NO: 152795 - DNA, 1116 bp, Homo sapiens
tttttttttttttttgagatttttataaacaaaaacattttatttcaaagggcagataaataatttgctagacacaactgaaaaaaacagccagagaacaattggaatttgtcttaataaataacaaaatgccatttatgtctcttaaacttcatatgacacaatacacatcttaaataaataacccagtctgttgctatgtattaaaaacagtcccaggtgtggtgtgtgttgtggagcgaacgcggattgctgggcttggacccgcccaatcccagtgcctgtgggggagaccggttgtccaaacctctgctgtgccccctgtgccctgaagctgaaacagcagcgcccatggccccggagggcggccaggaaagccccagggctggggatgaacggtgacttcggggcgctctgtggctggcaagcctggggtgccctccaaccggaggtgcttcctgcctcctcacccttggcttctcgacaattagtttttaggggtcagtccgaaacttcattgggtgctgggaaaagcctctggggcgatgtggtgggtctgagctccgtcttggtttccaacctggttgtcggccttcttgatgttgtgtggcgctggctctctgcttctctgctggccggcactgtctggtgggctctggtgtcctgtttttccatgtggcacatacaggttctctgaagccacagccagcgcagtactcgctcactttgatgttctgtgtctggaatgcctgagagggtcggggctaacctgtgaaccccccccaccctcccggccttgttgtcacgcgtgcatttgggtggctgcaatgggcacacgcctgtgagcccagggccggccgggtcttcggttctctggcttggctcaggcagcagttcctgcagacttttctcactgctgttcagcaatatgtctcctttaaaatagcaccaggggttctcaggttggcttctgtgtcttttccaggtgcgtgtgcaaaaggcaaagggaggtctctctttccatgcagggccctttgtctgaactgtccttgaaaggcagttgtgaagggtgggcccagaccccctccacgggactggggtggggtgtcactgttc

SEQ ID NO: 152796 - DNA, 1305 bp, Homo sapiens
  misc_feature (1)...(1305): n = a,t,c or g
gccgcaacctgcacagccatgcccgggcaaagaactcaggacggtgaaatggctctcagatgctcctggtgttgcttggtgctctcgtggctgccgcattggggcgccctggtctctggccgaaggcgagccgcgcaaagtttcccgggaccattcagagttgcaactccgaaggacttccaagattccgaagagtttgcggaaacgctaacgaggacctgcttaacccaggctgcgggccaaaccagagctgggaagattcgaacaccgaccttcgtcccggcccctgcagtccggattactcacgccaagaagtgcggctgggatccggcggccacctgcacctgcgtatctctcgggccgcccttcccgaggggctccccgaggcctcccgccttcaccgggctctgtttccggctgtccccgacggcgtcaaggtcgtgggacgtgacacgaccgctgcggcgtcagctcagccttgcaagaccccnatgggcccgcgctgcacctgcgactgtcagccgccgccgtcgtcgcagtcggaccgaactgctggcagaatcttcgtccgcacggccccagctggagttgcacttgcggccgcaagccgccagggggcgccgcagagcgcgtgcgctctaacggggaccactgtccgctcgggcccgggcgttgctgccgtctgcacacggtccgggcgtcgctggaagaccctgggctgggcccgattggggtgctgtcgccaacgggaggtgcaagtgacccatgtgccatcggcgcgtgcccgaagccagtttccggggcggcaaaaaatgcacgcgcaagaatcaaagacgaaccctgcacccgccctgaaagccccgaacacggtgcccaagcgcccctngcttggtgccccgccagctacaaatcccatgggtgctccattcaaaaagacccgacaccggggtgtgcttccaagacctattgattgacttgttaagccaaagacttgccacttgcattattgagcagtccttggtcctttccacttgttgcaccctgcgccggggggaggcgaccttcagtttgtccttgcccttgttggaattgggctcaaggttccttgagacacccgatttcttgcccaaacagctgtattttatataagtctgttatttaattattaattttattgggggtgaccttctttggggacttcgggggcttggtctgaatggaactgtgtatttatttaaaactctggtgataaaaataaagctggtctgaattgttaaaaaaaaaaaaaaaacttcggtgccaatt

SEQ ID NO: 152797 - DNA, 652 bp, Homo sapiens
attaaaatctttttttttttttttttttcatggtcacttctttatttttgtatacaaatgtacatgacacgtcttgacagcccacccaccaccacacaggttagggcctggcccccagggaagaagcgggatggggagagagctggtgggtcccaccgtctgcctctccagccttcccaggctggcagccagttttcccaggcctccagagggttgggaccacagcaggtgcaggtagtgaatggtgggtgctggccttgcagaggttacggggaggggactcaagctccacagccaccaagctgagtcggggaccccggggagcccaacccccaggctccaggtgctcagtcctccacccctaagccagcacacattccccctccaacgcaggaagcaggaaggagatgggaggggaagtggtttttttgattttaagtttcattagaagaagggggcgagagtggggaagggattaagggaaggcagcttggcaaggaccaaaacttggctaacccggacagttccctggcttccaagttgggggaaagggaagctgattccccatgcttggttccactgctctggtcccctcacccctcaaaactccagatggaccaggcctccggaacggcactgccgcccacactcc

SEQ ID NO: 152798 - DNA, 1420 bp, Homo sapiens
gtgccttgagccgctccagttcctctgcactctgcaggtgcatcgctgctgtctcattctcagcaatgaactcctggaagtcctgggtctcagggccctgtgctcctgtcaggctgcaactggcagtcggggagggctcctcatctggggctgctgggcggctcacctgccgcttgctctccagctccagcttcataatggcgtggaggtaatgagtccggacccggattggattaaattcaatgcgtcctgccatgttcccacagccatcccgggagcagccacatggaaaggacatgcgatccactgacctggcatttaatcccagcctggctgcaggcacacgcttctgggtcacaatacagtcggcagtcacaaccacattcttcccgtgacaggcggatggctcgaagttcttgcttctcttcagcatcaatccggtgtaccccagaagccctcagcagggcccgtctccgtttggtgggcagatggctgcaggaagaagtaatcatccacctccacattttccacatcaatatcttcatctgacacatcatccagcgtcaggccatcagcctccaccgactccactgtcccattcttggtcagcttcattttcttggcatggagtttctcttccttcaggtgctcacgcagaatctctcgatggttcacctcctgttcctgggcaaactcacagagtgtatagctccgtacagagttatggcgctgggccatgcccagagagctaccaccctggctgggcacactggtaaaaccttggcgccgggcaaagtagtatacagtcacctggtcaaagcgtacattcttcctccgcagctgcttctgccgcttcaggatggatgtgggtgtgaagctggcagtggtaggaggattgaggctgtcgcagctgtcagcactatcactgctggagatctcatcatctgagttggaaactgatgagcccacatccacatcatcaaacttcctcttgagacccgagcccgtgaatgcatccattggtttcaaaggggtttccttggggagcccaccaagttggccccaaagcccctactcacccccagctagccaggtacattaggattctgcccagggaaaaaaaggaatcagcattcctgtccccagacagactcctccccagtctatacacacagctctctaaagaaagcacctcacctagcactgatgtctgctttctcaatattacgttctttctctactagctctggccaacattctcctactttcgtttcccttcagcccctctattctcaatcactcttagaataatgagatgggtagcagcagcacctttcccagtgaaggaaaggcctttgcttccaatccagctggggtctaggcttcattagccccctcgtgccaagcttggcgtaatcga

SEQ ID NO: 152799 - DNA, 546 bp, Homo sapiens; identical to SEQ ID NO: 145967
  misc_feature (1)...(546): n = a,t,c or g

SEQ ID NO: 152800 - DNA, 557 bp, Homo sapiens; identical to SEQ ID NO: 145968

SEQ ID NO: 152801 - DNA, 2354 bp, Homo sapiens
cgggctcctgccgagtcagaagaaatgggactccctccgcgacgtgcccggagcagctcccttcgctgtggaagcggcggtgtcttcgaagaaaccggaagcccgtggtgacccctggcgacccggtttgttttcggtccgtttccaaacactaaggaatcgaaactcggcggccttgggggcggccctacgtagcctggcttctggttgtcatggatgcactggtagaagatgatatctgtattctgaatcatgaaaaagcccataagagagatacagtgactccagtttcaatcatattacaggagatgaatctgttgctctcccattttgctcttgtcacaccatatgaagacatcaaaaaacgacttaaggattcgagaaagagaacatcttttgttaaagaagagaataagatttttggaagaaaagctaatagctcagatttgaagaagaaacaagttacgtagggacgagaaccaagtaaataaggcctatcatgcatatcgagaggtttgcattggatagagataatttgaagagcaaactggacaaaatgaataaagacaactctgaatcttttgaaagtattgaatgagcagctacaatctaaagaagtagaactcctccagctgaggacagaggtggaaactcagcaggtgatgaggaatttaaatcccaccttccatccaaactggggaggtgggaaaagttggagctggtgacctggaagatccatgggtttgggaaccaagagctggaactgatgaggaaagaatgtagcgatctcaaaatagaactacagaaagccaaacaaacggatccatatcaggaagacaatctgaagagcagagatctccaaaaactaagcatttcaagtgataatatgcagcatgcatactggggaactgaaggagaggaaatgtcttaattttacatctggtgacttcaagttacaagcttgaactactaaggaaaacttgaaaaaccttcaactgcaatcaagaaaggcctgtgccccttgtaggatgcagttgaagaccttggaagagacagcacaaaacttgcacttggatggatttttactggcaacatacgcaagacatccccctctcttaccaaatggcaaagctctttgtcataccacatcttcccctttaccaggggatgtaaaggttttatcagagaaagcaatcctccaatcatgggacagacaatgagagatccattcctaatgatgggtacatgctttcagggaacacagttcttatgggcagaattctctggaagacaattcctggggtattttccaaagtcctcctaaaatcaaagtgagacagcatttggggaaactaaaactaaaactttgcctttacccaaccttccaccactgcattacttggatcaacataatcagaactgcctttataagaattaatttgggaaggagattcacgatttcaccatgaggacacttatctctttcagtggtcctccccaagaaattatttaaccaaactgaaaggagatttggattaaaaatttttgcagaggtcttcagtatcctatatttggaaccacactgtacaatagtaccaaaacccaacatagttggttttcctagtatgaaagagcaccctctggctccatattcctaagaatcctgaaatatgctactatactaattaataagtaaaccttaagggtgtttaaaaaacctctgccttctatattaattgtaaaattttgcctctcagaagaatggaattggagattgtagacgtggttttacaaaaatgtgaaatgtctaaatatctgttcataaaaataaaaggaaaacatgttcccttcaaattgccataatggaacaaatggcaatgtgagtaggttacatttcctgttgttataatgccgtaaagatattggaaaaaataatgaaataaaagcatccttaggttatacccatctttatatgctattgcgtttcaatatttaagatttaaagtgattttttggtcacagtgttttgttgataaaatttttttagaattgaagtttgaattctaagacttgaaacaacctgatcactgaagccaactttgtcccagcacattccttaagtcctaattgggaaaaaaaaaaaaaaaaatgaaatagttgaaaaactctggggtgtaaacaaatgattgtaaccctacacactattcaataagtagtagaaggagcatcacacagatttcagtctaatctgcccttctgtgggccataatataaacataaatgtgtgtaatgataaaaagtcattttcttcaaagagactacagctagctgcacattgtgtagagcagcttcta

SEQ ID NO: 152802 - DNA, 422 bp, Homo sapiens
  misc_feature (1)...(422): n = a,t,c or g
ccaaaaaaaaaaaaaaaaaaaatagnattcctatatgatccagcaccaccatttctgagtatataccctataagaattgaaagtagaatcttgaatagacacttgtacactcatcttcatagcagcattatttcaataggcaaaaggtggaagtagcccaagtatccactaacagatgaatggataaataaatgtggtatataaataccatagaatattatttcacctaaaaaggaaggatattctgacacattatacaacatgggtgaaccgtgaagaccttatcctaagtgaaataagccagtctcaaaagataaatactgtagaatccacttatatgaggtacaaatatatatcaaattcatagatatctattggtacctcatataagtcccatagagtatagaaatatagctcgtgcc

SEQ ID NO: 152803 - DNA, 1658 bp, Homo sapiens
  misc_feature (1)...(1658): n = a,t,c or g
cgacttttttttatttttggaagaggaatgatggagatttgtatgttgtctttttaatgtataagattgtggaaatgattaaggtcatatggctcttagaaagtttgatgcacttatattctttcatcaacgtgagaattaaaatgtattttctgtctttcatcatttagttaattgcaccttaagcggaagatatttcccagaaggaggatacacaaagaagctagtcccaatcgaatcagagtatagaagatcttcatttgaaaaaccatctacctcagcatttactgagcattttaaaactcagcttcacagagatgtctttgtgatgtgatgcttagcagtttggcccgaagaaggaaaatatccagtaccatgctgttttgtggcatgaatatagcccactgaccaggggattatttaaccaacccactgaaaacttgtgtgttgagcagctctggaactggattttacttttaaagaatttgctcatggacctgtcatcctttttataaaaaggctcactgacaagagacagctgttaatttcccacagcaatcattgcagactaactttattaggagaagcctatgccagctggggagtgattgctaaggaggctccagtctttgcattccaaagccttttggctaaagttttggcactttttttttttcatttcccatttttaagtagttactaagttaactagttattcttgcttctgagtataacgaattggggatgtctaaaacctatttttataggatgttatttaaaataatggcagcaatatcacctcttattgacaatacctaaattatgagttttattaatatttaagactgtaaatggtcttaaaccactaactactgaagagctcaatgattgacatctgaaatgctttgtaattattgacttcagcccctaaggaatgctatggatttcacgtgcagggctaatttccaaaggggctagagttagtactactttaccagatgttaattatgttttggggaaatgttacatatttcaaacagaagtgcctcattttagaaatgagtagtgctgatgggcactgggcacattacagtgggtgtcttgtttaatactcattggtatattccagtagctatctctctcagttggtttttgatagaacagagaggccagcaaactttctttgtaaaaggctggttagtaaattattgcaggccacctgtgtctttgtcatacattcttcttgctgttgtttagtttgttttttttcaaacaaccctctaaaaatgtaaaaaccatgtttagcttgcagctgtacaaaaactgcccaccagccagatgtgaccctcaggccatcatttgccaatcactgagaatttagtttttgtttgtgtttgttgttgttgtttttgagacagagtctctctctggttgcccaggctggagtgcagtggcgcaatctcagctcactgcaacctctgcttctcgggtttaagcaattctcctacctcagcctcccgagtagctgggactacaggtgcatgccaccacaccctgctaatttttgtatttttagtagagatggggtttcaccatgttggcaagntggtcacaaactaccgacctcagtgatccaccgcctggccttccagtttggg

SEQ ID NO: 152804 - DNA, 1113 bp, Homo sapiens
ctttatctcaggaatccctgtcctgtgctgtttgctgtccagtgtccaagaactgttgtttcatatattttgtctggttttatttaaggaaggaggataaatgtggcctctgtaattccctgtgacctgaagcagctgataagtcccatattttataacaaaagactgacttcttagatgtcctttctcatataatttatactctctatatataacaattgaattgtaactcataaaattatagcagtgtcagatgtgtccatcaattaagttccataaatacataagaataaaacggaaagcacattgtgaacttcgatagacatgttcacagaataacttgatattacttgggtttaaaagtgcaatcctagttcatttgtttatatattttctaaaagtttttataggatcctcctgaattaaaatacttgtaatgatatttctgcttttatctgtattttatgttccaaaacgtcacaaattatactgttaactaggtttgtataccataaagacaaatgttgaataaatagctgttctttcaatttctttaaaaaaaagatccaagatgggcattatattcattgtatgtttacaaattcttacattttagttattcttcagcaaaaaatccagatggatgtttttttcagaaagtgttgaatgggtttacaaagtttttttgtaaggaacaatattgcaaattactaaaattgtatttttataggctgtttgctcttttgtggatattgtgcctgtcaggattcttgaagttttttttttatagtgagataatggagttggtcttagccgctgcaggagcccttcttttctgtggaatttcatcatctatgacacacactcactgatgcataaactgtcacctgaagagtacgtattagctgccatcagcctctacttggatatcatcaatctattcctgcacctgttacggtttctggaagcagttaataaaaagtaattaaaagtatctcagctcaactaagaacaacaaaaaaaatttaacgagaaaaaaggattaaagtaattggaagcagtatatagaaactgtttcattaagtaataaagtttgaaaaaaagattaaaaaa

SEQ ID NO: 152805 - DNA, 1059 bp, Homo sapiens
ttcttcagcaaaaaatccagatggatgtttttttcagaaagtgttgaatgggtttacaaagtttttttgtaaggaacaatattgcaaattactaaaattgtatttttataggctgtttgctcttttgtggatattgtgcctgtcaggattcttgaaggtaagttatgttataatggttaatttgaaatataattctggctgtgtcaatataaataacctcaaaaagctataagagatactcttatgataggacacttagttataattatccagaacatttgtatatagaatgattatagaattatccctttaggaaaatcaggggtcttgtgttggtccttattattgactgaaaaaaagatgaatgaataaatgaattaaattacatagaaagaggcccttggcttacaactgccaagctccagtggcacatttaattgtgaaaaacgaaatatatttttaaataatttatatgtggaatgctgtttttcaaagtgggtaatttagtttaatggaatataaccactcattcatccttccatccaacagaggcaagtttggacttgccttgcctttttctgcttttaaccattggtattcaaagtgtacccccattgtcaaatgtataatgtagccagtaaatcattagaggaagtaagttaagtcctgttaatactgttctcaaatataaacatatttctttaatctcttccctatagttttttttttataggtgaggataatgggagttgggtcttagccgctgcagggagcccttcttttctgtggggattcatcatctatggacacacactcactggatggcataaactggtcacctgaagagtacgtattagctgccatcagcctctacttggatatcatcaatctattcctgcacctgttacggtttctggaagcagttaataaaaagtaattaaaagtatctcagctcaactgaagaacaacaaaaaaaatttaacgagaaaaaaggattaaagtaattggaagcagtatatagaaactgtttcattaagtaataaagtttgaaacaatgaa

SEQ ID NO: 152806 - DNA, 1790 bp, Homo sapiens
gacccgaccccggtgacccctcgttcctcgttgaagaacgactcaactaatggcagcagcgtggcctcctgccaccgtgcacatcgaatgggcctttctgagaaaagtctacagcattctttctctgcaggttctcttaactacagtgacttcaccagtttttttaatactttgagtctgtacggacatttgtacatgagagtcctgccttaattttgctgtttgccctcggatctctgggtttgaattttgcgttgactttaaacagacactaagtatccccttaacctgtacctactttttggatttacgctgttggaagctctgactgtggcagttgttgttactttctatgatgtatatattattctgcaaagctttcatactgactactaccagtatttttttggtttgactgtgtatactcctaccaatctaagaaggatttcagccaaatttggagcagggctgtttgctcttttggtgggataattgtgcctgtccaggattcttgaaagttttttttttttatagtgagataatggagttgggccctagcccgctgcaggagcccctccttttcctgtggatttcatcatcctatgacacacactcacatgatgcataaacttgtcacctgaagagtacgtattagctgccatcagcctctacttgggatatcatcaatctattcctggcacctgttacggtttccgggaagccagttaaataaaaagtaattaaaagtatctcaggcttcaacttgaaggaaccaaccaaaaaaaattttaacggaggaaaaagggattaaagtatattggaagcagtatatagaaactgtttcattaagtaataaagtttgaaacaatgattaaatactgttacaatctttatttgtatcatatgtaattttgagagctttaaaatcttactattctttatgatacctcatttctaaatccttgatttaggatctcagttaagagctatcaaaattctattaaaaatgcttttctggctgggcaccagtggctcacgcctgtaatcccaccactttgggagaccgaggcaggtggatcacgaggtcaagaggttgagaccatcctggccaacatggtgaaaccccgtctctactaaaaatacaaaaattagctggatgtggtggcacacacctgtagtcccagctagtcaagaggctgaggccagagaatcgcttgaacctgggaggtggaggttgcattgagccaagatcacgccactgcattccagcctggtgacagagcgagactcagtctcaaaaaaaaaaaaaaaaatttttcttcctaaattagccacgcatagcggttcgtttgcaattcaaaaataattttatgagtagataagaatatcagtttaccgttgtctagtgattttatctaaattttccctgaattattaagtaatattgatttggctttgattctgaagtagtagagtctttaccattataaactgtaaatctctttttgcttaaaaggaaaaaaatgtaaaagataaattccacagagaattattcagtattacattaaaatgttaatgactttttattttaaattgtactaacattaaaagttggcctgaaagtcagatattatgacaaaatttgacattaattgtttttaaagtatagatttcatttgaaattatagaatggtaatgtggttagaggacaccaaagatactgggtcatcagccattaagtatatctatttcaaaattaaaatatttgggaagtaaaaaaaaaaaaaaaa

SEQ ID NO: 152807 - DNA, 2558 bp, Homo sapiens
  misc_feature (1)...(2558): n = a,t,c or g
ctaaaggtcggcgaggcttctgaagacgcaattcctgcgacgcccgcggaggggccctgggggtcggctccgagcgtctggcctgtgttggctgtaggcaacgaaaggagccctcccggtctgcgccggatggccccgggcggtgactcggtccggagccctggaacgctacgcccacctggcggaaagcaccacggaaacgcatccttctgtggccactgctaggtctgccattttacacttttctgatctcctccttccccttctgtgagctatgtctcaggggtcagtgaccattcagagatgtggccatagacttctcccaggaggagtggaaatggcttcagcctgctcaaagagatgtgtacagatgtgtaatcgttggagaactatggccatctggtctcactggcaggtctttccatttctaagcccagatgtgggtttccttattggagcaagggaaagaaccctgggctgggggaaaagggaagtgaaaagagatctgttttcagtttcagagtcaagtggtgagaaccaaggacttttccaccaaaaaaatgtcatttatgatggactccatcccagtatttgaatcatggaaaggaattctaaagtcaaggcccctgtgtattccagttttaaaggaggctggaaatgcaaggatcatactgagatgctgcaagaaaatcagggatgtattaggaaagtaacagtctctcatcaagaagccctggctcaacatatgaatatcagtactgtggagaggccctatggatgccatgaatgtggaaaaacttttggtcgacgcttttccctggtgttacaccagaggactcatactggagagaaaccatatgcatgtcagggcatgtggcaaaacctttagccagatttcaaaccttgtgaaacaccaaatgatacatactggaaagaaaccccatgagtgtaaggactgtaataaaacattcagttacctttcatttcttattgaacaccagagaacgcacactggggagaaaccttatgaatgtactgagtgtggaaaggcctttagccgtgcctccaacctcactcgacatcagagaattcacataggaaagaaacaatatatatgtaggaaatgtggtaaagcatttagcagtggctcagaactcattcgccaccagattacacatactggagagaaaccttatgaatgcattgaatgtgggaaggcattttcgccgtttctcaccccttactcgacatcagagcatccatacaaccaaaaccccgtatgaatgtaatgaatgtaggaaagctttccgttgtcactcattccttattaaacatcagagaattcatgctggagaaaagctctatgaatgtgatgaatgtggtaaagtcttcacttggcatgcatcccttattcaacatacgaagagtcacactggagagaaaccctatgcgtgtgctgaatgaaataaagccttcagccggagcttttccctcattctacatcagaggacttcatactggagaggaaccctatgtatgtaaggtatgcaacaaatccttcagctggagctcaaaccttgctaaacatcagaggacacacactcttgacaacccctatgaatatgaaaattcatttaattaccactcattccttactgaacaccagtgaatttacactgcaaagaaaaactatgaatgtatggaattttttaaaaagaagtataatgccttacttcagagaactcttggaaagaagccttatgtgaaagtgatgactgtgaagtaatatggcccacactttattcaccaccctggagaaaaaaaaacccaggaatatgtggaaaagccattaataaccactcttttatttttttgcaataacaaggtgaaatcaatattgttgagaagattcttccatctggtaatgttgagaagacttcatttggtaggagtcccttactttacgtgtgtaaattcctaccaggaaagaatacatatccaatagattggagaaagccagagattagccccgcattccgcatctgtcaaccaggacagaaagcatggacaagggatgagctttacaaagatgatgcactttggagatcagaaaattcatatttaaggcaaagtgatacaaacacagtgatttggggaatgccttccatttacaatgcaataccttaaattttaatacccttgtagggagganaaagccaactgtattaaatgaatgtaggagtgacctttctgcaatatttcaaacctatatcagagaattacactgtgggaaaactaccattgtaataagtgtagcaaaatctccttagatatctgaaaagtcatactggatggaatctgtagggaaacggttctattttgagggaagggggattcctttttgttttttaagtgaattcagaaaatgttataaataaatcttttggtttattataaaccttctgcttgctgattttttcccacagcatgtgattctgaaaatgtaactacaatattgacataaaaaataaacagtagtttttcttgttgaaacatac

SEQ ID NO: 152808 - DNA, 1673 bp, Homo sapiens
acccggatcagggagacctgtgctattgacctctctgccccaggtgtctggcttctggtcttgtgccacatggctggttcctggatcagaggagctagatgtgggcctggaaaggctgattttagtgcatgaacatgcacttggagcatgtttatgggtcaaagaaaatcgagaggagaagttgaagttataggagagaaaagaaatgattaatggggcaagatgaaggaaaccggaggggtcaggatgggatcaagagcccaagtagaagaatgtatcttgaaaaggagatatttgaaacagcagggaagaagaaaaaggatagtgagatataaaaaggctactgggctttttggtctttgaaggacattttactgatgcaatatattttctcagggagttaggaggcactattagtttaaatgtggaagagtgggggtttaaatggcacgagtggggaatagtcatataccctttgaacataaaaggaagctgccccaaatcaaaagttttaacaaataatgttgagtgttcacctgggattgggaaccatgagtttgtaggaaaccactcttcttagttaagtgatttattatacagtgtttcatttagcctgctataaccatagagaagtctgattatagaattattctggggaatggggtttataaatggcttgtagctaacaaaaaaagataatcctttctttttcttacactccacttccaaaccatcagcaaatcctgtttgactctaacttcaaaacgtatcctgagtctgaccacttcctaagcctgtctactgctaccacccttgtataagccaccgccactcctcctcccctgatagagtggccctgttaaaaggtgcatgttgtgttgctcctttgctcagaacactccaggaaagcttctcatctcactcaggaaaaaccgaagccctctttttgatctgctgttctccacctcactcagtctgctccagcagcactgaccttgctatttctagaacatgctggagatgctggcaagctcaggagccctgtcaatttgtattccccattgccctagagtgctctgtcttcatcatccatgtctcgtccccccaccttctttcgagtgtttgctcaagtgtcaccatagggagagaaccttttctgaccaccttaaacgttgctgaaaacctcccccagcctgcctcttgccagcatgttccatcttcttccttttttagcacctaccaccttcacatatattatttacttatttttattgtgccggttcttccccggccccggagagacggagatttttacccctagcacctggaactgttcctgggtatcagaggcattaaaatgtttgttggatggactaatgaatgagaagagaaggctgggctgaatggctcacgcctataatcccagcactttgggaagccaaggtgggtggatcattcaggtcaggagttcgagaccagtctgtctgggcaacatggcaaaacttcatctctacaaaaaaatactaaaactagctgggcgtggtggcgtgcacctgtagtccctgctacttaggaggctgaagtgggaggatggcttgagcccagaggtgggggttgcagtgaggcagtgagtggagcattctagcctgggcaacagagccagaccctttaaa

SEQ ID NO: 152809 - DNA, 836 bp, Homo sapiens
ctctcattgtgaagccatcctcaagccacctgcctacccttttatagtcattaaaatgtccctaggaatttggacttgttttgttccaaaggacatggtctcagggatcaacctaaggaacactagtgatgagcttctttaggcccggcatcatctcttactgcgctgctcctcatagctgtcctcctgggccccatctacgtcccctggaagcagaagacctgactctccttccttcctcccctgccacgtgggaccctcatctctgctgcctccttcctttcctgagaggctcagcttgagagaataagccagtgagaagcttctctagacttggctccaaacatctcccctcccaagacatcctgcctgcccacaggctcctgttgctccttcacacagacctggatgccccagagcaaggtcttcattcatggtcctgagcaggggccatgggattgggctctgggcactgacttaacggcacttccctttaaggcgagaaacatgccaaatctagacacggcaggactcccatccatcgccttgagactgaccgtaaaccacagacgctctccaggttctcaagagctatcctgccttccagattcctgcctatcccaactccccagccttgttgagggtctctattgcctcttgaatacaaatgcactcccaaagaggccttaagaaaataaaaaagattatccttcctctttgtctaagggtcctactcctcacactcagaaacaaagaagctctccctgctctctctgtgatgggaacactacttctagcatcctgcaggcttccccgccctgctgctcatggcggaa

SEQ ID NO: 152810 - DNA, 926 bp, Homo sapiens
  misc_feature (1)...(926): n = a,t,c or g
cggcccnnttcgatgaccatgtacagagcgctggaantcgtctgaggaagaacagcgaagcttttcgtcctggcaccagggtgatgagcccgcagtgacgtggaagtggcttccaaaggtgccacctcggtggcgattttcccatttccctttggattctccttggcacttcttacttcagactgcagtcactccccttccccagatctcagccgctcctcccaagcccttactgccccccacctccccgcttgctttcttctcatctcttcttactgaccttccttacctccatccacagggattctcggcaggagccacagcttaacaaggcttcttcataacaggacccgggccctgcaaagccacagcttccccagagggcaaggaggaacnctgaaccccctatcccccggagctggaatacattccccagaaagaggggcaagaacccccatggaaagcttgtgggaactggcctggggcattcggctttcccttgtggttattccttcctctttcatccttcacccaagcggggaagtgggacaagggaccgtgttgaaggcagattgaaggctcggcaaaacattcgggtttgttccaacaacggggcgagtatgaagaagccagaaggttcaaggggctttcctcccagaagtggccccgttccccctgatgtttgggtctggggtgcagacctgaggagcgctgcaaacctcctaggctattgactgttaagtcctcaggttttggccagattccagtttcgtgcctctgaaggtccaccagaagggcgcatgaagccccaggctgtttgccaaaaccctaccctgccccacaccaaggaagccagccaaaagggaaaataaagttattgagtgtttagtagaaaggaaaaaaaaaaaaaaaaaaaaaagtcgacc

SEQ ID NO: 152811 - DNA, 652 bp, Homo sapiens
gggtacggctgcgagaagacgacagaagggggcagctcttagtcgcgggctgactggtgtttatccgtcactcgccgaggttccttgggtcatggtgccagcctgactgagaagaggacgctcccgggagacgaatgaggaaccacctcctcctactgttcaagtacaggggcctggtccgcaaagggaagaaaagcaaaagacgaaaatggctaaattcgtgatccgcccagccactgccgccgactgcagtgacatactgcggctgatcaaggtagcggagagccagagctcctcccggggcgtggggtggaggtggctccgtttcccagggtggggtgattcacgtcttgaggtctcggccggtgtgagagcccagcctgttcccctttctgcgcccatccccggctcggccgccaccccgcccgcccgccccattcccttcccctgagctggccgggccggagcctcattttgttttctacttttttctctcctatgtgcatccccccaaggagctggctaaatatgaaatacatggaagaacaagtaatcttaactgaaaaaggtaattcaacagtggcgggacgggggacaagcgttcggtgcctgtcaccttcgccaagggcattaccgcccctgctccccttct

SEQ ID NO: 152812 - DNA, 526 bp, Homo sapiens
cgcgggccgactggtgtttatccgtcactcgccgaggttccttgggtcatggtgccagcctgactgagaagaggacgctcccgggagacgaatgaggaaccacctcctcctactgtttcaagtacaggggcctggtccgcaaagggaagaaaagcaaaagacgaaaatggctaaattcgtgatccgcccagccactgccgccgactgcagtgacatactgcggctgatcaaggagctggctaaatatgaatacatggaagaacaagtaatcttaactgaaaaagatctgctagaagatggttttggagagcaccccttttaccactgcctggttgcagaagtgccgaaagagcactggactccggaaggtaacccctcgccctttccagaagccagagagaccaagttgttatgtaagaagtagtgtcggctgtgtagaaccactgactacacaggcccgaagttactgagaacttgggacagaaaaaatagccagcaagtgttcaaactactgaggaaaaaaaaa

SEQ ID NO: 152813 - DNA, 1228 bp, Homo sapiens
ctggtgtttatccgtcactcgccgaggttccttgggtcatggtgccagcctgactgagaagaggacgctcccgggagacgaatgaggaaccacctcctcctactgttcaagtacaggggcctggtccgcaaagggaagaaaagcaaaagacgaaaatggctaaattcgtgatccgcccagccactgccgccgactgcagtgacatactgcggctgatcaaggagctggctaaatatgaatacatggaagaacaagtaatcttaactgaaaaagatctgctagaagatggttttggagagcaccccttttaccactgcctggttgcagaagtgccgaaagagcactggactccggaaggttacagtctctagcttcgccatgtacatggcccttccgtgtacatggatgggcggggaggtaactaaaagatcctttacacaataaagtagatgatcatgataaatgaggacacagcattggttggttttgcccatgtactaatttaccctatgaacccgtgggattggcaaagttatttgtatcttgaggacttctccggtgatgagtggttatataaggcttgggcataggatcagaaattctgaggaatcctaagcccaggttgccaatgacgctgtcgcctgcagcagcaaggcacttcttggtagccagaatggcaatgaacccatcccatcaccttctattaaaagaagaggtgcttctgatctgtcccagtgaaggaggggttgggagacctgttccaagatcggacaagggagtacttggctaaaaattgggcaaccagagggagtgagggagtgctgcttgttaggatggacaacctcccattcctatttttaagaataaaattcccccaacttcctcttgcctttcctatgcctgtttgtaagtgaaataataggaatgagcaccccattcccaaagcttttattacccagtgggcgttgttgcatgtttgaaatgaggtctgttttaaagtgggccattctcagatgccagtttggagagtcagatcctttctcccttgaatatctttccgataaaccaccaaggtgggtgtgatcttaatatatttgaaaaaaacttcattcctcgtggagtcatttaaatgtgtacaatgtacacactgggtacttagagtttctgttttgattctttttttaataaactactctttgatttaaaaaaaaaaaaaaaaagggcggcc

SEQ ID NO: 152814 - DNA, 1113 bp, Homo sapiens
atgagagatgactttagagaagcggcattacgtcctgaaaagaaaagtgctaagagagaagcagaagtactaaagaaaatgggaaaacaggagaaggagcgcagcaaaagaaatatcattggatattttgagcaaaaggactcggacaactatagagtttttgaacgagtagcgaatattttgcatgatgactgtgcctttctttctgcatttggggatgtttcaaaaccggaaagatatagtggcgacaacataatctacaaaccaccagggcattctgctccggatatggtgtacttgggagctatgacaaattttgatgtgacttacaattggattcaagataaatgtgttcctcttgtccgagaaataacatttgaaaatggagaggagccctcagagacaatcagggataagtcattgactcattcaactgaggccccgagtggtggctctgactttataatgcaggaattagagcagaaagaagaggcagcgggcgaggaggccaatgatggaggctcaggccacagcctaggccaggaaggccgaccccgcgcgcagaggactcagtggaccggggccgagagcccaatgggaaaggaagttctagatgacggacgacgtgcgggcccagtcccagccgccagcgcctgtccctgtcacggaccccagcgttaccatgcatcctgccgtcttcctatccttacccgacctcagatgctcccttctgctcctggcgcggagtccccgaggcctgagaaaccagtgtcgggggagaatgggagaattagccctgagggactgatacgtagtcacggcgtaggagcttccccttctccccgaagtccgggggtttcggtttcgagggctagtggacctggtggtagcttgaatcggaaaagaccaagcatagacctagcgttccttcccaccctctccatttgggaagagtgtgaggtcgacaggtgctggggttgtgtgactctcactgggtctagatccctgaagcggtgcccgggttggcagatccctctgttgtggcttgatgcgattggttgggaaccccgaactggagactggtttggattccactgggagaatagagtttga

SEQ ID NO: 152815 - DNA, 5297 bp, Homo sapiens
cgacagaatggggcctctctggaagttgtcccgggtgttcgccgccggagcccgggtcgagaggacgaggtgccgctgcctggagaatcctccgctgcctgtcttctcccggagcccagccctttcctaacccaacccaacctagcccagtcccagccgccagcgcctgtccctgtcacggaccccagcgttaccatgcatcctgccgtcttcctatccttacccgacctcagatgctcccttctgctcctggtaacttgggtttttactcctgtaacaactgaaataacaagtcttgatacagagaatatagatgaaattttaaaacaatgctgatgttgcttttagtaaattttttatggctggactggtgtcggttttcagttcagatgtttgcaatccaattttttgaggaagcttccgatgtcattaaggaagaatttccaaatgaaaatcaagttagtgtttgccaggagttggattggtggatcagcacttctggacataagcccaggagatacaggataagcaaatacccaaccctcaaattgtttcgtaatgggatgatgatgaagagagaatacaggggtcagcgatcagtgaaagcattggcagattagcggtcaggcaacaaaaaagtgaccccattcaagaaattcgggacttagcagaaatcaccactcttgatccgcagcaaaagaaatatcattggatattttggagcaaaaggactcggacaactatagagtttttgaacgagtagcgaatattttgcatgatgactgtgcctttctttctgcatttggggatgtttcaaaaccggaaagatatagtggcgacaacataatctacaaaccaccagggcattctgctccggatatggtgtacttggggagctatgacaaattttgatgtgacttacaattgggatttcaagataaatgtgttcctcttgtccgagaaataacattttgaaaaatggaaaaggaattgacagaagaagggactgcccttttctccatactcttttcacatggaaaggaaggatacaggaaagtttagggaatattcccggattggaggtaggctccggcattttattaggtggaaaagggtaccattaaacttttttacatgccgatttgtgacaaatttagacatccctcttctgcacatagagaaaactccccagcaggattgtccctgtaatcgcctattggacagcctttagggcatatgtatgtgtttgggagactttcaaaggtgtatttaattcctgggaaaacttcaaggcaatttcgtattttggactttacattctggggaaaactggcacagaggaattccccatcatggaccctgacccccaactgatacagccccccagggagaggcaagccccaaggatgtaggcaaggcagttccacctggaggaggttcctttcccggaaacttggcaccccagtgaattttgggtattactctattgaggggatccgaggatgaggctttttaaaaactttggaaaaacagttttgttaaggccttttcaacaggcaggcttcaacctacgtggtggaaatagtaaacctatattttcataattctatgtgtattttttattttgaataaacagaaagaaattttgggtttttaatttttttctccccggactccaaatgcattgtccttttatatggtagcctcttaaaaaaaaaaaaaaacctgctaggatttaaaaataaaaatcagaggcctatctccactttaaaatctgtcctgtaaaaagttttataaatcaaatgaaaaggtgacattgccagaaacttaccatttaacttgcactactagggtaggggaggacttaggggatgtttcctgtgtcgtatgtgcttttctttctttcatatgatcaattctgttgggtattttccagtatctcatttctccaaaggctaaaggggatatacattccggggtacttgggaggggaataaattaaagttttcacactgtgtactgtgttttactgattggttggatattgcttatgaaaattccatagtggtatttttttggattcttaatgtgtaacttaaacatactttgaagtggaggagagtcataagacagaacatttggcaggaattgtccttatgaaacaagaaaaagaaaatgaaaagtattattaagcttctgtgtttgtctaaaaatgtggcatatggatggcatttaaaactttgaatgaattatacctaaatctgggacagggaggtgacagtggaacaggctaccaatcagaactagatgacttttaaggctcctcctattatgagacttcaatttccaaagagaagaactagcagagaaattgtatttcagtaattttaagctccttctgtcttgtagagtcttgttatagttgtataaatcaaaaacacagaataagggaacatatttaactttttttcattattaaatggttaggagggaccctaccccctcttagatttccctgatttccccaggcctgcagcatacagtaagatgggtccctgtgccaggcctcaatactgccagggaataaaaccagagggagaggaccctcagtgtcatatcaggaagcccagtgccagaggacagacaggttcaaaactggcttttcctttgggcctgggttggtgctataggccaagggtcattttatacttgggtataaatcaatcccagtttgggaaaagattatttttaagcttaaaaggctgacatgtgccattatatgtagtatgtaatatatgtaacatcttccaattcttttaaaataaaattaatatttataatggatatttaatgattgttatttttaaaaaccagcttataattcctcgttatgcatgatttatccaaagtttccatagttttattcaaaataataaatgttaataaggtgataaggggtatatttaatgtattgtatcaaattgtgaataagaaagtaggatggagctttctagaggttgggccttagttctgttatcctcattgcttttaaccaataagttaaatgaagttagagttatggtcttcaggttagattatggaccagatctgtgagggtcagcatggaaattcacattcaacaaggtagcacacaggaccaagagcagcacatgcaatcaactggaataatatagtaatcctgtaactgggtttgaaaaaataatcaacaaaagatacaattcaagggttaggttgcagagagctggcttgagagtagttattatgaaaaaggcctcaaggagtacgtgttcagtatgctctaagatgataaagtggctgttaaaaagggagttgatttgaggaagtattacttagcattcatgcatattgggcttaggctctagccctgccactatcattgtcttctctggactgtgaagtcactgaggacaaggaaactaaatttaatgtctgtatcactagtgcctagaatttctggacacttagtagtcaccatcaggcgtttatttaatgaatgagaagcaaagtgaccttggttacttttttaccctgaggggctcagcactcattaggacttggtgcctaattttataaaaagtcactaagctcaagtgcttggatgaaaggacagcgtggataaaaaggtttttaaaacatggatgttaaggctgttttgcttggagaagacttgggactgggacagtctttagatattatttgaaatgctggcactgtctatctggatcccagggcttgaactaggatttgaggaagtcacagggaagcagatttcagtctgacatttattcagtgcaagttttttggtgctgtagtatatgatgaaagatgtaaagctgaataaagcattatttctgccctagagttgttcacagcctagtcaggcatatggatatgtaaacaatgactgtaacgtgttatagatgtaaagacaaaataaaggttaaagagggcataaaggagcactcaattgcagagatttgaggacattatttttattttgagctttaaaaagatgaataggtgttctcaggaggtagggatctggctgagagggaataatctgagcaaaggtatgaaacagcctaatgcattagagaaaaaagttcttttagtaaggcatttggggttggggaagctagaaaaagaaatgggagctggtcacacagggccttgtgtgccagactaaggggtttgtagtatatattgtaggcagaagagatccatcaacagattgcaagcaaggaagtatgttcactttaaagtttgagaaagaatagtgtgggaagcacgtctccaaatttagacttacttgttccccctctgaaccgtgaatcagaccatttcaggtagaagtcttccccggtttatctgatctactcggggcctcaggcttctcagctgggaagagaggatgcaagaccagactgaagaacacggttgagtccccagaaccaaaagggggcctttctgcttcttagccagctacctcttcgagtttttcaaattgtgagggggaccataaaaggatggaaacttttagatgacattctacaaattatttttttctttaaattaaaagaacctagccaataagatagagaatgggcatctaaggcatctcagagctctctgatgaagccaggttgtcaaagatcatttgcaaaagaagggaaaactggcatgacaaaagctacagagaggagagtgaaatatagaagtgtttgaaatgttcaagctcacaataagcttaaatttatagaaaatgctaaggttgtcaagaaggcttttttttttttcttttttaaacctgagggcaaaaaggaatggataaagtagtgtaatggattgacaatcaggaagaacagaataactcagttttttttttctcctacaaggagatatggctggaccaaaataaaatgacatgaaattgcaaaaatgaaaagtaaaaaaaaaaaaaattattgtcaccttaaatgatttcaaggttgttagacccacacttctgtatcctagaaagctgctggaggttgcaaatgctttctattaacaactgttgggaatttttgagaaaccatggagaatgtaaggtgacagaagactggaaatgagcaaacgtactgcagttttcaaatcattagctaatagctttagctatttttctaaaataaaacctcatgaaccaaacaaatgttagtactctgtatttgggggaaagatttaaatagctgtaaagaacaaaacagttatctgtt

SEQ ID NO: 152816 - DNA, 1007 bp, Homo sapiens
atccttaattaaattaatcccctttcccccgcgtttcgcttccgcctacctcgcccaggctgccagaccggaagcgctccgctgtacctggatcctgctcctctgggttgaaacccgggcgccgccaagatgccggcttaccactcttctctcatggatcctgataccaaactcatcggaaacatgggcacctgttgcctatcagaagtcaattcaaaggacctgcccccaagagagacacaaggataccagatattgtggatgaggccatctttttaccttcagggcccaatgtcttctttcaaaaactatgaaattaagaatgaagctgataggaccttgatatatataactctctacatttctgaatgtctgaagaaactgcaaaaagtgccaattcccaaaagcccaaggtgagaaaggaaatgtatacgctggggattccactaaatttccccattccttggagagcctggtttttcccactttaacgccaatttatgcccaaaccctgcaaacaaaccaggaagatgaaagtgatgagagccctatttaccaaccagcctaaggccaagaacactgggactgaaaactttgtgagaaaagtttttcggaccctccagaatggataaaccccagcaaagtggttggacttggctttgttgaagagacagtttcatgaacaagagtcttttcaggaccttggaccattgaaagggagcccggggcagcccaccgtcttcccagaggccctggggcagcatttttccagcaagatgttacacaatctttttgcctttatttcagtaaagtttttatacagaagagaagaagagcatgtctttacttgaaaaactcttgatcaagaatttgggtgggagaacacagaaactgggttatccaagggtgatttgaaattttgtgcgagcattaaaactggcgcctccataagaataagtaataataaagaaatttctaacattccaaaaaaaaaaaaaaaaaacatt

SEQ ID NO: 152817 - DNA, 1040 bp, Homo sapiens
ggcccaggagattttttttaaaagtattttttctcccaacatttcccgggtgttccagcgccggttttgaccgccacattaccattttttcacccgagggtcggctctaccaagtagaattatgcttttaaggcctatttaaccgggggggcccttaccttcattagctgtcagggggaaaggactgggcagttattgttcacacagaagaaaagtacttgaccaaattatttggattccagccacagtgacctcactttttccaagataactgaaaaacatttggtggtgtgatgaccggaatgacaagctgacagcagattccagggtacagaagggcacgctattaaagcaagctactggaaaatacaaagtatggctatgaaattcctgtgaccatgctgtgtaaaggaattgcccgatattgttcaggtctacacaccagaaatgctgaaaatgaggccctcttgggttgtggtatgattttaattgggtatagttgaaggagccagggcccctcagggtatataaggtgtgaatcctgccaggttactactggtgggtttaaaagccccactgcagcggggagttaaaacaaacctgaggtcaccccagcctcccttgaaaaaaaaaagtgaaggaaggaaatttggattgggacattttgaaccagaccagtggaaactgccaattacattgcctgttctactgttcttatccaattgatttcacaaccttcagaaatagaagttggagtagtgacagttgaaaatcttaaatgtcaggattcttacagaagcagagattgatgctcaccttggttgctctaggcagagagagactaaacattgtctgttagtttaccgagatccgtgatgccacttacctgtgtgtttggtaacaacaaaccaacatcatggaggtcccctggattgaaaaaaggagccctctcccacctcctccataacaccgaaaggtggtttagggcttttatattaaataaaaaccaggcctttggaaaataaaaaaaaaaaaaaaaa

SEQ ID NO: 152818 - DNA, 395 bp, Homo sapiens; identical to SEQ ID NO: 146110

SEQ ID NO: 152819 - DNA, 947 bp, Homo sapiens
tttcactatacctttactttctttaatttgccagagggatatttcttgcacttaatgtatcatgtagaaatcaatttttattttcttattctggtattctctacatcttgcatggcctagcatatagtatatgttgagtatctagtgtctgagcggcacagacgagatctcgatcgaaggcgagatggcggacgtgctagatcttcacgaggctgggggcgaagatttcgccatggatgaggatggggacgagagcattcacaaactgaaagaaaaagcgaagaaacggaagggtcgcggctttggctccgaagaggggtcccgagcgcggatgctttaggattatgacagcgtggagcaggatggcgatgtacccggaccacaacgctctgttgaaggctggattctctttgtaactggaagtccatgaaggaagccacccgaagaagacatacacgacaaattcgccagaattatgggggaaattaaaaacatttcatcttcaaccttcgacaggcgaacagggatatcttgaaggggtatactcttagtttgaatattgaaacatacaaggaaagcccaggctgctatggagggactcaatggcccaggatttgatgggacagcccatcagcgttgactggtgttttgttcggggtccacccaaaaggcaagaggagaggtggccgaagacgcagcagaaagtccagaccggagaccgtcgctgacaggtcctctgttgtccaggtgttctcttcaagattccatttggaccatggcagccttgggacaaataggactggggtgggaactttgctgtgtttatatttaatctcttaccgtatatgcgtagtatttgagttgcgaataaatgttccatttttgttttctacatttaatgttactttcctgtcctaaaattgaaagttctaaagcataaaaaaaaa

SEQ ID NO: 152820 - DNA, 444 bp, Homo sapiens
tttttatgtcatcttgatcagtgtgagagaactgtacttatgtcatcacctgcctttcctctgtgctggagtctacatgacaaattctgccatgaaagttttcttgatttggctggtgatagttaaaatcacagttttagaatttaaaaagctgtcttggccgggtgcagtggtatggttctgaggattaattttatatacacacatataaacactcacacacacatttgagttcaaaatgtatgttactacattttacaaaggaataagtgatttcatagattctgtatcaatattaaatcttggctgggtgcagagcctcatgcctgtaatcccagcactttgggaggctgacacagttaagatcacttgagcccagaagtttgagaccagcctaggcaacatagtgagaccctgtctttacaaaaaatacaaaaattagct

SEQ ID NO: 152821 - DNA, 425 bp, Homo sapiens
caggcgtgccaaccctccatccatttctccctcagctcaggacagcagggtgacagtgcctggagaaggccctggctcccctgatagccctcccggcctgtctctgacctgcactggaagcgggggtctccggggtgggtcttcagcacctgccacacctctgggggaggctcctagcccatctgcttggcccgacaccagcgctgcagccgtgtgatcccggtgcagggcccgtactgccaggccaggtcaaactgcctcagcagctccagctccgcttcctcctcgtcgcggggctggggctcctcccccaggcaggcagagaaggaggcccctgcggggaagaggagcgcccgcccagtgggcgcgagaaagtcagctgctgaaagagacagacggggccaggccagcggcgggcagacaag

SEQ ID NO: 152822 - DNA, 674 bp, Homo sapiens
  misc_feature (1)...(674): n = a,t,c or g
tgcctgcaccgccgcggacttaattgccgggacgactatttctgaagcgggcccgcatatggagaaccagcctgcgaggtggcgggccctgccgggcctcccacgccctcctgggctccccgcatccccctggctcctccttggcgtgctgctgctggccgggaccctgcgactgtcaggaggacagtcagtgacccacaccgggctgcccatcatggcctccctggccaacacagctatctccttcagctgcaggatcacctatccatacactccccaattcaaggttttcacagtcagctactttcatgaagatctccagggacagaggagccctaagaagccaacaaactgccaccctggactgggcacagagaaccagagccacaccctggactgccaggtcacccttgtgctgccgggagcatcggccactggcacctactactgctctgtccactggccacactccacggtgagaggcagcggcaccttcatcctggtcagagaagcggatgcggggtccagggaaggaccccaccaggaagtgcccagatccaagatctgccagcagccccaagcagcatccttcagaatctgtctacacagctctgcagcgccgcgagaccgaggtctatgcctgcatcgagaatgaggatggcncctcgcatgtn

SEQ ID NO: 152823 - DNA, 349 bp, Homo sapiens
cctcaggacagaagcgagagcccattgctcctgctcagctcaactcctccatctaaccagcaggctcccagagtccccggaagagcctgcgcagctgaagcagagtgcttctagatggagagtggtcactggggaaaaggacctggccatcaccttccaatacctgctgcctgtctccctgacccatgatctggcaagttaggcacagtcagacatggacagttgatccatgaggaaaagatgctctcccacctaaggccaggaatttgagagcaggactggctgagctcccagggcaaggggttcactaatgcttatcaataaagaatattgagcctggaaaaaaaaa

SEQ ID NO: 152824 - DNA, 609 bp, Homo sapiens
ctaacttgccagatcatgggtcagggagacaggcagcaggtattggaaggtgatggccaggtccttttccccagtgaccactctccatctagaagcactctgcttcagctgcgcaggctcttccggggactctgggagcctgcactggaagcgggggtctccggggtgggtcttcagcacctgccacacctctgggggaggctccaagcccatctgcttggcccgacaccagcgctgcagccgtgtgatcccggtgcagggcccgtactgccaggccaggtcaaactgcctcagcagctccagctccgcttcctcctcgtcgcggggctggggctcctccccctccagagatcccatccggttcttccttccagggatactgggagggtggggcacagactcctgggctgctgcctgctcagaggcctctgcctcctcctttccctgctctggggtctgggtgttctgcactggaagagggctaagccactggtacacgtgggcacaagggaggaagctgctcatgaggtttgtggggagagccaggtagagctgggaagcaccctccacaccttcttctctagtcacctcctctttcaccttggccat

SEQ ID NO: 152825 - DNA, 438 bp, Homo sapiens
gggagacagttcctgagggtcagagtcacgcaagcgcttgggtgacttcagaaacgtgtgggtgactggctgggagaggcgcctccgtggggctgggtgggttctcaccggtgcagggcccgtactgccaggccaggtcaaactgcctcagcagctccagctccgcttcctcctcgtcgcggggctggggctcctcccctagctcgggtgccagctcccccttgctgtgcccagcgggcccctccctcctcttcacaaccgggtaggaatcagtgatgagccgcttccggcccatggcggccacccaggcaggcagagaagtaggcacctgcggggaagaggagagaccggccagtgggcgcgagaaagacagctgctgagagagacagacggggccaggccagcggcgggcagtcaagatgacccagacaatccgag

SEQ ID NO: 152826 - DNA, 1935 bp, Homo sapiens
tttttttttttttttttttggttttccaggctcaatattctttattgataacgcatatagtgaacccccttgcccttggggagctcagccagtcctgcttctcagattcctggccttagggtgggagagcatctttttcctcatggatcaactgtccatgtctgactgtgcctaacttgccagatcatgggtcagggagacaggcagcaggtattggaaggtgatggccaggtccttttccccagtgaccactctcacatttagaagcactctgcttaagctgcgcaggctctttccggggactctgggagcctgctggttagatggagtgagttgagcctctgacacctccagggttctgcctgcccaagggttccctcccgcaagccgggctgaagctgagcagggagcaatgggctctcgcttctgtcctgaggtttttggggtgggttaagcaagagagctaagggcaggaggtttttacgtggtgcctcatagggggttagagatgccagagactgcactggaagcgggggtctccggggtgggtcttcagcacctgccacacctctgggggaggctccaagcccatctgcttggcccgacacacagcgctgcagccgtgtgatcccggtgcagggccccgtactgccaggccaggtcaaactgcctcagcagctccagctccgcttcctcctcgtcgcggggctggggctcctcccctcagagacctagctcgggtgccagctcccccttgctgtgcccagcgggcccctccctcctcttcacaaccgggtaggaatcagtgatgagccgcttccggcccatggcggccacccaggcaggcagagaaggagagcaactgcggggaagaggagagaccggccagtgggcgcgagaaagacagctgctgagagagacagaacggggccaggtcagcggcgggcagacaagctaaagagtcgccgcagacaagcaggcccccagatggagaaccagcctgtgaggtggcgggccctgccgggcctcccacgccctcctgggctccccgcagccccctggctcctccttggcgtgctgctgctgcccgggaccctgcgactggcaggaggacagtcagtgacccacaccggcctgcccatcatggcctccctggccaacacagctatctccttcagctgcaggatcacctatccatacactccccaattcaaggttttcacagtcagctactttcatgaagatctccagggacagaggagccctaagaagccaacaaactgccaccctggactgggcacagagaaccagagccacaccctggactgccaggtcacccttgtgctgccgggagcatcggccactggcacctactactgctctgtccactggccacactccacggtgagaggcagcggcaccttcatcctggtcagagacgcagggtaccgagagcccccgcagagtccacagaagctcctgctctttggcttcaccggcctcctgagtgtcctgagtgtagtgggcacggccctgctgctctggaacaaggtgcaggaatggcttgatgcaggtcttgtaggcatttgccatgtttccctggagaggaagcggatgcggggtccagggaaggaccccaccaggaagtgcccagatccaagatctgccagcagccccaagcagcatccttcagaatctgtctacacagcattttctgaaacaattttcctggagatgtgggtgcatctccaggaagtggaagagcctcctggcacccagcacacagctctgcagcgccgcgagaccgaggtctatgcctgcatcgagaatgaggatggcagctcacccaccgccaagcagagccccctctcccaggagagaccgcatagattcgaagatgatggcgaacttaacctggtctatgaaaatctctag

SEQ ID NO: 152827 - DNA, 328 bp, Homo sapiens
cccactgttcagcgacaacgggaaaaagcggggtctcgccctggatgggaaactcaagcacgaggacaccaacctggcttccagcaccatcgtgaaggagggtgccaacaaggaggtgctgggaatcctggtgtcctacagggtcaaggtgaagctggtggtgtctcgaggcggccgctccggagacagatgtccctgtggacaccaacctcattgaatttgataccaactatgccacagatgatgacattgtgtttgaggactttgcccggcttcggctgaaggggatgaaggatgacgactatgatgatcagtcgacgcggccgcg

SEQ ID NO: 152828 - DNA, 417 bp, Homo sapiens
tgagattcgagccttctgtgctaaatcactagaatagaaaagccacaaaaggaactctgtgcggctggtgatccgaaaggtgcagttcgccccggagaaacccggcccccagccttcagccgaaaccacacgccacttcctcatgtctgaccggtccctgcacctcgaggcttccctggacaaggagtgagacagtacgccgacatctgcctcttcagcaccgcccagtacaagtgtcctgtggctcaactcgaacaagatgaccaggtatctcccagctccacattctgtaaggtgtacaccataaccccactgctcagtgacaaccgggagaagcggggtctcgccctggatgggaaactcaagcacgaggacaccaacctggctttcagcaccattgggaaggaggggggccac

SEQ ID NO: 152829 - DNA, 378 bp, Homo sapiens
  misc_feature (1)...(378): n = a,t,c or g
nnnnnnnnnnnnnnnnnnnnnnnnnnnnnnnnnnnnnnnnnnnnnnnnnnnnnnnnnnnnnnnnnnnnnnnnnnnnnnnnnnnnnnnnnnnnnnnnnnnnnnnnnnnnnnnnnnnnnnnnnnnnnnnnnnnnnnnnnnnnnnnnnnnnnnnnnnnnnnnnnnnnnnnnnnnnnnnnnnnnnnnnnnngggggggcccttttaaaagatcccttggggggcccaaatttaccggggggtggaaaggataaatttttttctttttggggggcgttttaaaaccctcctggggatttttgggaaggaaccttttttttgggggggggcattttgggcccannnnnnnnnnaaaatttaaagcttttggggaaaaataaaag

SEQ ID NO: 152830 - DNA, 457 bp, Homo sapiens
cacgtcaccaacaactccaccaagaccgtcaagaagatcaaagtctctggtaggaggtggggtttggaagggggtcttcggggagggcgttactgcacaggtggctcctggtgtgatctcagcccaggccatttcccagtgcgggagacccaccagggctcaaagaatttaggttgttccagaatgatacggggagcctcggtgtttactgcttcagtggggagcatgggggggccacgccacggggtctggagttgtggtgtggtggtggcttgtgctccatccagagctgcctgaccccgtcccaccccacagtgagacagtacgccgacatctgcctcttcagcaccgcccagtacaagtgtcctgtggctcaactcgaacaagatgaccaggtatctcccagctccacattctgtaaggtgtacaccataaccccactgctcagtgacaacct

SEQ ID NO: 152831 - DNA, 447 bp, Homo sapiens
ccttcagccgaaaccacacgccacttcctcatgtctgaccggtccctgcacctcgaggcttccctggacaaggagctgtactaccatggggagcccctcaatgtaaatgtccacgccgcaggcctttccagaatcttccatgctccgtcacactgcagccaggcccagaggatacaggaaaggcctgcggcgtagactttgagattcgagccttctgtgctaaatcactagaagagaaaagccacaaaaggaactctgtgcggctggtgatccgaaaggtgcagttcgccccggagaaacccggcccccagccttcagccgaaaccacacgccacttcctcatgtctgaccggtccctgcacctcgaggcttccctggacaaggagctgtactaccatggggagcccctcaatgtaaatgtccacgtcaccaacaactccacgccga

SEQ ID NO: 152832 - DNA, 2094 bp, Homo sapiens
  misc_feature (1)...(2094): n = a,t,c or g
aatttccgggtcgacgatttcgtggaggagcagggatcttggcagcgggcgaggaggctgcgagcgagccgcgaaccgagcgggcggcgggcgcgcgcaccatgggggagaaacccgggaccagggtcttcaagaagtcgagccctaacatgcaagctcaccgtgtacttgggcaagcgggacttcgtagatcacctggacaaagtggacccatgtagatggcgtggtgcttgtggaccctgacataccatgaaggaccgcaaagtgtttgtgacccatcaccatgcgccttccgctattggccgtgaagacctggatgtgcatgggcttgtcattccgcaaagacctgttcatcgccacctaccagggccttccccccggtgcccaacccaccccggccccccacccgcctgcaggaccggctgctgaggaagctgggccagcatgcccaccccttcttcttcaccataccccagaatcttccatgctccgtcacactgcagccaggcccagaggatacaggaaaggcctgcggcgtagacttttgagattcgagccttctgtgctaaatcactagaggagaaaggccacaaagggacctctgtccggctggtgatccgaaaggtgcagttcgccccggagaaacccggcccccagccttcagccgaaaccacacgccacttcctcatgtctgaccggtccctgcacctcgaggcttccctgggacaaggagctgtactaccatggggagcccctcaatgtaaaatgttccacgttcaccaacaactccaccaaggaccgttcaaggaaggttcaaagtctcttgttgaggacagttacgccgacatctggcctctttcaggcaccgcccagtacaagtgtcctgtggctcaactcgaacaagatgaccaggtatctcccagctccacattctgtaaggtgtacaccataaccccactgctcagtgacaaccgggagaagcctttgtctcgccctgggatgggaaactcaagcacgaggacaccaacctggttttccagcaccatcgtgaaggagggtgccaacaaggaggtgctgggaatcctggtgtcctacagggtcaaggtgaagctggtggtgtctcgaggcggggatgtctctgtggagctgccttttgttcttatgcaccccaagccccacgaccacatctccctccccagaccccagttcagcggctccggagacagatgtccctgtggacaccaaccctcattgaaattgataccaactatgccacaagatgatgacattgtgtttgaggactttgcccggcttcggctgaaggggatgaaggatgacgactatgatgatcaactctgctaggaagcggggtgggaaagaagggaggggatggggttgggagaaggtgaggggcagggattaaagatccccaacttgtccaatgggggattgtccccagcccccttcttccctttccccctcacctggaagcttccttaaaccaaatccccttaaaaactctctccccccaatcccccccaaagatacacactggacccctctcttgctgaatgtgggcattaattttttgacttgcagctctgcttcttccagcccccgccgtgggtggcaagctgtgttcatacctaaattttctggaaggggagcagtgaaaagaggagttgacaggagggaaagggggggaacaaaactcctactcttcaacctccacaccaacacctcccattatcactctctctgcccccattccttcaagaggagaccctttggggacaaggccggtttctttgtttctgagcataaagaagaaaataaatctttttactaagcatgnnnnnnnnnnnnnnngggggggggggccctttaaaaaaaacccttggggggcccaaatttaacggggggtggaaaaataaattttttttctttttggggggggtttttaaaactggggccggggcgggtttttaaaaccccgggaagggaaaaacccccacctggggatttttggaaaaaaaccttttttttggggggggaaaatttgggcccacccccccccaaaaatttaaggcctta

SEQ ID NO: 152833 - DNA, 454 bp, Homo sapiens
gagaacccaaaccagaaattacatggtggtttgaaggagaaatactgcaggatggagaagactatcaatatattgaaaggggagaaacttactgcctttacttaccagaaactttcccagaagatggaggagagtatatgtgtaaagcagtcaacaataaaggatctgcagctagtacctgtattcttaccattgaaactgatgactactagctcccctcccctctccctggaactttctctttcactccaactttcttactacatccatcttttctgtggcggggccaaaaaaggaaaccaggagtgccactatgctgacttcttattccttttcataacagtcttcaaagcacagctcatctaaagaatgcctacttcttttccaaataagcatcagatttatcgcctattatgcagtaacagtcaataaaatgtacttatgggggggaatt

SEQ ID NO: 152834 - DNA, 3047 bp, Homo sapiens
caggcgggacgcgcacagtccctccacgcggaaagaagtaccttcgccggtcaccggctcctgcagggtgcaaatatatacagagcttcataatcagcccaagaccacatagagcaaacatgaatgatatttcccaaaatggctgagattaaagaaatgcttgcttctgatgatgaggaagatgtatcttctaaagtagaaaaggcttatgttccaaaattaacaggaactgtgaagggtagatttgctgaaatggagaaacaaagacaagaggaacaaaggaagagaacggaggaggaacgaaaacgcagaattgagcaggatatgttagaaaagaggaaaatacagcgtgaattagcaaaaagggctgaacagattgaggacataaacaatacgggaactgaatcagcatcagaggaaggagatgattcactacttataactgtggtacctgtcaaatcatataaaacatctggaaaaatgaaaaagaattttgaggatctagaaaaagaacgtgaagagaaagaaaggatcaagtacgaggaagataaaagaataagatatgaagaacaacgaccatctctcaaggaagcaaagtgtctttcatttagttatggatgatgaaatagaaagtgaagcaaaaaaagaatcactttctcccggaaaaattgaagctaactttttgaaggaacctggagcgccaaagacaagaaaaccgaaagaagcaagctgaagaggaagcaagaaaacgtttagaagaagagaagcgtgctttttgaagatgcaagggcgcaaatggtaaatgaagatgaggaaaaccaagacacagcaaaaatttttaaagggtgccgcccttggtaacctcaaacccagttttgaagaaatgggaaggcaaagaagagaagatgaaaaaaggaaagcagaagaagaagccagaaggagaatagaggaagaaaagaagggcgtttgctgaagcaaggagaaatatggtagtagatgatgactcccccagagatgtataagacaatctctcaagaatttcttacaccgggaaaactggaaattaattttgaagaattattaaaacaaaaaatggaagaagaaaaacgacgaacagaggaggaacggaagcataagctagaaatggaagaaacaagaatttgaacaactgagacaggaaatgggcgaggaagaggaagaaaatgaaacctttggattgagcagagaatatgaagaactgatcaaattaaaaaggagtggctctagttcaagctaaaaacctaaaaagcaagtttgaaaaaattggacagttgtctgaaaaagaaatacagaaaaaaatagaagaagagcgagcaagaaggagagcaattgaccttgaaattaaagagcgagaagctgaaaattttcatgaggaagatgatgttgatgttaggcctgcaagaaaaagcgaggctccatttactcacaaagtgaatatgaaagctagatttgaacaaatggctaaggcaacgacgaagaagaagaacaaagaagaattgaagaacaaaagttactacgcatgcagtattgaacaaagggaaattgatgcatgcactacaaaagaaaagagaagaggaggaggaggaagaaggtagcatcatgaatggctccactgctgaagatgaagagcaaaccagatcaggagctccatggttcaagaagcctcttaaaaacacatcagttgtagacagtgagccagtcagatttacggttaaagtaacaggagaacccaaaccagaaattacatggtggtttgaaggagaaatactgcaggatggagaagactatcaatatattgaaaggggagaaacttactggctttacttaccagaaactttcccagaagatggaggagagtatatgtgtaaagcagtcaacaataaaggatctgcagctagtaccctgtattcttaccattgaaagtaagaattaatcactctttttatcttttattctattaatttttttttcctgtaaaatcacttttcttcttctcttttttttagctgatgactactagctcccctcccctctctgggaacctttctctttcactccaactttcttacttacatccatcttttctgtgcgggggccaaaaaaggaaaccaggagtgccactatgctgacttcttattccttttcataacagtcttcaaagcacagctcatctaaagaatgcctacttcttttccaaataagcatcagatttatcgcctattatggcagtaacagtcaataaaatgtacttatggggggggaattactcaattattctatcagagcctattataaagactgtatttcccatagacgtttacagcaactatgtttaaaaaacaaaaacaaaaaaaaaacacacaaacctaagtagaatacattattttgcatgaaggaatgtcatttctgagctttttacacctaaaattaggctgaaatagctgagataattaatttggaacctatcaatttgagtggactttttctttagtagtacaccattttggttgttgtagtttcaaagtctttctgaagccagatatattggggattgggagcggggtggggaaaactgtcactccctttcagaggaaaaggggaggaggcatggagaaaaacaaaaattaaaggacttaaagaatggctatacagtgttgagtgttgaggatattaaacatgttatttttcaaacgtattgtaatatatattaaatttataaagcaaatttatgttgtgatcttgcctgaacaaattatattttaatgaaaaaactttctattaatagttcacgcaagagaaaacactttcaacatagtcgaaggcttcaagatctaagtgtatcagacttagggaaaaagtggcacaaccttcgatttaaaattctagtctttaaaatgagtttgtaaataattagctattacgttctattaagttgttttatattttaattttctggaagacaaattttattttacaacgtgaacccaaataaagtaacttctgtattt

SEQ ID NO: 152835 - DNA, 2157 bp, Homo sapiens
taattcagcatcttagttttaatgtaattataaaagtcaccaaaaattgacagaacactagaaaacaagtaattgctaaatcaaaatagaatatcgtatacttttaatctttcatttttttttctttcagtttttcagttgccttctttcctagatcacgtatttctatcgttgttccctttttaatgttccctgtgacccactggagccactagttaataaatccttaactccaaataggttaatatttaatttcagcaccccaagctcccaaatgcatcagctaaactgggttatagcatggagaatacctcagacgaccacagattttatttttgttaagattctatcaagactgaggcaaattataataaaagttctcatatcatagaaaacaaattacgtggaaaaggataaacatttatacagtactgaagcgttatcaacaatgagtagcagaaattctttttcactgaagtccaaaagccatcccagccctccagcagatttaaagattcttgctaaaggtcaattcaggatatagacctaatacaagaacaaggtatttactgtcaagatttgctatgaaagttccacgtaacttgtaacaactctgtccttggccaactatatatacaaggtgctgttacaatgaaatatattttaaggcacagtattccaaactgagtagaacattttgctcccagagtctgcacagattttggattatttataccagctaatagaattagtaccaattaacccgagttggaaatctgggtggtaacagacttcagagggctatccaaggtactcatgcctggtgcctatgaactacgaaagatcagaaagaatgggtcacaggaatcaaggttgagctggtaagaaaagggggaaaagactggacttcagtattgacagattagcccagaatgaagaggaacaaaaacatcctttactatggtacaaataagctttataacacaaataatcttctcaataattttataaacattctagtatcatctttagggttatctgaaagaagtttctatagatatattctctagtacttttctgtagaaattaaaaataaagatccataattggcctattatccctgtatttcatattatttcctaaaaatattccctagaaatatctgcaagaatagttattttaatcttttaagtagctgtgaaaacaaaccaaaaaattgtattggggggtctgaataaccactttatctcctatagaaaagaagataggtaagaagaggatgagtacttatagtaggtgccatgaattaatgtctaagggtgaagatgtgaaatttgctcactttttgaaaagcaggcatcaagttagataatgatcattgattttatttgtccattactatttcccacttgatcaaagcactgcctattaaaaaggataaatcagataatacctttactaccactaatgaatcaatagaaaaggctagggttttgcagtcagaatctactacactgctaatattgctattaataaggctaccattatattctaaccaactcaaagaaattgcaggataatcccagtataatgcctttaccttatatataaattgaatcaaggtccagagagttcaaataatttgtccaaaataatacaaatatattttccaagttttaacaaaaaacaaagttcgaggagctatatcatcaattatcagaatcagaattaaaaattaaatcactggcttcagttagtgcttttgctaccatgctcacgttgcttgatatctaatcaatgttacagactatttagttcaccttggccaacctctacatatttccagctgaagttgctttaagttgaaaaaacggtatacaatcacagaggagagatataaagaaacaagaatgctgctaccatcctattagggttcactcctctaaaagtagagcaaagggatatcagaacatacacaagaagggctggagttttgtttccccaaataagttaagcgtaagcttcaagaaagtttttgatcttcatgtttttgtagcaaacagttaagaacatctctgtataaatatgcctgagattgtcatcaaatagctttataaacatgtctttctagcttattcacttaactacccaaccatc

SEQ ID NO: 152836 - DNA, 2009 bp, Homo sapiens
agcagctgccggatccttcagcgtctgcatctcggcggggccccgcgtacccgtcgcccggctctccgccgctctcccggggcttcggggcacttgggtcccacagtcgggtcctgcttcaccttcccctgacctgagtagtcgccatggcacaggttctcagaggcactgtgactgacttccctggatttgatgagcgggctgatgcagaaactcttcggaaggctatgaaaggcttgggcacagatgaggagagcatccgtgacgtctgttgacatcccgaagtaatgctcaagcgccaggaaatctcgtgcagcgttttaagactctgtttggcagggatcttcgtggatgaccgtgaaatcagaactaacttggaaaatttgaaaaatttaattgtggctcttgatgaaaccctctcgggttttatgaatgcttattgaactgaaacattgccttgaaagggagctggaacaaatgaaaaagtacttgacagaaattattgcttcaaggacaccttgaagaactgaggagccatcaaacaagtttatgaagaagaatatggctcaagccttggaagattgacgttggttgggggacccttcagggtactacccagccggatgttggttggttcctccttcaggctaacagagaccctgatgctgggaattgatgaagctccaagttgaacaagatgctcaggctttatttcacggctggagaactttaaatgggggacagatgaagaaaagtttatcaccatctttggaacaccgaagttggtcctcattttgaggaaaggtgtttgacaagtacatgactatatccaggatttccaaattgagggaaaccattgaccgcgaggacttctggccaatttaggagccaactactccttggctgttgtggaattctatttcgaaggtatacctcgcctaccctgcaggagacctttatttatgctatgaaggaagctgggacagatgatcataccctcatcagagtcatggtttccaggagtgagattgatctggtttacatcccaggaagggagtttaagaaagaatttttgccaccctcccccttattccatgattaaggggagatacatctgggggactattaagaaagctcttctgctggctctgtggagaagatgactaacgtttccgggggaagagaccccctgctgtgtgccctgcaccaccccccactgccttcccttcagcacctttagctggcatttgtatgcccaggggcttaacacattgcccttattccatactggccatgctccatgaccaaccacatacaccgtcatagaagaaaaatagtgggtgcttctttctggatctctagtggagatctcttttgactgctgtagtacctaaagtgtacttaatgttacgtaagtttaatgcctggccatttttccatttatatatatatttttaagaggctagagtgcttttagccttttttaaaaaaactcccatttatattacatttgtaacccatgatactttaatcagaaggcttagccttgaaattgtgaactcttgggaaatgttattagtgaagttcggcaactaaacttaaacctgtaaaaattatgatgattgtattcaaaagattaatgaaaaataaacgatttctgtccccctgaattatgtgtacatgtgtgtttagatttattattaaatttatttaacaatgttctctctttttaagctaataattgacagtggtgttagttgagaactgaatttacagttggtcttttgggcagtaagaaatgcaaaccatagactgaatttccttcatagtacatgatttttcctaaatataggaaagatcgaaggggtctctggtttatttgcaccatgtttatttaggcatctattaaagcaatgcttgtggtgctacttgcttagtagaaaagctaattataaaacttaatgcaaaaattcagagtactacctttctctttcctctttcctattgag

SEQ ID NO: 152837 - DNA, 501 bp, Homo sapiens
atgaggaaaagccagtgcaaaaaggctgaaaattccaaaaaccagaaagcctcttctcctccaaaggatcacaactcctcaccagcaagggaacaaaactggacggagaatgagtttgacgaattgacagaagtaggcttcagaagggacatggatgaagctagaaaccatcattctcagcaaactaacacaggaacagaaaaccaaacaccacatgttctcattcataagtgggagttgaacaatgagaacacatggacacaggaagtggaacatcacacaccaaggcctgtcaggagtgcagtattctcagtgttaagtaagcagagttggagagtatcagaaacaggattctcagcagaaatgtggttgaatggactcccagccctcttggcatcgtacctcatcatccatgcctaccttccttttccaggaaagcccatgtattttagcaaacggacttctgacacaaaggccattatctctacggctttagattaa

SEQ ID NO: 152838 - DNA, 394 bp, Homo sapiens
  misc_feature (1)...(394): n = a,t,c or g
tataatatcaaaaatgcgtggaacttttgctnnnnnnnnnnnnnnnnnnnnnnnnnnnnnnnncaaaactgtggaacagactgcaacaaccacaaacaaaaagcctggccagggaactccaaattcagctaatacccaaggaaattcaacaccaaatcctcaggtccctgattaccctccaaactatattttattccttaataacttaccagaagagactaatgagatgatgttatccatgctgtttaatcagttccctggcttcaaggaagtacgtctggtaccagggaggcatgacattgcttttgttgaatttgaaaatgatgggcaggctggagctgccagggatgctttacagggatttaagatcacaccgtcccatgctatgaagatt

SEQ ID NO: 152839 - DNA, 355 bp, Homo sapiens
ggacatggatgaagctagaaaccatcattctcagcaaactaacacaggaacagaaaaccaaacaccacatgttctcattcataagtgggagttgaacaatgagaacacatggacacaggaagtggaacatcacacaccaaggcctgtcaggagtgcagtattctcagtgttaagtaagcagagttggagagtatcagaaacaggattctcagcagaaatgtggttgaatggactcccagccctcttggcatcgtacctcatcatccatgcctaccttccttttccaggaaagcccatgtattttagcaaacggacttctgacacaaaggccattatctctacggctttagattaa

SEQ ID NO: 152840 - DNA, 580 bp, Homo sapiens
ctgggctcatccacaaatgccttgagacagctacaaggatttccattttatggtaaaccaatgcgaatacagtatgcaaaaacagattcggatataatatcaaaaatgcgtggaacttttgctgacaaagaaaagaaaaaagaaaagaaaaaagccaaaactgtggaacagactgcaacaaccacaaacaaaaagcctggcttcaaggaagtacgtctggtaccagggaggcatgacattgcttttgttgaatttgaaaatgatgggcaggctggagctgccagggatgctttacagggatttaagatcacaccgtcccatgctatgaagatcacctatgccaagaaataacatttgggatagtcgtctttaaaagacttggtgttatttacagtgtttgttttgataacatttggctgggtcattttaatagttagagatgaggaggagtaaaagtgaaatttttgtgaaggacttaaattatccagtgtttctttagccttggtgaactatgaaatacgaaggccttaattttgtacaataaacttttatttgtattctgtgtaaaaaaaaaaaaaaa

SEQ ID NO: 152841 - DNA, 328 bp, Homo sapiens
agatgtcagaaaagagtcagaaagcccaggtgatagaataagtgccaagaacatatacaccatggaatactgtgcagccataaaaaggaatgagttcatgtcctttgcagggacatggatgaagctggaaaccatcattctcagcaaactaacacagcaacagaaaaccaaacaccgcatgttctcactcataagtgggagttgaacaatgagaacacatggacacagattggtaaaacttcagcggttggatgacaccctcttttggtgatgccgtgggggaacgcaacatgattcaaccccaatggaagagaagttgccattaacc

SEQ ID NO: 152842 - DNA, 1527 bp, Homo sapiens
ttaagccctgcatgcattaggtatttgtcctaatgctctccgtcctcttgccccctcaggccctggtgtgtgatgttcctctccctgtgtccatgtgttctcattgttcaactcccacttatgagtgagaacatgcagtgtttggttttctgttcctgcgttagtttgctgagaatgatgggagaagaaggggctttcaaaagctgttttgacaaccttctccccacccccacacatgaatccatggtaaaaatttccagttaggtaaagacagaagacagtattgggataatgtaagcgtcgtttggcatcaggtgggtgcttttgagcactcagcagatcacatccttcacggatcggcattgagggaaatgagggttctgcacagcagtccctcacagactctggttctgactgccagatttcatcctctggaatcttccccatggcatgcaggatctctcgggctgctctctccccggcctctacagccccctccatgtagccgctccagtgtgtggcagtctcggtgcctgcaaagtaaatcctgtccactggctggcgtagaacccttccatattgagtcaggatcccaggggggaaataagttgtgtagcagcccccagagtactgctcctcacaccagttcttttcttcataatgcactggctccagagcttctagggaacccagaaccttggcatagagttcacaaagtttcttcaacctttcctctttggtaagacgtgccagttttctggctttgtgggccaggataaatcccattatggcagcatagttgccttcaggtttggtatcatccaacgtgtaggcaactggagcttcttctccatcaataatcatggttccacagtaatcctttttcctccagaaaggctctttataataaactatacacttgatgactgaacccaaaggcacacgagtgatcatctggtttctcatcattggcagagggggattgaagtgaatcttcatgcccagagtaggaggaatagcactaatcacatatttagcctcatacatctcatggtttagggtctccacaaggacattttctcttgtctggtcaatgtagatcacaggcctctccagcttcactcggtctccaaggaggtccattatccgctcactcacttgaccagatccgcccacaaatttcctctcctgtcctccatttgttgtcgagatgattcttgttgtgcctccacactgcttcacataccacaggaaccagagagcagagacctcatgggtctctgcagtgacacacaggttcacaaagagagtggcaagctgctttgcagattcagtccagcagagcttgtccagtagctccttcattgtcatgttgtcccactcttctgcaaggggagccttccatggggcatcactcggaatctctcgccccatgtcatccattgtcctccaaaagttgttatgatctaagtaggtaattggattccatacaggtgggaatggccccctgaaggggtatgatttgcc

SEQ ID NO: 152843 - DNA, 975 bp, Homo sapiens
atgggcaaaaagaaacagctccagtctgcagctcctatggtgcctggaaccccagcgacagaaccgttcactcccatgaaaagggggatgaagccagggagccaagtggtcttgctcagtgggtcccactcccatggagctcagcaagctaagaaccactggcttaaattctcactgccagcacagcagtctgaagttgacgtgggacgaaccagcttggaggcgggaggggcacccaccgttactgaagctttagtaggcggttttcccctgacagtgctaaggaggctgggaggggttgacagacacctcatacaggagagctccagctggaatcaggccagtgctccagaggaaggagcagacagtaatctttgctgttttgcagcctctgctggtgatacccagatgaacggcatctggagtggacctccagcaaactgcagcagacctgcagaagagaggcctgttagaagaaaaactaaaaagcagaatgcaacaacatcaaaatcaacaaaagggacccccacacagaaaccccattcaaatgtcatcagattcaaagatgaaagggacatggatgaagctggaaaccatcattctcagcaaactaacacaggaacagaaaaccaaaccaccacatgttctcactcatacgtgggagttgaacaatgagaacacatggacacagggaggggaacatcacacaccagggcctgtcagggggtggggagctaaaggagggatagcagtaggaggcatacctaatgcagatgacgggttgatgggtgcagaacagcttagccacacagcagtgctccatggcggctgccgtcaaaaatttaaacacggcttggaattttttgaggatgttattcataaaggcccagttaatcaaactcagacctcttttcagaatttcactgtacaagccaaacttattgccaataaaaggaaggtgccagaccaaaaaag

SEQ ID NO: 152844 - DNA, 2248 bp, Homo sapiens
ttatttcttggcataggtgatcttcatagcatgggacggtgtgatcttaaatccctgtaaagcatccctggcagctccagcctgcccatcattttcaaattcaacaaaagcaatgtcatgcctccctggtaccagacgtacttccttgaagccagggaactgattaaacagcatggataacatcatctcattagtctcttctggtaagttattaaggaataaaatatagtttggagggtaatcagggaccccccaccccccgataggccgtagtgtgtgatgttcctctccctgtgtccatgtgttctcattgttcaactcccacttatgagtgagaacatgtggtgtttggttttccgtttctgtgttagtttgctgagaatgatggcttccagcttcatccatgtccgcgcagagagattgccagccctggctgccagagacccggaagcatcgatcggctctgtgctcggcttctagacttgtcggcgctcgattgaggagcgtggctacgttgcttccggtgcctggctccgtttcctgcttttggttcttacagtagtcggcgtaggccttaggtgggttcgtgcgccttctacctcgctgtttcggttttcctggctcctcggccctttctccacctgttgcagctgggagcggacgaaagcgcgaagctgggattttttacggtctcctgaagaaatttaacacaaacatggatatcagaccaaatcatacaattcatcatcaacaatatgaatgacaaaattaaaaaggaagaattgaagagatccctatatgccctgttttctcagtttgggtcatgtggtggacattgtggctttaaagaccatgaagatgagggggcaggcctttgtcatatttaaggaactggggctcatccacaaatgccttgagacagctacaaggatttccattttatgggtaaaccaatgcggaatacagtatggcaaaaacaggttcggatataatattcaaaaatgcgtgggaacttttgctgacaaagaaaagaaaaaagaaaagaaaaaagcccgaactggtggaccagactgcaacaaccacaaacaaaaagccttggccagggaactccaaattcagctattcccccagggaaattccaccacccaaatccctcagggtccctgattacccctccaaactaaatttttattcccttaataaacttacccagagagagactaatgagatgatgttatcccatgctgtttaaatcagttccacatggccttcaagcgaagtaccgtctgggtacccagggaggcatgacaattgctttttgttgaatttgaaaatggatggccaggctggagctgcccagggatgctttacagggattttaagatcaccaccgtccccatgcctatgaaggatcaacctatgcccaagaaaataacattttgggatagtcggcctttaaaagacttgggtgttatttacagtgtttgtttttgataacatttgggctggggtcattttaatagttagagatgagggagggagttaaaagtgaaattttttgtgaagagacttaaaattatccaagtgtttctttagccttggtggaactatgaaaatacgaagccccttaattttggtacaaataaacttttatttgtattctgtgtatataatgctttcttgattgacccatcgccctatcatcaaatgacttctagtctagaacacacttaaggtttataaacttgtgtaataggatgcttttctagtgttactttggaggagctaattatacaacatcattgaaccattcaataaaagttaagtaaaattagatcacagaagcctagtagatgactgttgtaattaagggtaacaatgattgttcctgggtattagaagaaaatgagacccccaggcaggatcctaaatttggatcctttgtatccttttaagaaatgaatatattattttgcctgcctagtagggattcccacaagttttccttcattccagtattaaataaaggctgttcttactgtttactgagaaaacagaaagggaatgctatcttcacactttgcatttaatgctgtttccttcatgaggcaggactgttctaaggttaatatgcaatctctttattgaaagacctccagggtaaaaattttttgatctatagtctcttttcccccttaagacaaatagactgattaataaagagttgccagtgctaaaaaaaaaaaaa

SEQ ID NO: 152845 - DNA, 1506 bp, Homo sapiens
ttttttttttttttttatttttgttttgaggttataaacattaacttgatttaatcattttacaacataaacatatatcaaaatattacactgtagacagatatatacaactattatttttcaatttaaaaatcaattttttttaaaatttaatctttcttttttcaatgaatcttggatttcttcactttaaactcttaaggtattaggcatacaaatgttttaatgggcttagaattagttaccctaacacaattatatgagcccaaatactaactactccctccaaactatctatttttcatagcattcttcaaaatacaagattattcctgtatatcttattaaaatttattatgtctgccttatctaaatattgataaaaatagaaggtaggggcatttgcctggcttcatacattccaaaatcaaagggcagttttactaattatttttacattcagtaactcatttggtctcacacagtaaacacaaatattacgtaacagaactatattcatattcttcatcctaaaaatggaaaaaattttgagttatttattgattgtagtacgggactcattctctatttttttcaaattattccatgtcaagtgcctagaataattgttcatgacatactatgaaataaaaaataccgatagagatggattacaaaagtaaactgaaaaaacatcctatgaattgtttcattatatatataatagaatatacttatatccatagaacaaaaaaattatatctttttagatagaatagctgttataaactgcttaagttgtacatttcatcaacacttaatgaaaaacatcaatttctcacaaaaacttcaagcagtagaagaggtaacatttcttaattcatctattagccaataatacccaaaggagacaaaagaatcacaagatgattacgaaacaacatcctatttaaatttagacacagaaattctcagaaatatttaaayaaagaatacayaaaggtataaggatgattacataccatgactaagcagggtattttcacaatgccaatgttccatttaatatgatacaatattacttgaacaaagtaaaaatgtaatacttgaaatagaaaaagtttggtaaattcaacacctatgaatgatagaacaccaagaaaactattagaagaaaacttttgagacctgctaaaagtcctccatgaaaaaccaaaattggcccggcgcagtggctcacacctgtaacccagaactttgggaggctgaggtggaaagactgcataaagccaggagttcaagaccattctggacaatatagggaatccccatctttacaaaatattaaaaaaaaaattatctgggcatggtggtgcatgcctattgtcccaactactcaggcagttaaggtgggaggctcacttgagcttaagaggttgaggctgcagtgagccaagatgaaaaactccacaccaaaagctaatatacttaatggtgaatgactag

SEQ ID NO: 152846 - DNA, 475 bp, Homo sapiens; identical to SEQ ID NO: 136716

SEQ ID NO: 152847 - DNA, 534 bp, Homo sapiens; identical to SEQ ID NO: 136717
  misc_feature (1)...(534): n = a,t,c or g

SEQ ID NO: 152848 - DNA, 6427 bp, Homo sapiens
  misc_feature (1)...(6427): n = a,t,c or g
ctgagtccggggtggcctggcagccggccgaggacgagggtcggcgggggctgcccccgtggtggtggccgccatgctgggagcctgggcggttgagggaaccgctgtggcgctcctgcgactgctgctgctgctgctgccgccggcgatccggggacccgggctcggcgtggccggcgtggccggcgcggcgggggccgggctgcccgagagcgtcatttgggcggtcaacgcgggtggagaggcgcatgtggacgtgcacgggatccacttccgcaagtgtatccctttgtaaggccgggtgggccgagcctcagactatggcatgaaactgccaatcctgcgttccaaccctgaggaccaatcctgttatcaaactgagccgttccaatggaggagacctttggctacgaaagtcccattcaaagagaagggggacttacgtgctggtctttgaaatttgcagagggtctactttgcacagtcccagcaaaaggtatttgatgtacgattgaatggccacgtcgtggtgaaggacttggatatctttgatcgtgttgggcatagcacagctcacgatgaaattatacctatgagcatcagaaaggggaagctgagtgtccagggggaagttgtccaccctttacacagggaactctaacatggagttgtcaaggggtacctatgaccaattcccaaggtctgtgcactcttacatcatggctggggacagtggatgatgtaccaaagcttcagcctcacccgggatggagaaagaaaaaagggggaagaagaagaagaagaattatgatgaagggtctattcccaaaaaaaacaggcccattaagaacggggggcagtcaggccccccggcacaaccccacaccctaagcctcggacaacagcagcctcatgtttcccatcctggtgggccttcggagtcttcattccaaccctcttctgcctctgccggttgtgagaacaaatgactattcttgaacagggtggaggggtgtgggaaagaaaccagccatattggttttggtttctagaattttccacaatgattaatgaacaaaaacaaagagaaaaaaaacacacatcaattaaaggagacaaaaagaggcagagcgagtagagagcagccctcattcaccacctggtcccagacgtgcttcagtcctcgtcctctctttgtggctggctcccagccttctctttcctcttgaggatacttagggtaaactggatccttcctgctcaaggatcctcatttgtatacctagtggaaaggactctgaactcagaggagtcactgtttcttttttttaggttagaaattaacagcagggaaatgccatcttattacctgagacgaccagcactgggagttaggtacggtctgaagttatgtctagataagacttcagacgtcctgggattgaaagaatgtgtgtgaaggggtagaatttgtgcggtaaagacttaaaaaaaaaagtagggagattaaaaaaaaagaaagaaaatgcttccttatctggaagcctttctggattaatccagtgatggtcccacctttagtgtttcgagctttgtcattgcttgtctccctggcatgtgccagtttatagactgtccagcatccaagacgtttcggttatgtcgggtcctcagatcgcctctgacttgttaccacaacaaatcattttgatttcagtgcctgttggggacttgatttcttctcaggttttgtttgtttgtttgtttccttaatctggctcatttgaaatttcttctccctctcaaccatcccactaagttatagccaagaagggaaggagacacggggatttggggttctctgcttgaatgtcttctcctttaccacctcaccttgttggtacctccctccctggatctctgagccagcagccaggaggacctgacccagcagttctttactggcccctttgtagggccttgctgccagggggcagggatgctttccagcctgcagcaacagaacacttgaccttaaaagtctcttctggtctttggattagaaaaggcttatgttagcatagcttaagagcaacctcagagacttgagccctactaagtgactgaccactgtttagagtgtctggtatctgatgttcatttattcccatgttcttgtgtgtcacagttcagccagttttggtttatgcctagagctacttcaaggaactagactaattagctatataggcccagcgatgcttcttattgatcttaatagtatgcccttccttcccctgtcctttcatttctctatccaagtagcagtcaggttcttggtgtgatgggactgaaagaattccagtcagccagagccttggcagctctgaagctaaccttagcatctaagtgtcgatcttgaattccctgaaaaaatttctataggaaatgaagcttccctggtcccctcctttctggccattgtcatccatttcccagttagggcaacaatgaaggaggacccagccaagctagaaggaattttgtggatgggagacagcaggattagcttcagcttgggctggagcagtcaatataggatctcaggccaggcccgcttttctagaatgtgtttaattttgagtttgctttattagatatgttttttaagagctctgtatatttgaactgctccttatgtgacaaaataggtagctcttgggctcatgtcctgggttttggctctttaatgattactccaggccagcatttagtcgtttgagaattgtagcctgttgttttcgctgtgacttgggtctcagtgctagggtattgagtcaggcagctggagggttgtggcccgaggctgcagtcagaggtatacttcccatagtgcttcacacagctcccctgcttctaaaggataaggtactgtagccttggtcctggggaccacctgcctggggcagtggacatcctaactaaacaggcttctggcagtagctttggttcctatcccatcgaaattccccaaagccctgggccactgccattgggttagtcaagatgaaggaggaggactggctgcctccattttgccttgtttgttagtttgcctgggtctgtctgaggaaggagggggtcccgccttccacctcaacacatcccttcagtgactcagagtctcagaaggaaaccctgactcctggggccatttcctaatggtactgtaagccaagcagctttgcttctgcctctgtttccaagcccacccttttcccctgagctcagggttagggatgggcgcttttcctctctggttgtgaacgaaaagaaggaacatctttctatggctaacaaaaacttaagggggaagtgaggaaacaggaagaagtatggtgggggctggggtagactcccctggagccaagcctatccagctaacaagagctccctggggctggtcacagctggctcatgatgctgaacttgaaagtttttttgtttttgtttttgttttgtggctcctccaagatataggtacatgaagtttaggttaaaggggtgggattctttatttttatttttgtattgtatgtgtcaagaattactctgttgttcaccttttgctttttgcactgtttgttctcttatctgtattttgagcttagtgctaggactgagaggctgcaccatagggaatgtatgggagatggtgaggggtgccagtgaggggtgcgtggaggagaggcctgggctcctctactggatctacactctgtcccaggtttttagatcccactgagcccagctgactgaaaacaaggacagtcagggtgaaacttcttttgccagaagtgtggcctgagttgaatttctgggaggatgacgcagatgtctgctgcagagctgggctgagagttctgcagtctagctctgacttaggtcaggggcctgttggtctctcattggacgtttttgggtctcactcatgcttactgaaacattgtgccaagaaactcctgtgggatttgtgtcccttaaaccagactcacttttctgaaaaatcctccattgtttgaggagaggctgctcaatcgacaccccgagttctcatgactggggaagaaaagttttcttcaggtgtcaatggcgttagactcccaggaagactagccctgcccacagggccacctgttggtttgagagcgtgttcgtgttctctttgccctccctgcctaagagctactgggatcacgttagcgggcatttaggctttgattgagagggcacagtttgagttaggtttacctccccctttctgtgcctgggaactgtttggtccagctttagaactgtggttttgacttccttatctcttgggagaagcttctgttttaaggaatttctcttccttcttctcctgcctctagcctttcctggaaaggcccggatatggtttctaaaatctcagctgagaactttagaaaacagcagcagtatttttccttttcctagtgctaaaatccctttccctagaaattggctcaccttgggaaacccagggaaagaatcagcaggttctctgccctccctaggggttggggaaggacccaccccggtcagcacagtgccttttcctctcctgctctgagccagggtggggcattccctctagattcaggtttgggcaggggtcctatagtccctgccatggggctgcttccctgtcccttccctcccctttgctggcctactctggcataattcaagtgtcttcttggccttggggaatccttagtggcatcaaatggcaacatggaatattgtcctccatgcccctccagaaggacctaggaagagtaggtgaagctttccaaaagtgaagaagacgaatctttctttctttttttttttaaaggggcaggatggggtatgctttgggctttctccttctgtgggccccggaggaagggagagattgagggcaagggcaaagttgatagttacattgaaagcagaaccggaaacacccaggaactgttcagaaatctcagaagaaatctgcttctcttccgatggaaacgatataattaacgatcaaagaagctctaagaaaattgcaaaagaagccttaatgttcaagctttagaaacgatcagagcaatttttctctttcaagtccaaactaagactctctggtatttaaatctctctggggcaagagggctagatttcctcattttgttatggangactagatttggtaccagtagatcagctgcctagcgaggggcagggtttccttccttgcatctgtgtggcttgcttccagtctggcctggtcctttccagctggccttttggtctagcctgctatggggggccagattatcttgataagagcaggtgatttgggggactagctggggttgggcaggaaaagagcagggatgggatctcttggggacaggttcccccagggagtattaaacacaagggagccagggatttgttgntgggcagcccaagggaaacagttagttgcctgttttggagtttggcagagagggccttggcacctcttgcatccaggcagtcttgtggagatggggggcacatagcactggggaaagcagaactccattctcacctctattttgagcttcagtgctttattttcagtatggaggaaaaacagcaaccaaactgaagttgcgcttttccgtccctttcaaaggacaactgtccgggaacgggagacgccgacgttgcgacggtacggaggggaagcacctggcacgggagacgacacttccttgactcctcctccttccctggtgtggctgggaatccagggaatgaaaaagaaatttgaccctggattggttctctccttggacttaagggaatcttaccttttcccttccacaaagttctcccagggcaaaggaccagctgcccatttctgagcccaggggcagccttcttcaaaccattattgggtctaaccctggcttgtcaagggaaacccaagcccacccttcccaaattgggccctggcttgcttctattcgtgtaccgaagtacttggagaaaaagcatcaagttcttagcccgttgtagcttctacccgtagtttcccatccgtctctcgtgtggaggccaaaccaacttcttttgccagcaggccccaacatgcattgacagcggcacagtgagatataactgatgggctttgaacctggttggccaggggaagctgtaggggtggatagagctggctttccttctgggctgtctccatctgaccctaccccttccatgtcccaccccactcccaccaaaaagtacaaaatcgaggatgtttttcactgtccattgctttgtgttttaataaacaatttgcagtgacaaaaaaaaaaaa

SEQ ID NO: 152849 - DNA, 453 bp, Homo sapiens
  misc_feature (1)...(453): n = a,t,c or g
cggaactcggaaaaagaagtagaaaaaagaaaagtagccttacaagaagccaaattaaaagcaaagggattgaatccggatggaactccagccctttcaaccctgggtggattttctccagcctccaagccatcatcaccaagagaagtaaaagctgaagagaaatcaccaatctccattaatgcgaagacagtcaaaaaagaacctgaggatagacaacaggcttcccaaaagcccttacaatggctataataataggcggagtcgatctggaacatacagctcgagatcaagaagcaggtcccgcagtcacagtgaaagccctcgaagacatcataatcatggntctcctcaccttaaggccaagcataccagagatgatttacaaagttcaaacagacatggtcataaaaggaaaaaatctcgttctcgatctcagagcaagtctcggga

SEQ ID NO: 152850 - DNA, 442 bp, Homo sapiens
  misc_feature (1)...(442): n = a,t,c or g
nttttgagaccactagancagcgggggaattacagtttcgagattgttgctatggcttgtattaatcttgcatcaaaaatcgaagaagcacctagaagaataagagatgtgattaatgtattccaccacctccgccagttaagaggaaaaagcgaccagctacatttaccaaagcctgggtgatgtggagtggtacatagagatgaagctgtcgtcatggcaacagactccaagccccctgatccttgatcagaactacattaacaccaaaaatcaagttatcaaagcagagaggagggtgctaaaggagttgggattttgtgttcatgtcaagcatcctcataagatcattgttatgtatttacaagtcttagaatgtgaacgtaatcaaaccctggttcaaactgcctgggtagtccatgatggaattacatgaatgacn

SEQ ID NO: 152851 - DNA, 437 bp, Homo sapiens
aacatttgcttaagatttaatatgttatatataggctggggcatacagcagtgaggggtggggagattttgaaaagttctggtttgtcatttatgtagctggtagttttgttttgaacctgttatgagcaaccaccggaataatctgttccccatataaactgaacctaaacttcaaatttttattatctaagctataataataggcggagtcgatctggaacatacagctcgagatcaagaagcaggtcccgcagtcacagtgaaagccctcgaagacatcataatcatggttctcctcaccttaaggccaagcataccagagatgatttaaaaagttcaaacagacatggtcatataaggaaaaaatctcggttctcgatctcagagcaagtctcgggatcactcagatgccggctagaaacacaggcttgaaag

SEQ ID NO: 152852 - DNA, 2432 bp, Homo sapiens
gctgtagtcccgcgccgtaattcccgggtcgacgatttcgtctgcgttgggcttgcgtgcggctcgctaagactatggcgtccgggcctcattcgacagctactgctgccgcagccgcctcatcggccgccccaagcgcgggcggctccagctccgggacgacgaccacgacgacgaccacgacgggagggatcctgatcggcgatcgcctgtactcggaagtttcacttaccatcgaccactctctgattccggaggagaggctctcgcccaccccatccatgcaggatgggctcgacctgcccagtgagacggacttacgcatcctgggctgcgagctcatccaggccgccggcattctcctccggctgccgcaggtggcgatggcaacggggcaggtgttgtttcatcgttttttctactccaaatctttcgtcaaacacaggtttcgaggattgttgctatggcttgtattaatcttgcatcaaaaatcgaagaagcacctagaagaataagagatgtgattaatgtattccaccacctccgccagttaagaggaaaaaggactccaagccccctgatccttgatcagaactacatcaacaccaaacatcaagttatcaaagcagagaggagggtgctaaaggagttgggattttgtgttcatgtcaagcatcctcataagatcattgttatgtatttacaagtcttagaatgtgaacgtaatcaaaccctggttcaaactgcctggaattacatgaatgacagtcttcgaaccaatgtgtttgttcgatttcaaccagagactatagcatgtgcttgcatctacctttgcagctagagcacttcagattccgttgccaactcgtccccattggtttcttctttttggtactacagaagagggaaatccaggaaatctgcatagaaacacttaggctttataccagaaaaaagccaaacctatgaattacctggaaaaagaagtagaaaaaagaaaagtagccttacaagaagccaaattaaaagcaaagggattgaatccggatggaactccagccctttcaaccctggggtgggattttctccagcctccaagccattcattcaccaagagaacgtaaaagctggaaggaggaaatcaccaatcttccatttaatgtggaaggacagttcaaaaaaggaacctggagggtaggacaacaggctttcccaaaagccctttacaatggtgttaaggaaaaggacagccaaggagaagtagaaatagcagaagtgcaagtccgatcgaggtcaagaacacgatcacgttctagatcacatactccaagaagacactataataataggcggagttcgatctgggaacatacagctcgagtccaagaagcaggtccccccagtcacagtgaaagccctcgaagacatcataatcatgggttctcctcaccttaaggccaagcataccagagatgatttaaaaagttcaaacagacatggtcataaaaggaaaaaatctcgttctcgatctcagagcaagtctcgggatcactcagatgcagccaagaaacacagggcatgaaaggggacatcataggggacagggcgtgaacgatcttcgctcctttgaggaggtcccataaaaggcaaggcaccatgggtggccagttcgttcagggacatgggccagggcacagggcgctgacctttcctcttccctttggagccctgccatccagttcttgggttttggccctatctaccagtgtgatggtatgggcctcaatccaaaaaccattaaacgcaaaactggattaggatttgatttcttggaaacccctcctaggtcctcctagaacacctgagggaccagtttcctttgaaaaaagaacctatgttaatttttttgccaccattaaaatgcccctagcagtatcctaattaaaaaccctggtccaggttccaattgtacctttattatagttgtgtattgtttattgcctataagaactggagccgtgaattctgtaaaaatgtatcttatttttatacagttaaaatttgcagacactgttctatttaagtggttattttgtttaaatgattggtgaatactttcttaaccactggtttgtctgcatgtgtaaagatttttacacgggaattaaaatacaaatcttgttttttctaaactgcttcaaataccttatttaaataaattattaaaaaggaaaattttaatagcaaaatggctgtactggttttctgacaaacttattctttcctccattagatggtagtttgagattattaaaatgcaattcttaactgcattgtgagctattgtaagtcttcactgtatatatggaaaaagtaaatgggagtcgcccaacaatgtgacattaaatgttatattttagcactaaaaaaaa

SEQ ID NO: 152853 - DNA, 1569 bp, Homo sapiens
atgctctacgagaagttcagcccggccgggcccatcctctccatccgggtctgcagggacatgatcacccgccgctccttgggctacgcgtatgtgaacttccagcagccggcggacgcggagcgtgctttggacaccatgaattttgatgttataaagggcaagccagtacgcatcatgtggtctcagcgtgatccatcacttcgcaaaagtggagtaggcaacatattcattaaaaatctggacaaatccattgataataaagcactgtatgatacattttctgcttttggtaacatcctttcatgtaaggtggtttgtgatgaaaatggttccaagggctatggatttgtacactttgagacgcaggaagcagctgaaagagctattgaaaaaatgaatggaatgctcctaaatgatcgcaaagtatttgttggacgatttaagtctcgtaaagaacgagaagctgaacttggagctagggcaaaagaattcaccaatgtttacatcaagaattttggagaagacatggatgatgagcgccttaaggatctctttggcaagtttgggcctgccttaagtgtgaaagtaatgactgatgaaagtggaaaatccaaaggatttggatttgtaagctttgaaaggcatgaagatgcacagaaagctgtggatgagatgaacggaaaggagctcaatggaaaacaaatttatgttggtcgagctcagaaaaaggtggaacggcagacggaacttaagcgcaaatttgaacagatgaaacaagataggatcaccagataccagggtgttaatctttatgtgaaaaatcttgatgatggtattgatgatgaacgtctccggaaagagttttctccatttggtacaatcactagtgcaaaggttatgatggagggtggtcgcagcaaagggtttggttttgtatgtttctcctccccagaagaagccactaaagcagttacagaaatgaacggtagaattgtggccacaaagccattgtatgtagctttagctcagcgcaaagaagagcgccaggctcacctcactaaccagtatatgcagagaatggcaagtgtacgagctgttcccaaccctgtaatcaacccctaccagccagcacctccttcaggttacttcatcgcagctatcccacagactcagaaccgtgctgcatactatcctcctagccaaattgctcaactaagaccaagtcctcgctggactgctcagggtgccagacctcatcctgctgttcatgtacaaggtcaggaacctttgactgcttccatgttggcatctgcccctcctcaagagcaaaagcaaatgttgggtgaacggctgtttcctcttattcaagccatgcaccctactcttgctggtaaaatcactggcatgttgttggagattgataattcagaacttcttcatatgctcgagtctccagagtcactccgttctaaggttgatgaagctgtagctgtactacaagcccaccaagctaaagaggctgcccagaaagcagttaacagtgccaccggtgttccaactgtttaa

SEQ ID NO: 152854 - DNA, 913 bp, Homo sapiens
ccatattttagtttttcgatgtttagatatttttctttggtgaagcacaagtttcttttcggggtctctgatcaattataaacagaaggaacaccaatggcactgttaactgctttctgggtagcctctttagcttggtgggcttgtaatatagctagctacatgaaccgtagaacagagtgactctggactctcgagcatatgaacatttgcttttgctcttgaggggcagatgccaacatggaagcagacaaaggttcctgaccttgtacatgaacagcaggctgttgcattgtaacttgtggctgtgcattaagatgttgctgaggattgcgaactcccgcagcatatttatactgtggaacggtgcggacagcaggagtagctgcagccagcagataccagggtgataatatttacgtgaaaaatcttgatgatagtattgatgatgaacgtctccagaaagagttttctccatttggtacaatctgaagtgcaaagggtatgatggagggtggtcacagcaaaagggtttgggtttcgtattgtttctcctcccccgaagaagccagtaaagcaggtacagaattgaacggtagaactgtggccacaaaaccatcgtatgtagctttagctcagccgaaagaagagtgccaggctcacttgagtaaccagcatatgcagagaatggcaagtgtacgagctgtgcccaaccatgtaatgaacccctacaagccagcacctccttcaggttacttgatgacaggtattccagagactcagaaccgtcctccaagaccgggcgcggtgggtcacccctgtaatcccagcactttgggaggccaagaggggaagaacacggggtcaggagatcgagaccatcctggctaacacggtgaaacccgtctctact

SEQ ID NO: 152855 - DNA, 2265 bp, Homo sapiens
atgaagcccaagacaagtgaggaggtgtgctcacctcttgtgtggcagtactccctcttcccatctcatactctgggcaatcctgttcatatccaagctctgactaccatgacgttttctaaatctctgtctccaacttcaaccattttcagggtccttggacagaactctgcaaaaacagctcctgtcaagggcatccatgaccatcatgctgtcaagggcaatggccttttctcagcaagctccagcggtgccggggtccagcgcgcaggacggttggggggtcccggagcgggcggccaggacccgcgcagccagttggtgtcagcgagcgccgcggccgttggggactccagctcccagcaggcaccgcttctgcggccgacgcgcgtggcggcggtgccggctgggactcgtagtgcggtccgggtcgcggcctgtggccctgcgggcagccgtgccgagatgaaccccagtgcccccagctaccccatggcctcgctctacgtgggggacctccaccccgacgtgaccgaggcgatgctctacgagaagttcagcccggccgggcccatcctctccatccgggtctgcagggacatgatcacccgccgctccttgggctacgcgtatgtgaacttccagcagccggcggacgcggagcgtgctttggacaccatgaattttgatgttataaagggcaagccagtacgcatcatgtggtctcagcgtgatccatcacttcgcaaaagtggagtaggcaacatattcattaaaaatctggacaaatccattgataataaagcactgtatgatacattttctgcttttggtaacatcctttcatgtaaggtggtttgtgatgaaaatggttccaagggctatggatttgtacactttgagacgcaggaagcagctgaaagagctattgaaaaaatgaatggaatgctcctaaatgatcgcaaagtatttgttggacgatttaagtctcgtaaagaacgagaagctgaacttggagctagggcaaaagaattcaccaatgtttacatcaagaattttggagaagacatggatgatgagcgccttaaggatctctttggcaagtttgggcctgccttaagtgtgaaagtaatgactgatgaaagtggaaaatccaaaggatttggatttgtaagctttgaaaggcatgaagatgcacagaaagctgtggatgagatgaacggaaaggagctcaatggaaaacaaatttatgttggtcgagctcagaaaaaggtggaacggcagacggaacttaagcgcaaatttgaacagatgaaacaagataggatcaccagataccagggtgttaatctttatgtgaaaaatcttgatgatggtattgatgatgaacgtctccggaaagagttttctccatttggtacaatcactagtgcaaaggttatgatggagggtggtcgcagcaaagggtttggttttgtatgtttctcctccccagaagaagccactaaagcagttacagaaatgaacggtagaattgtggccacaaagccattgtatgtagctttagctcagcgcaaagaagagcgccaggctcacctcactaaccagtatatgcagagaatggcaagtgtacgagctgttcccaaccctgtaatcaacccctaccagccagcacctccttcaggttacttcatggcagctatcccacagactcagaaccgtgctgcatactatcctcctagccaaattgctcaactaagaccaagtcctcgctggactgctcagggtgccagacctcatcctaacacatcaacacagacaatgggtccacgtcctgcagctgcagccgctgcagctactcctgctgtccgcaccgttccacagtataaatatgctgcaggagttcgcaatcctcagcaacatcttaatgcacagccacaagttacaatgcaacagcctgctgttcatgtacaaggtcaggaacctttgactgcttccatgttggcatctgcccctcctcaagagcaaaagcaaatgttgggtgaacggctgtttcctcttattcaagccatgcaccctactcttgctggtaaaatcactggcatgttgttggagattgataattcagaacttcttcatatgctcgagtctccagagtcactccgttctaaggttgatgaagctgtagctgtactacaagcccaccaagctaaagaggctgcccagaaagcagttaacagtgccaccggtgttccaactgtttaa

SEQ ID NO: 152856 - DNA, 2873 bp, Homo sapiens
ccccttctccccggcggttagtgctgagagtgcggagtgtgtgctccgggctcggaacacacatttattattaaaaaatccaaaaaaaatctaaaaaaatcttttaaaaaaccccaaaaaaatttacaaaaaatccgcgtctcccccgccggagacttttattttttttcttcctcttttataaaataacccggtgaagcagccgagaccgacccgcccgcccgcggccccgcagcagctccaagaaggaaccaagagaccgaggccttcccgctgcccggacccgacaccgccaccctcgctccccgccggcagccggcagccagcggcagtggatcgaccccgttctgcggccgttgagtagttttcaattccggttgatttttgtccctctgcgcttgctccccgctcccctccccccggctccggcccccagccccggcactcgctctcctcctctcacggaaaggtcgcggcctgtggccctgcgggcagccgtgccgagatgaaccccagtgcccccagctaccccatggcctcgctctacgtgggggacctccaccccgacgtgaccgaggcgatgctctacgagaagttcagcccggccgggcccatcctctccatccgggtctgcagggacatgatcacccgccgctccttgggctacgcgtatgtgaacttccagcagccggcggacgcggagcgtgctttggacaccatgaattttgatgttataaagggcaagccagtacgcatcatgtggtctcagcgtgatccatcacttcgcaaaagtggagtaggcaacatattcattaaaaatctggacaaatccattgataataaagcactgtatgatacattttctgcttttggtaacatcctttcatgtaaggtggtttgtgatgaaaatggttccaagggctatggatttgtacactttgagacgcaggaagcagctgaaagagctattgaaaaaatgaatggaatgctcctaaatgatcgcaaagtatttgttggacgatttaagtctcgtaaagaacgagaagctgaacttggagctagggcaaaagaattcaccaatgtttacatcaagaattttggagaagacatggatgatgagcgccttaaggatctctttggcaagtttgggcctgccttaagtgtgaaagtaatgactgatgaaagtggaaaatccaaaggatttggatttgtaagctttgaaaggcatgaagatgcacagaaagctgtggatgagatgaacggaaaggagctcaatggaaaacaaatttatgttggtcgagctcagaaaaaggtggaacggcagacggaacttaagcgcaaatttgaacagatgaaacaagataggatcaccagataccagggtgttaatctttatgtgaaaaatcttgatgatggtattgatgatgaacgtctccggaaagagttttctccatttggtacaatcactagtgcaaaggttatgatggagggtggtcgcagcaaagggtttggttttgtatgtttctcctccccagaagaagccactaaagcagttacagaaatgaacggtagaattgtggccacaaagccattgtatgtagctttagctcagcgcaaagaagagcgccaggctcacctcactaaccagtatatgcagagaatggcaagtgtacgagctgttcccaaccctgtaatcaacccctaccagccagcacctccttcaggttacttcatggcagctatcccacaagattaagaccggtgctgcatactatcctcctagccaaattgctcaaactaagaccaagtcctcgctggactgctcagggtgccaggacttcatccattccaaaatatgcccggtgctatccgcccagctgctcctagaccaccatttagtactatggagaccagcttcttcacaggttccacgagtcatgtcaacacagcgtgttgctaacacatcaacacagacaatgggtccacgtcctgcagctgcagccgctgcagctactcctgctgtccgcaccgttccacagtataaatatgctgcaggagttcgcaatcctcagcaacatcttaatgcacagccacaagttacaatgcaacagcctgctgttcatgtacaaggtcaggaacctttgactgcttccatgttggcatctgcccctcctcaagagcaaaagcaaatgttgggtgaacggctgtttcctcttattcaagccatgcaccctactcttgctggtaaaatcactggcatgttgttggagattgataattcagaacttcttcatatgctcgagtctccagagtcactccgttctaaggttgatgaagctgtagctgtactacaagcccaccaagctaaagaggctgcccagaaagcagttaacagtgccaccggtgttccaactgtttaaaattgatcagggaccatggaaaaggaaacttgtggctttcaaccggaaggaaaatatctaaacatcggaaaaacttaaatattatgggaaaaaaaacattgcaaaatataaaataaataaaaaaaggaaaggaaactttgaaccttatgtaccgagcaaatgccaggtctagcaaacataatgctagtcctagattacttattgatttaaaaacaaaaaaacacaaaaaaatagtaaaatataaaaacaaattaatgttttatagaccctgggaaaaagaattttcagcaaagtacaaaaatttaaagcattcctttctttaattttgtaattctttactgtggaatagctcagaatgtcagttctgttttaagtaacagaattgataactgagcaaggaaacgtaatttggattataaaattcttgctttaataaaaattccttaaacagtg

SEQ ID NO: 152857 - DNA, 237 bp, Homo sapiens
tgccaccatggcaactgcaccatacaactactcttacatctttaaatatattattattgttatggctgattgtcctcacacaattggtgttgaatttggtacaagaataatcgaagttagtggccaaaaaataaaactgcagatttgggatacggcaggacaggagcgatttagggctgttacacggagctactacagaggagctgcgggagctcttatggtctatgatatcactag

SEQ ID NO: 152858 - DNA, 1657 bp, Homo sapiens
gcgagggtgacaggaaaccctgtgcagggagcgccgccatcttggaccagcccgaggaagatactgagggagcacaggagcagtcaccgctgccactgctactgccgctactgctgccggcgcgtctgcacctctcggcctgccagtgtacctgccggcgcctcggtcgaccgcccccgccccctctcccgctgcgtccgcactcctgttcctggtcctgacgcccccctcccgcccggaaaggctgcccagccaccagcaaccccccagtgccaccatggcaactgcaccatacaactactcttacatctttaaatatattattattggggacatggggagtaggaaaatcttgctttgcttcatcaatttacagaaaaaaaatttatgggctgatttgttcctcacacaattgggtgttggaatttgggtacaagaattaatcgaaagtttagtgggccaaaaaataaaactggcagatttggggattacggcagggacagggagcgattaagggctgtttacacggagcgtactacagaggagctgcgggagctcttatggtctatgatatcactagaagaagtacatataacccacttaagcagctggttgaccagatgccaaggaatctcacccaatcccaaatactggtaataattctccataggaaattaaagccagatttggaggccacagagagatgttacatatgaagaaagccaaacagtttgctgaagaaaatggcttattgttcctcgaagcgagtgcaaaaacggggaggagaattgtagaagatgcctttcccttgagggcctgcccaaggaaaatctatcagaacattcaggatgggaagcttggatcttgaatgcttgcttgagtcttggtgttaccaccaccaaacctttccagccccgcagggggggcccggctttaacccagttgaacccccaccccagagaagaaggctgtggctgctaagtgacctctttgctgtgggccctcatttgacctttcacctctgtctgttggaagcagtactttttactgcctcattgtcttctgtacgatcttactgggtttaattaaaaaaaaagaaaaaacttctgttgttaaaaacagttttaacacaatactaaactgctaaacaactagatgtaatcaggttatcaaaggcaagtagagtaataaatctctcctgcatggtaaatctagacttttttttccccccttgtccctcgtggataagtatgtcaccaatatatgatttaaaccgagcactgatgctggacttcatgatttttaccctcccttttggcaaggctttgtctcacttgtacggtttaatttgggtgatatcttaagcctttcttcccatccttaactgttcaagtatgtctgttgtaaccaataagtttattgctgtggaaattacttctgatgggtagaggaagggggttctataactgctttttgttttgttttgggataaatttcctgttgtgtggggtgggcatttttccttaacgagatttgcttctgtcttaggcctcacacaggggaaaatatccatttatcttctctctcgtgcttaattaatagctttatctttttttataccattttatccttttctctttaacagaaagtaaatatg

SEQ ID NO: 152859 - DNA, 595 bp, Homo sapiens
ttatcctgacgacgtttcagttttagctatggctctctctaaagctgctagttttgtatgggtagctccttccttagaaggaaaatctgcagtatcttttttaagttctgcgtcagaagacggcctggacggagggtggggtgactgatgagttggagctttgctgccacctggtgtccgaccgaggaggatgacgcagttccctagataaagacttgcaagctctagagcctcatctgctttgccgtgggcgtgggtgattgtgcagagttctgggtcacgcgcttggctccacgggcagaaaaacggaggctggcgcctgccgtcccaccccatcaccaggacgaaaggggtgggaccagcactccccatttccacaacctttcccatggcttttgggtgacttttcctgcgctcctcccccaatacgatattctccccctgaattctttcttgcacgagatccaagaaccctctcttggggtctggattgggacccttttcctgtaacacatatttgatatctttctcaagtacctgccatttggctccagttattaatttatgggctttgccaggtgcaagtatcatgtga

SEQ ID NO: 152860 - DNA, 1464 bp, Homo sapiens
tcattctttcccatgttcctctttccagacatcagaccagtctgaggtctgctctgagcaagggatgcattcaatggttcctgtttcgtgctcagggctgaaggcccggggctcgtcctccactcttacggggtgcagaggtaagttccccttggcagccagctcagccaggtgccgtcgcttggtgtagaagtcgtcattgaccttgtcagcttcatattcccggatcagtttcttacctctttctcttggcgcaagtctgccagatgcttccaatgagtaattgtatcttaaccttctttgaagacgattgttggatatacgaggctccttctctgtcttaggaaggagagcacaggacaccatcaatttgtcgtttgtggaccaagggtagttccacatggctggagaggcctcagaatcatggtggaaggcaaagaaggagcaaaaaggtatgtcttccatggcagcaggcaagagagcacgtgcagggataactgcccacgttaatgctgacgtctcgttatcgttagcgcttaaacgtttgccaattggtgaaccgccgactgtgggcgccctagcgctacatatgaccgtgtgcactggttctgccgctgcgcccatatgccaccaaatgaggaatgttgccctggctgctgttaggccatctgcaaagtcgtgcgtttgctgttgctctggaccacatcctgttttaagtactttccatgtatgaattccttcaatcctcacgaaaatcttcgaaaatgggtattttgtgatctctgttttactgatgagaaacatcttgtcctcatctgcattgttatagttggttgctgtcactgtgtaattctggcctgtggccatgaccttatttggaccaagcagcatctttgacagcatgttattaaggtaaagattatgagatgaggttatcctggataagggtgagtcctcaaaccaatgacaagtgtcccagaccaaggaagattttgcacactcaatttcaaatttccaggagaaagaatctgattggtgctccttgtaccaggtgatgctctctggcccaatcaggaatggcatgaagtggggctttttagtataaaaatgacccctgaggtccatttccatgtttgaggagcagttcttagaaaactgggggatggggaaacacccaaaagcctctagtacattttctctgcccaggtgagaagtagtagcctgctccaccttgcctgcatcaaagtcaagtgttggagaaacatcaggagttggcatgtgactctcaggtgggcataactggctcagaccctcattcagttcctttccttttccaacaaaaatgctcagaaggaagccgtgtgcgtgcttgcttggtatgcgcatcacgtaggcttcgtggggctcgagggtagagataacggtgtcgctgtctattgcccgttcagactctctcacgcccat

SEQ ID NO: 152861 - DNA, 1734 bp, Homo sapiens
  misc_feature (1)...(1734): n = a,t,c or g
tttttttttttttttttaatgaggcggagtctcgctctgttgaccaggctggagtgcaatggcacgatcccggctcaccgcaacaagagcgaaactctgtcttaaataaataaataaataaacaaacaaacaaacaaacaaactatcacagcataaagtaggaggaatatttcgttactgtctatttaaactggttaatgcagaaaggaagtctggaaattccagttttaaagtaaaattttggacattgtaggattgattatttggcatagttgtgatgtttgttcctgcattatggttttgttggcagggcagcctttaaggacctgtatattttcttctagactctatatattccctgtgagtattagttgtatggtcaaactggcaaattttaccataggtataaataatagagaatgtggaagaatagtgaatagtgtcagagatagttaaaagtccatacaatagtagagaaggtaataagtaatagtggcttggactaaatatttgttgaataaatgttttaaaaaacaggctacctacaatttgtgttgaagatatgaatgaatgaagtttccacaccttttatgtgggagacctggataagtaaggcaacaatangggaagggtccccagggttggggaggagccccaagttgaggaaccaataatggaaccaattattgtatgaacaattgttaggagacagctaatcacaaacaacctgcgggcacaatgacctcattccacacggtaggcacccttcagcaggaccctataaaactctcctccagcccttgcctctttgcaaggtagccccttctgtgctgagctgcccattgcaacatatttttataatttctctaataaatctgcccttctttaccctaacaactaatcttggtaaatggctttaccacctgcaaaaactgaccctaggttgttgctacccgatatggtttggctgcgtccccacccaaatttcatcttgaattgtagttcccataatccccatgtgtcgtgggagggacccggtaggaggtaatcgaatcatgggggcaggtttttcccatactgttctcgtgatagtgaatacatctcactaaatctgatggttttataaagggcagtttcccctgcacgtgctctcttgcctgctgccagggaagacatacctttttgctccttcctttgccttcccaccatgattctgaggcctctcccagccttgtggaactgtgagtacattaaacctctttttctttataaattacccagtttcccagtatttcttcatagcagtatgaaaagtaactaatacactacccgagacatcttaggagatttgtaatagctgtaatgccaggtccaccatatttttagcataaagcaaatgtttacgcgtgatatgactgcacgggctttctttcagctggagccatagcaactcaagtagtaaccctatcttagtctgattaaaagtaaatattagtctgggcatggtgggacatgcctgtaatcccagtactttgggatcacaggagtgagccacggtgcccctcatcctttactttcttaataaacttgctttcacttcacactgtggcatcaccctgaattctttcttgcacaagatccaagaaccctctcttggggtctagattgggacccctttcctgtaactatcatgctactgcactccagcctgggcaacagagcaaggccctgtct

SEQ ID NO: 152862 - DNA, 508 bp, Homo sapiens
cccgaaagctgagggacggaggtcagtgactctggggtctcgggaacccggagacgaaggaagacaccgtgttccttaagagggagtatacgtttcctcgccatttatccaatggagtttcctcttacctacttaacaggaacagggaaagggtgtcccccaacgaaaagcacttggttctgcttcgagatggaaggacacttataggctttttaagaagcattgatcaatttgcaaacttagtgctacatcagactgtggagcgtattcatgtgggcaaaaaatacggtgatattcctcgagggatttttgtggtcagaggagaaaatgtggtcctactaggagaaatagacttggaaaaggagagtgacacacccctccagcaagtatccattgaagaaattctagaagaacaaagggtggaacagcagaccaagctggaagcagagaagttgaaagtgcaggccctgaaggaccgaggtctttccattcctcgagcagatactct

SEQ ID NO: 152863 - DNA, 1186 bp, Homo sapiens
aaccccgaaagctgagggacggttgttagtgactctggggtctcgggaacccggagacgaaggaagacaccgtgttccttaagagggagtatacgtttcctcgccatttatccaatggaggttcctcttacctacttaacaggaacagggaaagggtgtcccccaacggtacggctgccccgcctcttcctgggggcccacacgtgttacaggaagtgggtaagggtaatatggaggagcttccggcaggccccgccggcggctgaaagccggcgcagaagtgctggtctcggtcgggattccgggcttggtcccaccgaggcggcgactgcggtaggagggaagaggttttggacgcgctggcctcccgccgctgtgcattgcagcattatttcagttcaaaatgaactatatgcctggcaccgccaaccctcatcgaggacatttgacaaaaaagcacttggttctgcttcgagatggaaggacacatataggctttttaaagaagcattgatcaatttgcaaacttagtgctacatcagactgtggaaccgtattcatgttgggcaaaaaatacgggtgatattcctcgagggatttttgtggtcagaaggagaaaatgtgggtcctactaggagcaaatagacttggaaaaggagagtgacacaccccctccagcaagtatcccattgaagaaaattcctagaagaacaaaaagggtggaaccagccagaccaagctgggaagcagagaagttgaaagtgcagggccctgaaggaccgaggtctttccattcctcgagcagatacttttgataaggacctattcttttgcccagaggctgttggctcttgaagagtaggggctgtcactgagtgaaagtaacattcttggccccctcacgcatttgatccacagactgtagagtttcggaaaagtcacttttattttttaattattttacatatgcaacattgaagaaatccgtgtaggtgggttttttttttaaataacaaaatcactgttttaaagaaacagttggcatagactccttcacacaatcactggtggcaccagcaactacttctttatattgttcttcatatcccaaattagagtttacagggacagtcttcatttacttgtaaataaaatatgaatctccaaagtaaaaaaaaaaaaaaaa

SEQ ID NO: 152864 - DNA, 1079 bp, Homo sapiens
gaacacgtagagacaaacggtgcactggtgcctcccctctaaccgccaatcagaaaccggacctcacagctgactgggaactggacatgcggaggagctgctggctgcttctgggaacaggcggaggattagggtcagggtggagaggaagaccaatcagtgggcacaatacaggcaaatgggcaaggcctgcctcggggaactataaccttccaggatctggagcccgggagagccacactgtgggcttaatgcgaatcgaggaacaagtgggtatctctgccaggcaccccactttctcctactaacatgggctcaggggactcagccctggacagagagcctccatagagtgaacagtcttccagatctgggccaatcatcctggacagaggcccgcgaggcagctttgccctgtccacctgttgggtgggcagagccaccaggaacccagacaccacctccaactctgagccttccagagcttcagcctctcttcgtcgtcttaccccactgaaaccaacagggatcgggccaggctcccagattcttgaggacagggactttcgggcatttacttaatggggggactacttttggggtaagggggcgcctgcttgcctgatacaggatggggtcaagggacagtgggcaggtcctcactcaggagtggggggtgtaggctggccagcccccagggcttgtccaccagtcttctccccgcaaggccctcagagcagcgcctgtgggtgtcagtattacctgagccctaggcccaaagcctacccccaaggctggggaaggggaggagaccccccaggtcagaatgtgaggtcctcagtctgtgatttaaggtgttgcatgtggactcttaactgtacgtgtagtttctagtggagaaatcaaggctctgatcattttgtttttagtatgaaaatgtgatttcctttctgtttgtaactcatcatagaaacattgtggtgggaggagaggggatagtctacagctaatgagggaaacaccaaagatcacatcattaaaatgatgacatgcccctcaaaaaaaaaaaaaaaaagggc

SEQ ID NO: 152865 - DNA, 566 bp, Homo sapiens
aattgccccagcgagttggattactagcacacacacggtgagtgcaatcgagggggcttttgtgcatgtgttcttattggcagttacaagcgtgtcattttcagggggtgggttttaaatcagtctgctgcgtcagaatcccgtacgcctgaaggatttaagttgcatgtgcacctgaaactcgtatatgagtattttctgtctgtgcttttagagaggaggaattctgtaacgacttttgtttctggttaggaagagaatgatctctttcagtgcaccgccacttatgttacctttttccttttatttctttgtgtgtccagctgcaagaacagcaaggaaaaggaagccctctccagaaccagaaggtgaagtcgggccccctaagatcaacggagaggcccagccgtggctgtccacatccacagaggggctcaagatccccatgactcctacatcctcttttgtgtctccgccaccacccactgcctgacctcattccaaccggaccacaccgcctgaagcggcccagaatggccagtcccccatggcagccctgatcttag

SEQ ID NO: 152866 - DNA, 702 bp, Homo sapiens
  misc_feature (1)...(702): n = a,t,c or g
catccattagccgcggtgtccggaaccgcgctgccagccntgggctccgcgcagcccactgatctgggcgcccacaagcggccggcatccgtgtcgagcagcgctgccgtggagcacgagcagcgtgaggtggcagccaagcgagaaacaaccgccgccgcctgcgcaccggggcccggccgacagcctgtccaccgcggccggggccgccgagctgagcgcggaaggtgcgggcaagagccgcgggtctggagagcaggactgggtcaacaggcccaagaccgtgcgcgacacgctgctggcgctgcaccagcacggccactcggggcccttcgagagcaagttttaagaaggagccggccttgactgcagttgcaagaacagcaaggaaaaggaagccctctccagaaccagaaggtgaagttcgggcccccttaagatcaacggagaaggcccagccgtggctgtccacattccacagaggggctcaagatccccatgactcctacatcctcttttgtgtctccgccaccacccactgcctcacctcattccaacccgggaccacaccgccttgaaagcggcccaagaatgggccagttccccattggcagccctgatcttagtagcagacaattcagggggcagtcatgctcaaaagatgccaaccaggttcactccactaccaggaggaatagcaac

SEQ ID NO: 152867 - DNA, 1853 bp, Homo sapiens
tccgcgcttcccaccgatctgggcgcccacaagcggccggcatccgtgtcgagcagcgctgccgtggagcacgagcagcgtgaggcggcagccaaggagaaacaaccgccgccgcctgcgcaccggggcccggccgacagcctgtccaccgctgccggggccgccgagctgagcgctggaaggtgcgggcaagagccgcgggttctggagagcaggactgggtcaacaggcccaagaccgtgcgcgacacgctgctgggcgctgcaccagcacggccacttcggggcctttcgagagcaagtttaagaaggagccggccttgactgcaggcaggttgtttggggttttcgagggccaacggggccaaccgggtcttaaagcagtttgcaagaacagcaagggaaaaggaagccctcttccagaaccaagaaaggtgaagtcgggcccccttaagattcaacggagagggcccagccgtcggctgttccacatccacagaggggctcaagatccccatgactcctacatcctcttttgtgtctccgccaccacccactgcctcacctcattccaaccggaccacaccgcctgaagcggcccagaatggccagtcccccatggcagccctgatcttagtagcagacaatgcagggggccagtcatgcctcaaaagatgccaacccaggtttcacttccaactaccaggaaggaatagccaacagtcggcccttcttccgtcctcttatgaaccaaagaaaggctgggccccaagagaggtggggggccaagggagcaggcaacacaggaggactgggagccagtgcaccctgccagcctcccggacttcctctttgggcaaccagttgccccgctgtgctgcaccctctgccacgagcggctggaggacacccattttgtgcagtggcccgtccgtcccttcggcacaagttctgcttccccttgctccagccaaggcatcaaacagcagggaagctagtggagaggtctatttgtcccagtggcggacaaatgcccctcttgtgggctcccaatgtccccctgggccctttatgcaaggggaaattgcaaccatcccttgctggagatgtgaaagtgaaaaaagagagagactcgtgacttttcccggtttccaggaaaaaacccccaaatgattacccctttaatttaaaaactgccttggaattggtatatatatcccccatatatatatatatcccaggacaaggggaaaatgtagaccttccataaaacatggctggtataaatttggattgattttggaatacatacgagtgtgtttctatatttttttttgaccgacaaaagggtatgtacttataaagacatttttttcttttgttaacgttattagcatatctttgtgctttattatcctgggtgacagttaccgttcctatgtaggctgtgacttgctgctgcttttttagagcacttgggcaaatcaggaaatgcttctaggctggtatttgtatgccacttattttaaaaagaaaaaaaaagccaaatacattttctgacattgtaagattgccttactgtctgtcattccttattgctggcccctttgtcaggccggaggccaagtggtggagaaggaaaggaaatgatcgaacgggcgtgttgtcaagtgggcatgccactggggaaataccaccagtttaccctggaaacatttgtcctcaggagggagtagggaaagtgggatttttgaattcttctattttgctcaaaagttcagttcctgagatactggatgactgagagtgctgctgggaaattttcaggattgtgtggtcttttggggttttttg

SEQ ID NO: 152868 - DNA, 412 bp, Homo sapiens
  misc_feature (1)...(412): n = a,t,c or g
cccacgcgtccgaggacatcttatgaaaaacagggatatctgcttctaccacctgtattcagcattgtactagaggttcttgccagggcaattagtcaagaaactgaaataaaaagtgtccaaatgggaaaggaagaagtaaaactgtctttagtttgtgtgtgtgtatatttatgcatgagaaaatcctgtggaatccaccaaaannnnnnnnnnnnnnnnnnnnnnnnnnnnnnnnnnnnnnnnnnnnnnnnnnnnnnnnnnnnnnnnnnnnnnnnnnnnnnnnnnnnnnnnnnnnnnnnnnnnnnnnnnnnnnnnnnnnnnnnnnnnnnnnnnnnnnnnnnnnnnnnnnnnnnnnnnnnnnnnnnnnnnnnnnnnnnnnnnnnnnnnnnnnnnnnnnnnnnnnnnnnnn

SEQ ID NO: 152869 - DNA, 1203 bp, Homo sapiens
tcatcccagtctgcggacagacaccccggatcccggacagcccgtgcagccgttgtcgagggaatgtggccttgagtgcaggggcttctcggcgccaagaccggccttggacctcacagcgccctgcaaggcccctgccaccccctcctttggtccttgggctgtgctgccgtttctcctcggctggtcccagtgactggtggggctgtgggcgggcggcagggccaggccgttgagcaggggtgaggcgtagggccggcgcggcgagtggaagcaggggtactggtagaggccggtgcgtaaccagggtaggcacctagtagctggaggctgcaagtcgcatagtcgcctggatccacgcccactctcagccaatataaccttaatgctgccaattacacctgccaaggccccgcttccgaacacgctcacgtcccacaggcacactggggtgaggaccctaacagctctactgagatgtgattcacacagcacgccacccagccacggaagcacgcagctcgaggggcctttgccgtattcgcagggctgtgcgaacgtcttcactgtcgatttttgttgttgctcttccccaagccacacggtgtgagaacggcttctgcgcgtgtgcctggcattggggtcagcagggactgcagatgatgtaaagttacaccctgtttcatgtgcggacaccgcacgctccacaccagggacctcagcaccctccacatcagggacctcagcacccttcacaccagggacctcagcaccctccacaccagggacctcagcaccctccacaccggggacctcagcaccctccacaccggggacctcagcaccctccaagccggggacctcagcaccctccacaccggggacctcagcaccctccaagccggggacctcagcatcctccacacctgggacctcagcaccctccaagccggggacctcagcaccctccacaccagggacctcagcaccctccaagccggggacctcagcaccctccacacctgggacctcagcaccctccaagccggggacctcagcaccctccacgccggggacctcagcaccctccaagccggggacctcagcaccctccaagccggggacctcagcaccctccaagccggggacctcagcaccctccaagccggggacctcagcacccgcggaccctggtgtcctcat

SEQ ID NO: 152870 - DNA, 1523 bp, Homo sapiens
ccataaaaagcactttgtttaattttatcaaatcgatctgtacaaaagttagcgttgcttggtcagaaaggagtgaaggcagcaggggagtgagggtgcgtcctccgaacgcggtgccaagggagacgctgcatgaaacgggtctgcgacggctcccggcccccacccccacccccagagaaatagaagcagaggcattatctttttttttctacaaaaaagtaggaaaagtagaaaaagtacaaagaaggcaacttcttcggctgtgtttaagtttacaaagtttaaagggcacaagtttccgtgaagtagggcgctattgtatgctctatgtcttcagcacacggggggaaggcagtgcagggtgatttcaggtttgactcgtctagaactggaggccctaacgacgtttagtgggagaaggtttagtttcaaaagcttggtaaggttggcactggttccttgcgagccaaaaatcacttctgaagccaccactttccaggaatccctgtgtcctggtgtcctgccacatggcacagtcatgggcaaggacccaggaattcctgtgtcctatgtgtcctaccacgtggcacagtcggggacagggacggagtcctgcttcccaaaccccaactgagtactgggtgctggggcaccccaacctgatcagagatgtcacaaggcaggtcccttctcctccctcgggttttcggttgccaagctcgaggcatgaggggcccagtcctcccagggactttgggacctccgggccctccagggcggcctccccataagccgagcaacgagcaacgtgatgccggccaacagctgcaactcccacctcctgcctgccctcaagggaagcttccccagcttccgttttgtcttaaattctactctttgcccgaattacctcattaattaaagataaaataacacagaacataaatacatctttaacagctttcagaagaaacacatttaagctttaaaaaataaaaattatcaaaaacataaaaataaaagagaagatgtgttcatcaacagccagccctcgcgtgagcgcactctgccagcaaggagacacctcagatctgacaggcaggtcccggagatgctcgagtagactcatcccaggctgcggacagacaccccggatcccggacagcccgtgcagccgttgtcgagggaaggtggccttgagtgcaggggctctcggcgccaagaccggcctggacctcacagcgccctgcaaggcccctgccaccccctcctttggtccttgggctgtgctgccgtttctcctctaccgagatgcaaagcgaaggtgctggtgccgccagtcctcacagaagagggaccaaacggcagcccttctttgtggaataatcccaccacctcaaaaagaaagatagaagggagagggagctggtccgtcgtcggcagaggtgtggccatctggaggccgagggccacgggcagcaagcgtgtttccctgcagacttcagcaggcacttggagct

SEQ ID NO: 152871 - DNA, 374 bp, Homo sapiens
ctgcgcaaggatgacacgcaaattcgtgaagcgttccatatttttgtccagtcctggcgtcccgccctgcccagcctcccgtccctgcccctagcccgtgccctggcagagaccctgaaccagccctttggcagcggccttatcaccccctcggggatcctgctcaacagccagatgctggacttctcctggcccaaccggacagctaaccactctgcacccagcctgtggtccgacccgcggaggggctctgtggaacctacctcgctctgggggccaatggagctgcgcggggcctcagcggcctgacacaggttctgctgaatgtcctgaactagaaccggaacctgagtgacagcctggcccgcggccgc

SEQ ID NO: 152872 - DNA, 480 bp, Homo sapiens
gctgcccaggtgctgatcatgggacctgatgacttcattgtggccatggttagctccctgaaccagccctttggcagcggccttatcaccccctcggggatcctgctcaacagccagatgctggacttctcctggcccaaccggacagctaaccactctgcacccagcctggagaattcagtgcagccagggaagcggccactctctttcctgctgcccacagtggtccgacccgcggaggggctctgtggaacctacctcgctctgggggccaatggagctgcgcggggcctcagcggcctgacacagggctgttaggaggctcagatgacacccggtgtaagaattctcaagactaaggagcctggaccaagggtgagagctgaggaatcctggaccatcacccctgggacagccctgatttttctgtaccttggctaccacaggttctgctgaatgtcctgaccttgaaccggaacc

SEQ ID NO: 152873 - DNA, 2392 bp, Homo sapiens
ggaattctcgggtcgacgatttcgtggcgcgggcgaggatggcggcggagaacgaggccagccaggagagcgccctgggcgcctactcgccagtggactacatgagcatcaccagcttcccgcggctgcccgaggacgagccggcgcccgcggccccgctgaggggccgcaaggacgaggacgcctttctgggagaccccgacaccgacccggactccttcctgaagtctgcacggctgcagcggctgccatcgtcgtcgtcggagatgggcagccaagacgggtcgccgctacgcgagacgcgcaaagacccgttctccgccgcagcggccgagtgctcctgccgccaggatgggctcacggtcatcgtcacggcctgtctcaccttcgctaccggtgtcaccgtggcgttggtcatgcagatctacttcggggacccccagatcttccagcagggtgccgtggtgaccgatgctgcccgctgcacttcactgggcatcgaggtgctcagtaaacagggatcttctgtggacgcagcggtggcagcagccttgtgtttgggtatcgtggctccacacagttctggcctgggcggtgggggcgtgatgctggtacatgacatccgacgaaatgagagccacctaattgatttccgggagtccgcaccaggggccctcagggaagagaccctgcaaagatcctgggagaccaagcctgggctcttggtgggggttcccggaatggtgaaggggctacatgaagctcaccagctctatggcaggctgccatggtcccaagtcctggcctttgcagcagctgtggcccaagatggcttcaacgtgactcatgatctagcccgtgccctggctgaacagctgccacccaacatgtccgagcgcttccgggagacgttcctgccattcggcccgcccgccactacctggctcgttgctgcatcggcccgacctggctgaggtgctggatgtacttggcacctccggcccggctgccttctacgcaggtggcaacctcacactggagatggtggccgaggctcagcacgcagggggtgtcataaccgaagaggacttcagcaattacagcgcccttgtggagaagcctgtgtgtggcgtgtacagaggccacctggttcttagtcccccacctccgcacacgggccctgccctcatcagtgctctcaacatcctggagggcttcaatctcaccagcctggtatcccgagaacaggctcttcactgggtggcagagaccctgaagattgcattagccctggccagcagactgggagatcccgtctatgattctaccatcactgagagcatggatgacatgctcagcaaggtggaggccgcctacctccggggccatatcaatgactcccaggcagcccctgaccccactccggcctgtctatgaactagacggagctcccgcggctgcccaggtgctgttcatgggccctgatgacttcattgtgcccatggttagctccctgaaccagccctttggcagcggccttatcaccccctcggggatcctgctcaacagccagatgctggacttctcctggcccaaccggacagctaacctctctgcacccagcctggagaattcagtgcagccagggaagcggccactctctttcctgctgcccacagtggtccgacccgcggaggggctctgtggaacctacctcgctctgggggccaatggagctgcgcggggcctcagcggcctgacacaggtgaggtttacgccatggttggcctttttcagccgggagccaagctgtggcctagactgcagatgcctgtcatagcagtccaacctcctgcaggtggacagtgagtgcagagcagagacctcgtggggcgggcacagggacaggtagagaaaggactcctcccaagggtgcccatgggtccatggcagccgaaggaccaacaacttcatcatcgctgttaaggaccctcggagcccagatgcagctggagccaccatcctgtagagcagcggggtggggcggggtctctgctcccccactttgcatgttcccagagtccctccttctcccaggtttggtctcagggggaccccagggatgccccagatcaggggccagaggggatgcttagcatacccaatcccagagtaactggaaaattctccatcaggatgcctgaggtggtggcggagatgctactctatgcttgaatgtcctacatgacataagttctgccgacctttgagttccagtcattccaccttttattggagcgtagtagattgtagtcttactgggctgttgttctgagagttattagactgagtattatatttggtactgtttagttgatacgtgtctctcctg

SEQ ID NO: 152874 - DNA, 362 bp, Homo sapiens; identical to SEQ ID NO: 114642
  misc_feature (1)...(362): n = a,t,c or g

SEQ ID NO: 152875 - DNA, 1836 bp, Homo sapiens
atgggactggccatgtttgcagtgccccctggccataccacgccagctggtgccccccactcggccagcagcgcatccctgcactctgagcgccccctcagcagctcggcctgggctggcccgcgccctgaggggctgcaccagcgctcctgctccgtttccagcgccgaccagtggagtgaggccaccacttccctgcccccaggcatgcagcaccctgtcctcccagctgacatcaagcttagggagggtcaggattctgaacttgagcagaaaacagctgtttgtgctgctcaggcatccttggctggggaaaagggaaggctgggggtctctgcccctggggcctcccctctcatgctgtcggtagctgccaacgctgcgctgggctgggatggcgttggggtccctgacggctggggcagtgggtccccgccctcagccgtgtgcgtccagacccaggcaagggccagcaccagacggcaggctagcaccgtgacccggacgcactttgagatgcgccccccttggagccctccaggagctgagaatcagaagagatcctgtggggagagcagctggccggcggccccccagcagttcgcgctctccaactccgcggccatccgggccgagatccagcgcttcgagtccgtgcaccccaatatctacgccatctacgacctgatcgagcgcatcgaggatttggcgctgcagaaccagatccgggagcacgtcatctccatcgagtgggcgcgaaggtggtgtcgcctgggggggccgggaccagatctgtccaggcctggccggggacaggtgggcgcggcaaagtggctttcatgctggggaccttctggaattccctcgcagcagctggccggcggccccccagcagttcgcgctctccaactccgcggccatccgggcgagatccagcgcttcgagtccgtgcatcccaatatctactccatctacgacctgatcgagcgcatcgaggatttggcgctgcagaaccagatccgggagcacgtcaactccatcgagggtaagcggaccgggggctgcgggaacgggccgcagtggcctctccggcgccggccgagggctccacaggccgtgctggccatgctctccctgtcgggggtccttgcgcgcttgaggaccaggccacgaggtttgccgatctgtgttgcagaaccggcgggcagcttcgccatatctcgttcggggacactttggggttgggggtattatgctgactgtgttccagggcgcgaaggtggtgtcgcctgggggggccgggaccagatctgtccaggcctggccggggaagaggcagaggagtcgtttgaatttgtggtggtgtccctcactgggcagacgtggcacttcgaggcttcaacggcggaggagcgggactcgtgggttcagagtgtgcaggcccagatccttgccagcctgcaaggtgcctgcagtgccaaggacaaggtggttattagcgttggtgaagacggcttcttcctgtatgggatgcatgttccccccacaatggaagtaccagcagaggggcccttcccaggcagatctgatatcatcgcactgtggtggaattcgcacattgcccagggctcgtctgctacgcccattgccctggcgatctgcaaggagtccaggaaacaggacaaggagtccagaaaacaggacaaggagtccaggatggggacagggaggagttccggggagtggaaagagaaacggtgtggggagggtgaagaggatggccaggaatgccggtacctgctcctgacactggcgagacaattttcggaggcctga

SEQ ID NO: 152876 - DNA, 4164 bp, Homo sapiens
tcaggggctgttggtgtctgagccgggagggtcgaacgcccagggcactgcgccccgcaactgacgctcctgcaaggaaaagctctgggtgcgtatgcggcttgtcacctcctgggtgcgcagcgtgagcccgaaaatgtcttcgtggtagcgttgctgatcccgcagcacgccgatgacgtcgccggcctcgtccagctccatgtcgccctccgtcgccaggatgcgctgcacggtctgcaggacgttggttgccatggtaacatcgccgcagacaaacatgtggccccgctcgaggcacagcacgcggtgcacctccgcagccagctccgtcctcaggatgtcctgcacgtaggtcttggggttgtcaggttcccgggagaaggcggtgaggactcggccaaacaccccgcgctgctgggcgttctgcacctcgtcgcggtagagatggtcaagttgggagcatcggcagccgaacaccaaagtcatgggagtgggctgcagccctttgctctcaatgtcatgcagccgctcctgccagaatccccggaagggggcaatgccagtgcctggacccaccaggatgcagggcaagctgggatcgggtggcagccggaaggagggagccccccggatgaagcagggcacagggtctccgggcttgagctggcttagccacgtggagcagactccatagtgcagggggcccagcccatcctgagtcctgtatgccagcacagctacagtgaggtggatctctcctgggtgggtgctgggtgccgagctgactgagtagtaccggggctggagcagaggcagctgggtgaggagcagtggggcaggcagcgccaccgacgggaactgctccagcacctccagcagcgtggggcagcggaaccacttccactcctcgtagcgtcggggatcctggctgagggcctccagctcctgctgttccctgggctcttctgccaaggtgctgagcagccgcaagagctgagggctgggtggggaggtgatgtccaggaagaaggtgagagcctggcgcagcgtgcacgggggcagccgggggtcccgcacccagccggggggagggccaccagggctgcccttctccagctgctctactgccacgggctcagtgggcgccggcgggtcctccacgcggctcagcagcgcctccacaaggccgggccggttgggcgggcagacacctatgtggtcccccggctggtactgcagcccctcctggcctccggtgtccaggcgcaccaggatggtggccctcgtggacttgctgctttgcaggttttccactgagcggattgtagcctggaacatcttccgcctgtgcacgtggatcagacctggcagcaactgcaggccctcggcctgggcgctcagccggtacctctggcgcttccagctccgtttggggctgaagatgtctcgggcggcggccttggcatcctctcccacacagaaggtctcacaggcggcctggaaggcagcctgggcccagcctcggaaggcctcctcctggccgcacagctcgtcgccctggcccagctgcagcagccgctccccgcccagttcctccagccgtgtgtccacggcacgagcaaaggcgcagaagtgggggtatgcccgggagccgagcccgaacacacagaacctgagggtgcccagggcccctgcactgtctgtgttactggactccttcctcttccgccgccaagaggacaccagtgggtctgagcaggagatgctgttgaagcggatcttataactcttgtgctgttccggccgaggggagctgttgtaggggccggacatctccatcagggcagctgcaaagctctctccattctccgggggatccccattcccaaatgtgctggttaccaccagcaccagcgtctcgtgttcgagggacaccacgtcatactcatccatacacaggacccggggatcaaaagccttccggaagagtctccccagctgctgtgcgtagctctgggcccggccggtctcggagccatacaggattgtcgccttcactcgcttcgccatcaccgtgcccatgagcgaggcggagatcttcacggcgttggccacttctttaaaggtcttcttcctggtgatgccggtgcccttggcggcactccccttccaggggtctggctggtagcggaaggccggggacaggaaatagttgaccatctcctgatggaaaacaggagtgaggctgcccgagatggggggcacgatccaggcccagtctgcagggcagccccccctggccttctgctcattctccaggtgcttcatgaaagaggccgtggcggcgtggtggtccacgatggtgactttggctagctggtaactgtgcagcacggccacgttgatttccactgctgccttgtctttccacagggacgaggtggtccgggtatccaggtccatgcagacagccacatcctccaggatgttgtagcggtgagggtcacacaggttcctcgtgccgatctcagtgctcatgtaccagccactgaagggggctgcggggaactccaggcccccaatttccagcagcatgttggacactgccgggagggcgtaccagcgcaggcccagggctgcaaaccactccagcgtggggtgctccaggggcacctcaaggaccagctcggggggcagaaggaagagttctgggggatcatctggggcctgcagcagcaggggcagcacgtcgaagcgaccgtttcctggggtccagccgtgctgaatgcagagctcggtgatctccacgttggctgggtccccccgcacagagccatcctgctgccggtagcccgcgtagcgcaccagctggctgttccagattcggaagtctcctcggccagggcagcgctgcgggaacactgtgatggccgagcgaaggttgccccggttggtggcatacttgatgtggttgcagatgtaggtgaacatttcctgtgcagacctgcagtcccgggcatcgaacacctgcagcttcccccactggatccggcccacgcagcggggagcgttgcgccaggcctgcttagccccgaacaccagctcgctctccctaagctggtaggtgcctgtggctgccacctcggcttccacctcttgaagccgctgttcgtgggcctgggagccgctcctcttaatggagctgtagtactggttgatgaagtcccgggcctgactcagcagctgctcaggggccggggggccgggggagggccggccctgtagtttccgtggaaataccagggagcccaggcagcgtcttggggtgcagggcccatctgcccctcgtagcgggcaacccggccgccgtgtgatggatccaactccgcggccatccgggccgagatccagcgcttcgagtccgtgcatcccaatatctacgccatctacgacctgatcgagcgcatcgaggatttggcgctgcagaaccagatccgggagcacgtcatctccatcgagggtgagcggagccgggggctgcgggagccggggcgcagtggcctctccggcgccggccgagggctccacaggccgtgcctggccatgctctccctgtcgggggtccttgcgcgcttgaggaccaggccacgaggtttgccgatctgtgttgcagaaccggcgggcagcttcgccatatctcgttcggggacactttggggttgggggttttctgctgactgtgttccagggcgcgaaggtggtgtcgcttgggggggccgggaccagatctgtccaggcctggccggggaaggtgggcgcggcagagggcttcagggggatccgcggctcctcggtctggaggcagctgctgggcacgcgggtgctgaccgaccgccagggacaccgcacccggagtcgggaccggaaacccccggccactgcgctgcctagcgctattttctctgggcccttaggccctgactttcgaccgctgagggcacaggaagtggtggcacgctgctggcagatgcctcgcaagccctgcagtgagcgctccctgacagcttgggtttcctggctgagtcctggggttttagtgtttgtgtctgtttctgttcgtcctgtgacttgatcctggaggactggcatgatggtccccat

SEQ ID NO: 152877 - DNA, 975 bp, Homo sapiens
ctacgggcggtacatggcaaaggccaggagactgaggagcagggtgaagccggccaggcccagagtggcggtcaggggaaagaagggccggtactggatctggcagtaccagagcagcagcaacagcaggagcagcaggggcagcagcaggctgccgatttccagcccggaggggccgggctcggaccccggcgggcaggggggatttgggggaccgactctcgtggacacgtggcagtggagaacgcagttgggagggaggtgaaggctgcccagggtctgggtgtcgtcgcctagcagctgcccttggtagatgagtcgcacctgctgttcccggccgggaaactgggtccggccctggcctgggaggggccgtctgccaggggaacaagtacagttgtgatctggggcgctcagcgcctccagtataaaggagggctgggtcttaggtgtctctgggggccttctgcgaccactctcccaacccctgtctttagcattgctcctgcctcttgacctacttacctgctctgaatcattgaggaatttcagccgtagcacgaggggctcctgcggggagtccggggctggcggtgttgctgtgaaccccgtgctgggctctggctgtgcagcttgacctctgtgtctcaggctgggggtctctgcccctggggcctcccctctcatgctgtcggtagctgccatggctgcgctgggctgggatggcgttggggtccctgacggctggggcagtgggtccccgccctcagcggtgtgcgttgagacccaggcaagggccagcaccagaaggcaggcaagcaccgagaaaaggacggtcacctcatcacccaccccttcaatcagggtcatggcgcctgccttgcccgccgcgctaccgagcttcccgccccccgaagccgcagagggcacggcgatcccggcccgaccgggcccgcccggctcccccagctccat

SEQ ID NO: 152878 - DNA, 801 bp, Homo sapiens
gcggccgcttctcatctgagagcagtcccagggcccggcccgcctccggccccgcacagggggcatgtccagaggtgctgtgtgtcaccaactggtcttctaatttggaaggagttggaaaggcctttttgttgatgaaaagttggaaacagtggcacatatctgcaaatatcgaaagaataaagattttggcaagttatactcaagccccgcacaagtcggtcagcaccggtgagggcagagacccaggcgcctggggagcggcggcagcgggatgaagaggaggaggaggaggaggagaaggacgaggaagaggagaaggacaaggaggaggaggagaaggaggaggaccaggaggaggaggaggcggcggcggcggcgggcggcagcggcacctgctgggcagacacaggccaagcgtccacctcagcacggaatgggttcttgaaaggagtgggagaacccacagctgcttcttgccagcagtgggcaccaggcggtggccagcccacatttgaggccattcttgtcctcagggagaacgtgctggccctggacatcttctttgaggccctcaactatgagaccgtggagcagaagaaggcctatgagatgtcagagctgcttggtgacattgggggccagatggggctgttcatcggggccagcctgctcaccatcctcgagatcctagactacctctgtgaggtgttccgagacaaggtcctgggatatttctggaaccgacagcactccccaaggcacttcagccggacactggctgaaaccggtctactgtag

SEQ ID NO: 152879 - DNA, 1734 bp, Homo sapiens
  misc_feature (1)...(1734): n = a,t,c or g
cacagatctgaagcggtgcacctactatgagacgtgcgcgacctacgggctcaatgtggagcgtgtcttccaggacgtgggtataattgactctgctgtcccctgcagtggcccagaaggtagtggccttgcgaaagaagcagcaactggccatcgggcctgcaagtcactgcccaaactcgcccaagcaactgggccgtgtccgccgcctccatcccggccgtgcacatcaacccaggccacgaaatggcggcggcaaggccttcagcgactactcgtcctcagtcccctccacccccagcatcagccagcgggagctgcggcatcgagaccatcgctgcctcctccacccccacacccatccgaaagcagttccaagcggcgttccaacatcttcacgtctcggaagggtgctgacctggaccgggagaagaaggctgccgagtgcaaggtggacagcatcgggagcggccgcgccatccccatcaagcaggggatcctgctaaagcggagcggcaagtccctgaacaaggagtggaagaagaagtatgtgaccgctctgtgacaacgggctgctcacctatcaccccagcctgcatgattacatgcagaacatccacggcaaggagattgacctgctgcggacaacggtgaaagtgccagggaagcgcctgccccgagccacacctgccacagccccgggcaccagcccccgtgccaacgggctgtccgtggagcggagtaacacacagctgggtgggggcaacagaggcagaggagtcgtttgaatttgtgggtgggtgtccctcactggggcagacgtgggcactttcgagggtttcaacgggcggagggagcgggagctgttggggtttcagagtgtgcaggcccagatccttgccagcctgcaaggctgcctgcagtgccaaggacaagacttcgacttggggaaccagaacgcagctctggctgtgcaggccgtccgcaccgtccgcggcaacagcttttgtatcgactgcgatgcacccaatccagactgggccagcctgaacctgggtgccctgatgtgcattgagtgctcaggcatccaccgacacctgggggctcacctgtcccgggtgcgctcccttgacctcgatgactggccgcctgagctgctggctgtcatgactgccatgggcaatgccctcgccaacagcgtctgggagggggccttgggtggctactccaagccagggcctgatgcctgcagagaggagaaggaacgctggatacgggccaagtatgaacagaagctcttcctggccccactgccaagctcagatgtgccactgnggcagcagctgctccgggccgtggtggaagatgacctgcggctgttggtgatgctcctggcacatggctccaaagaggaggtgaatgagacctatggggacggggacgggcggacggctctacatctctccagtgccatggccaacgttgtcttcacgcagctgctcatctgggtgagtcacgtgcctctagcctgccctgacctcgctcttcttagccttgttctttgaaagcaacctcttctttcctcccctacaaccaatctctctcctcccatgtcttgccaactgtcaacatgtgttttctcctacagtacggggtggacgtgaggagccgggacgcccggggcctgactccactggcatatgctcgccgggccggcagccaggagtgtgcaga

SEQ ID NO: 152880 - DNA, 3816 bp, Homo sapiens
  misc_feature (1)...(3816): n = a,t,c or g
tcctcccagctgacatcaagcttagggagggtcaggattctgaacttgagcagaaaacagctgtttgtgctgctcaggcatccttggctggggaaaagggaaggctgggggtctctgcccctggggcctcccctctcatgctgtcggtagctgccaacgctgcgctgggctgggatggcgttggggtccctgacggctggggcagtgggtccccgccctcagccgtgtgcgtccagacccaggcaagggccagcaccagacggcaggctagcaccgtgacccggacgcactttgagatgcgccccccttggagccctccaggagctgagaatcagaagagatcctgtggggagagcagctggccggcgggcccccccagcagttcgcgctctccaactccgcggccatccgggccgagatccagcgcttcgagtccgtgcatcccaatatctacgccatctacgacctgatcgagcgcatcgaggatttggcgctgcagaaccagatccgggagcacgtcatctccatcgaggactcgtttgtgaacagccagggagtggacgctgagccgctccgtaccggagcttaaaagtgggcatagtggggaacctgtctagccgggaagtcagcccctggtgcaccgctatctgaccgggggacctattgtccaaggaggaagtcccctgaaggggggcgggttaagaagcgagattgcggcggatggccatagttacctgctgctgatccgagatgaaggaggcccccggtgagctccagtatgctgcctggggtggatgcaatggtgttttgtggtcaccctgtgaggatggaattacattttcaaagacggtgtacaactacttcctgcgtctctgcagcttccgcaacgccagcgaggtgcccatggtgcttgtgggcacgcaggatgccatcagcgctgcgaaatccccgggttatcgacgacagcagagcccggcaagctctccacagatctgaagcggtgcacctactatgagacgttgcgcgacctacgggcttcaatgtgggagcgtgtctttccagggacgtggcccagaaggtagttggcctttgcgaaagaagcagcaactgggccatcgggccctgcaagtcactgcccaacttcgcccagccacttcggccgtgtccgccgcctccattcccggccgtgcancaatcaaccagcatcagccagcgggagtgcgcatcgagaccatcgctgcctcctccacccccacacccatccgaaagcagtccaagcggcgctccaacatcttcacggtgccgctgccgcccgccgccgccgccgcctcctcctcctcctggtcctcctccttctcctcctcctccttgtccttctcctcttcctcgtccttctcctcctcctcctcctcctcttcatcccgctgccgccgctccccaggcgcctgggtctctgccctcaccggtgctgaccgactttctcggaagggtgctgacctggaccgggagaagaaggctgccgagtgcaaggtggacagcatcgggagcggccgcgccatccccatcaagcaggggatcctgctaaagcggagcggcaagtccctgaacaaggagtggaagaagaagtatgtgacgctctgtgacaacgggctgctcacctatcaccccagcctgcatgattacatgcagaacatccacggcaaggagattgacctgctgcggacaacggtgaaagtgccagggaagcgcctgccccgagccacacctgccacagccccgggcaccagcccccgtgccaacgggctgtccgtggagcggagtaacacacagctgggtgggggcacaggccccatgctcttccagggtccgtccttccacacccgtttccctcgcttccagagcccctggctcccgattgctttcccccaagacttcagtatccccagtgttgtcctagaccattggatctcatgttccctgggcccagtaacagctgccctgctggtgccattcctgtgccctgtcccagcagtcagcgcttggcagcacaggtctgcagctggcgcccacacgcaggagctcgcggacggtgcccacccagcccgcgtcccgctgccgcatgccgacgccgacaccgaccctcgtgccccccactcggccagcagcgcatccctgcactctgagcgccccctcagcagctcggcctgggctggcccgcgccctgaggggctgcaccagcgctcctgctccgtttccagcgccgaccagtggagtgaggccaccacttccctgcccccaggcatgcagcaccctgccagtggcccagctgaggtactcagttccagccccaagctggatcctcccccatctccccactccaaccggaagaagcaccggaggaaaaagagcaccgggaccccccgaccagacggccccagcagtgctactgaagaggcagaggagtcgtttgaatttgtggtggtgtccctcactgggcagacgtggcacttcgaggcttcaacggcggaggagcgggagctgtgggttcagagtgtgcaggcccagatccttgccagcctgcaaggctgccgcagtgccaaggacaagactcgactggggaaccagaacgcagctctggctgtgcaggccgtccgcaccgtccgcggcaacagcttttgtatcgactgcgatgcacccaatccagactgggccagcctgaacctgggtgccctgatgtgcattgagtgctcaggcatccaccgacacctgggggctcacctgtcccgggcgcctcacaacaacgggccctttctgagcgttatcagcagagaggagaaggaacgctggatacgggccaagtatgaacagaagctcttcctggccccactgccaagctcagatgtgccactggggcagcagctgctccgggccgtggtggaaagaatgaactgcggctgttggtgatgctccctggcacatggctccaaagaggaggtgaatgagacctatggggacggggacgggcggacggctctacatctctccagtgccatggccaacgttgtcttcacgcaacttgtcattctggaccgggtggaactgaggaaccccggacgcccggggcctgactccactggcatatgcctcgccgggccggcagccaggagtgtgcagacatcttgaatccagcatggctgccctggggagggctgtggcttagcgcctacccccaacagagagcctgccaatggcaccaacccctctgctgagctgcaccgtagtcctagcctcctataaggcccaggaagagggcagaggggccagaaggactccatggcccaaagaccctccctccctgcaggcactgtgggaacagacacagagatggagaagcagggacatgctgagaggacgaagccaaggaaatttaggggaggagagtcaaagggatcaaggagagttggggatttgagctgcagccatagagggatgagggatttaagccctctgccctaaggtgccattgaaaagggacaggacccttcggaggtgcctgtgaggagaggggagcaggacctctccctcctccagatccctgcctcctagtgccagcccctcacacgccttcatcctgaaacaggaagaggacggcaccaagttgggggtgctggatgaaagagacgaggggtgatctgtgagtcccatgtaaactttgtacattggaatatttatgtttgtgtacatatttgatgtgtgtgtgtatgatgagccaataaaccagactgtgtgcgtggcagacagaaaaaaaaaaaaaaa

SEQ ID NO: 152881 - DNA, 1117 bp, Homo sapiens
aaatgttctatgtgaacagtggccccaaaattatgcaaagtagagaccctgtacccatcaacccctacctattcctgcatccagagataactcttaccaacagttgggtctatgttcctccatactttctatacccatataaacatgccacaattctgccacatccctactgacagacatctatttggtttccaactgttcactattaaaaacaatgaggctctgagcctctgtggacatttatagctgcacacttctacaagtatttctgttggctagattcatagaagcggagttgctggctaagcatctgcacatcgcatattttgatgagtactgccaaagtgccctacaaaaaggctgcaatgatttatattcccacccccagagtatgaaacatacagacaactttgaaaggtacatttcacataaaccactaaatacattcaagggcagacggggcgagtccccattcattccacatctacctgaactctgtgtacctatatattaataagtgaagtcatttcattacctgggacagcattcatccagaggaaaggtctggggctcagaccgtcacagaacaatgcctactcacttagtcaaacatctcccggcctaattatttttcttagggtacagggaaaatttgatttgaatttagcccttgttctttttttttccggggggacagagtctcgctctattgcccatgctggagtgcagtggcatgacctcggctcactgcaacctccgcttcctgggttcaagctattctcctgcctcagcctcctgagtagctgggactacaggtgcctgccaccacgcccagctaatttttttagtatttttagtagagaaagggtttcaccgtgttagccgggatggtctccatctcctgacctcgtgatccgtccacctcagcctcccaaagcgctgggattacaggcatgagccaccgcgtccggccctcattttttattttcaattgaattagaattcaaatcaaagcataattctacttgattatagctcttgtgaaaagattcttagggaaaagaataacatgaacgttaggatggcctttggtttgtagattggattttcatgaatt

SEQ ID NO: 152882 - DNA, 1079 bp, Homo sapiens
acagtctgctggaattcgcggcagcgaggggctcggagaggtgctcggattctcgtagctgtgccggcccacaatgattctgagctaaaacacaaaataaaaaccagattcattgccaccagcgctcacctcgcctgacttaaaaaaaaggacttaaccaccaccatgtcgagcaaaacaacaccagaccaagaccaagaagcggccctcagcgtgcaacatccaatgtgtttgctatgtttgacccagtcacagattcaggagttcaaagaggccttcaacatgattgatccagaccaagatgggtttcatcgaccagggaagatttgcatgatatgcttgcttcattgggggaagaatccaacttgatggagtatcttagatgccatgatgatgagggctccaggccccccatccaatttcaccccatggttccctcaccatggttttggtgaggaagtttaaatggccaccagatccctgaagatgtccatcggaaaatgccctttgcttgctttgaatgaaagaagccactgggcaccatacggggaagattacttgaagagagctgctgacaacccatggggggatcggttttacagatgaggaagtggatgagctgtacagagaagcaccctattgaccaaaaagggggaatttcaattacatccgagttcacacgcatcctgaaaccatggagcccaaagacaaagatgactgaaataacttcaaattcccagccaaacgttccttggttggccacttttggggtattcctgagatttttctcttgcatggcccttaggctttagcagccttttgcaattccctgttggtatttattctcagccattttgggcatatgtatctttataatcagactggaaacgggactttctattaatatcattttcgagaataaaaaataggataatttaacctaccagcccttctcccccaataactggtgggtctatacagagtcaatatattttttcagagaaagttagttcggctcgattttttccggaatcataattaaactttatgataaaataaaaaaaaaaaaaaaaaagcgg

SEQ ID NO: 152883 - DNA, 5015 bp, Homo sapiens
attcaccaagtttcacgcatctgctggcctccccctgtatttcctctaagccccagcctcagtttctctttctgcccacatactggccacacaattctcagccccctcctctccatctgtggtctgtgtgtatctttctctctgccctttttttttttttagacggagtctggctctgtcacccaggctagagtgcagtggcacgatcttggctcactgcaacctctgcctcttgggttcaagcgattctgctgcctcagtagctgggattacaggctcacaccaccacacccggctaatttttgtatttttagtagagacgagctttcaccatgttggccaggcaggtctcaaactcctgaccaagtgatccacccgccggcctcccaaagtgctgagattacaggcctgagccaccatgcccggcctctgcccctctttcttttttagggggcagggaaaggtctcaccctgtcacccgccatcacagctcactgcagcctccacctcctggactcaagtgataagtgatcctcccgcctcagcctttccagtagctgagactacaggcgcataccactaggattaatttgggggggggtggtgtgtgtggagaatggggtctggctttgttggccaggctgatgtggaattcctgggctcaagcgatactcccaccttggcctcctgagtagctgagactactggctagcaccaccacacccagctttttattattatttgtagagacaaggtctcaatatgttgcccaggctagtctcaaacccctgggctcaagagatcctccgccatcggcctcccaaagtgctgggattccaggcatggggctccgagcccggcctgcccaacttaataatacttgttcctcagagttgcaactccaaatgacctgagattggtgcctttattctaagctatttttattttttttctgctgtcattattctcccccttctctcctccagtcttatctgatatctgcctccttcccacccaccctgcaccccatcccacccctctgtctctccctgttctcctcaggagactctggcttcctgttttcctccacttctatcttttatctctccctcctacggtttcttttctttctccccggcctgcttgtttctcccccaacccccttcatctggatttcttccttctgccattcagtttggtttgagctctctgcttctccggttccctctgagctagctgtcccttcacccactgtgaactgggtttccctgcccaaccctcattctctttctttctttctttttttttttttgagacagagtcttgctctgttgcccagcctggagtgcagtggtgcaatcttggttcactgcaacctccacttcccagattcaagcaattctcctgcctcagcctccagagtagctgggattacaggcgtgtcccaccacacccgactaatttttgtatttttggtagagacaaggcttcggcattgttggccaggcaggtctcgaactcctgacctcaagtaatctgcctgcctcaccctcccaaagtgctgggattacaggcatgagccacctcacccggaccatccctcattctccatcctttcctccagttgtgatgtctacccctcatgtttcccaacaagcctactgggtgctgaatccaggctgggaagagaagggagcggctcttctgtcggagtctgcaccaggcccatgctgagacgagagctggcgctcagagaggggaagcttggatggaagcccaggagccgccggcactctcttcccctcccaccccctcagttctcagagacggggaggagggttcccaccaacgggggacaggctgagacttgagcttgtatctcctgggccagctgcaacatctgcttgtccctctgcccatcttggctcctgcacaccctgaacttggtgctttccctggcactgctctgatcacccacgtggaggcagcacccctcccctggagatgactcaccagggctgagtgaggaggggaagggtcagtgtgctcacaggcagggggcctggtctgctgggcctgctgctgattcaccgtatgtccaggagctggagcagcaccctctcagagcctcagtttccccagatgtcaatgagagaatcagcatcagccacatctcccacctgaagaatcgaaccttgagttctcacctttaagaattttttttttttttgagacagtgccttgctcagtcgaccacgctggagtgcagtagcacgatcatcaatcactgcagcctccaactcaagcaaccctcctgcctcaacctcctgagtagctggggccacaggcacccaccaccatgcctggctaattctttcttttttgagatggagtctcactctgtcgcccaggctggagtgcagtggcacgttctcagctcactgcaacttccgtctcctgggttcaagcaattctcctgcctcagcctcctgagtagctagaattacaggcgcacaccaccacaccaggctaatttttgtatttttagtagaaacgaggtttcaccacggtggtcaggttggtctcaaactcctgacatcaggtgatccacccgcctcggcctcccaaagcactgggattacaggagtgagccaccatgcctggccatattttaaacttttttgtagagatggggtcttactatgttgcccaggctgatctcaaactcttgggctcaagcagatcctcctgccaaagcttcccaaagtagttggattacaggtgtgagccaccacgccccaccaacctatgaagatgtctaagcagacagggtgccctacctcaccacatccccagtcagatccagaggtgggacaaggatgggaaggaggttccagaacaaaggctggcagggagtcgtatgggacaggagctgacccagcaaccatccacagagacatcctggagcctgggaaggagaaggacaaagagcccccttttttaaattttttttatgtttttgagacggagtctcactctgtcacccaagctggagtgcagtagcacaatcttggctcactgcaacctccacctcatgggttcaaacgactctcctgcctcagcctcctgagtagctgggaccacaggtgcacaccaccatgcctggataatttttgaatttttggtagagacggagtttcaccatgttggccaggcaggtctcgaactcctgacctcaagtgtccgcccaccttggcctcccaaagttctgggaatacaggcttgagccactgcaaccagccagtagcccccatctttgcccctcgctgagccctactggatgttcttggttatgcgacagtttccccatctattaaagagaaacccctatagcagaggggaggatgaggttggaaaagcaggagcattgttatgctattcttgtggggtctgggaagcagacatctgggtggatgtttggggggtgctgggcttagttggggaagtaggggggccccctggggcttacagggactggaagctctgagctggccagagggatgttgcaatcctgccagggtcttgtctatgctgtccttttcacaaccatccccctactgccaggctgacacgtggttgcgggggcacaaggccagccaacctagagtctgaggctaggcggaggacaccctccccaccagctgccagggtcactggcggtcaaaggcagctggtggggaaggcattggactccagccttgggggacggatgtagtgatggtgggaagcaggcttggtgccaggaggggcgtcagagggtgaataagagcagatagagtgtttgggggaggtagccaaccaaagggggtgaggcccggtggaagggaagaagggacatacacgcagagctttgcagctgagggttttaattttttgagatggggtctctgtcccaccaggctggagtgcagtggcacaatcacagctcactgcagcctcgaactcctgggctcaagcaatcttcctacctcagcctcttgagtagctgggactacagcatgcgccaccacgctcggctaatttttgaattttttgtagagatgaggtctccctatattgcccaggctggtctcgaactcccacgctcaagtgatcctccctcttcagcttcccaaagtgctgggattacatgcatgatccaccatgcctggctaatgcaggtgaggtttttgcagtgtcatccagctaaggcgacccgttcccctcccaaaaaagggagactgagaaccatgaagttaagagcccagagaatatcacggtggtctggggtgcttcaagggctggtctggaataaattggaggtggcacgcagggtaggagcgccgggccaactgggagacccagcaacataaaggaaaagttgttggggctgaggaggcttgctgagagaggggaagtgagggaaagaggtgatctagggacacggtgtgaatgagggggggatgagatcacagggttattactgggagacccctgagggaaggtggccacagggacaggacaaggctgtcttcttaagggaggagaccacccctcatattgtcttatgcccaatttctgcctccaaagaaagaaaaagtaaaaactaaaaggcagaaatgaaatccacaagcagacaccccaggtgccacaccctgggcctggtggttaaagattgacccctgacctaatccgttaggttatctatagattacagacattgtatagaaaagcactgtgaaaatccctattctgttttgttccgatctaattactggttgcatgcagccttcagtcacttatctccctgcttgcttcaatcgatcacgaccctctcatgcaaacccccttagagttgtaagcccttaagagggataggaattgctcactcagggagctcagttttttttatcgtgattcttgccaatgctcccggccgaataaagcctttccttctttaaaaaaaaaaaaaaaaa

SEQ ID NO: 152884 - DNA, 1037 bp, Homo sapiens
  misc_feature (1)...(1037): n = a,t,c or g
gatggtcttgatctcctgaccttgtgatccaccagcctcagccccaacaaagtgctgggattacaggcgtgagccactgtgcccggccaagaatttttttatcgataacatagtgagctctctgcctcttcggaacgatgtccactttgcttatgatcaacccaagcaggactcttctctccctgggacgcctctcccctgggtctgggaatcttccagttctgccagaattggccttttcccaggatgttggcaaactttccagttggaaccccttttttctgtgtgggccctgggggtttgcggaggaccaaaatccatggagtttttgtggttaccctaggaccttttgggaagggtgaggagcagggccctggaggaaaagggcagccacctcctctccctggggtggaacccttgccaccctgattccttcaccagaattgttcagtgggccttttcaccacagtgggttcctttctggcctggaggccctggcactgttcccaggaccacacaggaagtctgggtcaactctgggcgcctggggatggtcaccgaagnaggaagcacgctgtccccgtctcttcctggcttctgcccagaaaattcgaacaagtgcaaatttaacacactgttaactgccgaaagcttgaaactcccccaggacttgtcctttgatccttcccagaaacccacccaggtccggcacttgggagcccccccggagagggacctccccagccgagcccctcaaaagaactcccatgaaatcagggaattgtttgatggaaatgtatcttcttgtaactggggaggatgaaggcccaaacacccacacttttgtttttccccagggctcgggatgtctccagcagcccggccacgcagcttcccaggtgggctcggggaggtgggagcagggaccatctctgtcccctccaccctcactccatccacctcggagaccaccctcccccagcccagatacggaatgaaacttgcagacgcagacgtcggaaaaaaaaaaaaaaaaa

SEQ ID NO: 152885 - DNA, 956 bp, Homo sapiens
ttttttgttatttgatcttttcattcttcttttacaattttccccaataggtggcgcttctgaaacacagtatttgtttttatttttattttatttgagaaacccccaaatttgctctgatggcctttcttctccatttgtcatctctgggaaccttgagtctagatttagggctgaaagtctctctgctaggggctttccaaaatgcattgctttgattctgggaactgaataggaggagaacacctgggactactctgagtcctgagttcaattcctcctcaactgggtttccttgaaggtggctgtactgggtcatcttcctcggatccttgaggggctgggtaggagctgggtcattggggcaacagagtctgcttgtctgaagctctcggactggcggaactccatccctgtccaggcaatgaagtaggaccccaaaggcaaggacgaaaaaggctgacggttttcagccaaagaggaaagccagatatggtggctgcatttaagttcaaatgcaagttcctgaacacattcctgtaaataacacttgggaagtggttttggacttgttcctgtgatccctttaacactgatacatcccctcgagggtcccttggcattacttccccagattcccatttttttttatcttcagttaggaagccgatcatcttcccatctttaaaccatgttgatagttttgggcttctgcatcacaagtcagaagtaccgaaccatcttcttgaccagtcatacaccttaaccaagtggtttcctttgattgactgggccaaagtaccttgaagaagaatgatagccaggatgaggacagccaggccctaaccctgaatacatgtcagtctctgtcctccggcaaaagcgtggagcagcccttagcagccagccagccagccagcctgtgcagcagctagactggcgtcgacgcggccgcg

SEQ ID NO: 152886 - DNA, 532 bp, Homo sapiens
ggacaagggctatggccaagcagagggtcctgtttaattccttaagcaaatattgattacatgcttatcatacaccaggtactgtggtaaggttttgtcctatggggtcgaagttagatattgaaatatatgtctataatcactgtgatatgctgagggaagaaagattccaaatgctattggagcctggaagaagggcaggtgagccagtgatcagggaagattccagagaaggtgggatttgacctgagactgaaagatgggtatgagtttacctggtggataggggaaggcattttagaaagcatgtgcaaaatagaaacagtatatttgaggactcctaaatagagtatgatggacagggggtaagaagaaagcaggttggatgccaaagaaagagaggtgaagctggcacagtagtgcatgcctgtaatcccagctactcaggaggctgagacaggaaaattgcttgagcccaggagttccagatcagcctgggagacatagcaagaccctgtctcttaaaaaaaaa

SEQ ID NO: 152887 - DNA, 574 bp, Homo sapiens; identical to SEQ ID NO: 140220
  misc_feature (1)...(574): n = a,t,c or g

SEQ ID NO: 152888 - DNA, 675 bp, Homo sapiens; identical to SEQ ID NO: 140222
  misc_feature (1)...(675): n = a,t,c or g

SEQ ID NO: 152889 - DNA, 2204 bp, Homo sapiens
gcggcgcgcgctgcgggcagtgagtgtggaggcgcggacgcgcggcggagctggaactgctgcagctgctgccgccgccggaggaaccttgatccccgtgctccggacaccccgggcctcgccatggctgaccagctgactgaggagcagattgcagagttcaaggaggccttctccctctttgacaaggatggagatggcactatcaccaccaaggagttggggacagtgatgagatccctgggacagaaccccactgaagcagagctgcaggatatgatcaatgaggtggatgcagatgaccttccagggaacgggaccattgacttcccggagttcctgaccatgatggccagaaagatgaaggacacagacagtgaggaggagatccgagaggcgttccgtgtctttgacaaggatgggaatggctacatcagcgccgcagagctgcgtcacgtaatgacgaacctgggggagaagctgaccgatgaggaggtggatgagatgatcagggaggctgacatcgatggagatggccaggtcaattatgaagagtttgtacagatgatgactgcaaagtgaaggccccccgggcagctggcgatgcccgttctcttgatctctctcttctcgcgcgcgcactctctcttcaacactcccctgcgtaccccggttctagcaaacaccaattgattgactgagaatctgataaagcaacaaaagatttgtcccaagctgcatgattgctctttctccttcttccctgagtctctctccatgcccctcatctcttccttttgccctcgcctcttccatccacgtcttccaaggcctgatgcattcataagttgaagccctccccagatccccttggagcctctgccctcctccagcccggatggctctcctccattttggtttgtttcctcttgtttgtcatcttattttgggtgctggggtggctgccagcctgtcccgggacctgctgggagggacaagaggccctccccaggcagaagagcatgccctttgccgttgcatgcaaccagccctgtgattccacgtgcagatcccagcagcctgttggggcaggggtgccaagagaggcattccagaaggactgagggggcgttgaggaattgtggcgttgactggatgtggcccaggactgggtcgagggggccaactcacagaaggggactgacagtgggcaacactcacatcccactggctgctgttctgaaaccatctgattggctttctgaggtttggctgggtggggactgctcatttggccactctgcagattggacttgcccgcgttcctgaagcgctctcgagctgttctgtaaatacctggtgctaacatcccatgccgctccctcctcacgatgcacccaccgccctgagggcccgtcctaggaatggatgtggggatggtcgctttgtaatgtgctggttctctttttttttctttcccctctatggcccttaagactttcattttgttcagaaccatgctgggctagctaaagggtggggagagggaagatgggccccaccagctctcaagagaaacgcacctgcaataaaacagtcttgtcggccagctgcccagggacggcagctacagcagcctctgcgtcctggtccgccagcacctcccgcttctccgtggtgacttggcgccgcttcctcacatctgtgctccgtgccctcttccctgcctcttccctcgcccacctgcctgcccccatactccccagcggagagcatgatccgtgcccttgcttctgactttcgcctctgggacaagtaagtcaatgtgggcagttcagtcgtctgggttttttccccttttctgttcatttcatctggctccccccaccacctccccaccccaccccccaccccctgcttcccctcactgcccaggtcgatcaagtggcttttcctgggacctgcccagctttgagaatctcttctcatccaccctctggcacccagcctctgagggaaggagggatggggcatagtgggagacccagccaagagctgagggtaagggcaggtaggcgtgaggctgtggacattttcggaatgttttggttttgttttttttaaaccgggcaatattgtgttcagttcaagctgtgaagaaaaatatatatcaatgttttccaataaaatacagtgactacctg

SEQ ID NO: 152890 - DNA, 1243 bp, Homo sapiens
atccctccttccctcagaggctgggtgccagagggtggatgagaagagattctcaaagctgggcaggtcccaggaaaagccacttgatcgacctgggcagtgaggggaagcagggggtggggggtggggtggggaggtggtggggggagccacgatgagatgtttctccgacatctacaaagatccggggagatcgcggacggggtttgtgcctggaaggtggaaggggaagatgggtcagtaggacagaaaggtaacattgatgactcgctcattggtggcaaatgccctccgctgaaaggccccgaggggcgaagggtacccgaaaggcaccagttaatcactggtgttcgatattgtcatgaaccatcacctgccaggaaacaagttttcacaaaaggaggcctccaagaaggtacatcaaaggattaccatgaaatcaatccaaagggaaactttgaagaaccagagacccagaaaagagtaaaacctttttatgacagggcgctgcagaacaaatccaagcacatcccttgcctaatttccaaaaacttaccagtttctttatttggtgaaaacatgaatcccagatgggcatgggtgcttctattggactaccgtgaaggatgggtggtgccccccataatatgattttcttttaagggatggtttagaaatggaaaaaatgttaaccaatgttggcaattattttggatctatcaccctgtcatccataactgggcttctgccttgtcatcccacacaaccacccgggacttaggaccaaatggggactgatgtcatcttggagctcttcatttattttgactgtggatttatttggaggtggaagcattggtttttaaggaaaaacatgtccatgtaaggttgtctaaaaataaaatgcatttaaactcatttgagagaatgccttttagtttaatgcatatttaaactaaattgatcctgtagtgttcctggagaagctagagcctgattgtaggctactactcatcaattaacttctacagtggagactacttctgggactggaatataaaaaagaatcaaaggttctgattttgagttgcaataaagggaaagaccatgctcatagcagtgccaacatttgaagtgtggagccttacccatttcatcacctacaacggaagtagttaactggaagagattaccaagagaataaaaagagactcattcagtggaaaaaaaaaaaaaaaaaaca

SEQ ID NO: 152891 - DNA, 431 bp, Homo sapiens
  misc_feature (1)...(431): n = a,t,c or g
agcagctgtagtggagccacctcctaagaatgctgcagcttatagctcttgtcgcgtctgatgagaacgtcgcggtctgatccgaacatatggccttgatatgtgcagccagagtttctgtcagtacgcgaaggatatcggtttcattaagttggactaaatgctcttccttcagaggattatccggggcatctactcaatgaaaaaccatgagaattctttgtatataaaataaacatttgaaaaaaccnnnnnnnnnnnnnnnnngggggggctgtttaaaagaatcctttggggggccaaagattacgcgggcatgcaacgtaaaaattttttccttatagggggacaaataataacctacctgggaatctttgaaaagaacccttactttgggggggggacaaaattggacaacctacctacaaaaa

SEQ ID NO: 152892 - DNA, 603 bp, Homo sapiens
acccgcgaaaattcggccagggttctcgctcttggtgagaaatagtttgtgattttggggaagcgttgccgtggagcgctaggctgcttaaaatctcaagtagaggaggccacgggcggcacgagggagcacgccgactgggagtcgctggtgccgccattacaggcctgtactgtggcttgggagtcccgggatgcgggtagtagccgtctgagtgcggagtcttgtaatttctatgacctgcaaaaccgctgtctcttttcttacagtcgtgtctgttcaaaccggcacggtcttgatccggaaatatggcctcaatatgtgccgccagtgtttccgctcagtacgcgaagtatatcggtttcatttaagttggactaaatgctcttccttcagaggattatccggggcatctacttcaatgaaaaaaccatggattaattcttttgtatatataattatacattttgaaaaagccactgaaaaaaaaagaaaaaaaaatgaaattaagagggggcccttttgttttaaggggcccctttaaaccccgtgaaaaaccctgggggggtcttttaatgccgcacccttttgtggttgcccccc

SEQ ID NO: 152893 - DNA, 591 bp, Homo sapiens
ggtcttctccaagctgaagggccgtggcggtcttctggggaggcagcgttcagggagattactatggagatctggctgctcgcctgggctatttccccagtagcattgtccgagagcacagaccctgaaacctggcaaagtcgatgtgaagacagacacttcctcttcaaattcctggtgattggcagtgcaggaactggcaaatcatgtctccttcatcagttcattgagaataagttcaaacaggactccaaccacacaatcggcgtggagtttggatcccgggtggtcaacgtgggtgggaagactgtgaagctacagatttgggacacggctggccaggagcggtttcggtcagtgacgcggagttattaccgaggggcggctggagcctgctggtgtacgacatcaccagccgggagacatacaactcactggctgcctggctgacggatgcccgcaccctggccagccccaacatcgtggtcatcctctgtggcaacaagaaggacctggaccctgagcgggaggtcactttcctggaggcctcccgctttgcccaggagaatgagctgatgttcctggagacca

SEQ ID NO: 152894 - DNA, 495 bp, Homo sapiens
  misc_feature (1)...(495): n = a,t,c or g
gcggccgcgaccgagtcatggctgagacctacgacttcctcttcaaattcctggtgattggcagtgcaggaactggcaaatcatgtctccttcatcagttcattgagaataagttcaaacaggactccaaccacacaatcggcgtggagttttggatcccggggtggccaacttgggtggggaagaacctgtgaagctacaagatttgggaacaccgctggccagnagaccggtttcgccgggaagacatacacctcactggctgcttggctgaccggatgcccgcaccctggccagccccaacatcgtggtcatcctctgtggcaacaagaaggacctggaccctgagcgggaggtcactttcctggaggcctcccgctttgcccaggagaatgagctgatgttcctggagaccagcgctctcacaggcgagaacgtggaggaggcgttcctcaagtgtgcccgcactatcctcaacaagattgactcaggcga

SEQ ID NO: 152895 - DNA, 2025 bp, Homo sapiens
atgttgctcaggctggttcagggagattactatggagatctggctgctcgcctgggctatttccccagtagcattgtccgagaggaccagaccctgaaacctggcaaagtcgatgtgaagacagacgaaggagccggggctgtagccggagtggagcggctgccagccgaggagcaggcgcggccgcggcgccatattgcggccctcagcggccgcgaccgagtcatggctgagacctacgacttcctcttcaaattcctggtgattggcagtgcaggaactggcaaatcatgtctccttcatcagttcattgagaataagtgtgagtttcccgcagtggtcctgggaaccctgagctgtgtttatgcgcatgtcaaacaggactccaaccacacaatcggcgtggagtttggatcccgggtggtcaacgtgggtgggaagactgtgaagctacagatttgggacacggctggccaggagcggtttcggtcagtgacgcggagttattaccgaggggcggctggagccctgctggtgtacgacatcaccagccgggagacatacaactcactggctgcctggctgacggatgcccgcaccctggccagccccaacatcgtggtcatcctctgtggcaacaagaaggacctggaccctgagcgggaggtcactttcctggaggcctcccgctttgcccaggagaatgatggtgctagagacacagtgttggagacagccctaggcccaaccttcatggagctcacagttcagtgggtgagggtggaaggacagacccacttccagacagtgacacctcaggaagcccacgtgcaggaggagatcaaccttgtggtgggacacgtgcggctgccagcgctgaaggaccgcgcggccatgccttacacagacatggtgatccacgaggtgcagcgctttgcagacatcatccccatgaacttgccgcaccgcatcactagggacacggcctttcacggcttcctgatacccaagggcaccgatgtcatcaccctccttaacaccgtccactacgaccccagccagttcctgacgccccaggagttcaaccccgagcattttttggatgccaatcagtccttcaagaagagtccagccttcatgcccttctcagctgggcaccgtctgtgcctgggagagtcgctggcgcgcatggagctctttctgtacctcaccgccatcctgcagagcttttcgctgcagccgctgggtgcgcccgaggacatcgacctgaccccgctcagctcaggtgtagctctggccaatggagaacgatggaggattctccgacgcttctccctgaccatccttcgggacttcgggatgggaaagcagagcattaaggagcgaattcaggaggaggccagctacctactggaggagttccagaagaccaagactttatgtaatgtttacaactctatgaccttgtccaaacagcacactcattttgaagatgatgaaacaagttcagaagctaagattcacgaagagattaaccaggtgattggaccacaccggctcccaagggtggatgaccgggtcaagatgccctacacagatgtcgttatccatgaaatacagagactggtagacatcgtgcccatgggtgtcccccacaacatcatccaggacactcagtttcgaggttaccttctgcccaagggcacagacgtatttcccctgcttggctctgtcctcaaagaccccaaatacttccgctacccagatgccttctatccccagcactttctggatgagcagggccgcttcaagaagaatgaagcctttgtgcctttttcctctggaaagcgcatctgcttgggcgaggccatggcccgcatggaactctttctctacttcacctccacccttcagaacttctctctatgctcgctggtgccacttgtggacatcgatatcacccccaagctctcaggctttggcaacatcaccccgacctatgagctctgccttgtggcccgctga

SEQ ID NO: 152896 - DNA, 1101 bp, Homo sapiens
  misc_feature (1)...(1101): n = a,t,c or g
cgagggagcaggcgcggccgcggcgccatattgcggccctcagcggccgcgaccgagtcatggctgagacctacgacttcctcttcaaattcctggtgattggcagtgcaggaactggcaaatcatgtctccttcatcagttcattgagaataagttcaaacaggactccaaccacacaatcggcgtggagtttggatcccgggtggtcaacgtgggtgggaagactgtgaagctacagatttgggacacggcctggccaggagcggtttcggtcagtgacgcggagttattaccgaggggcggctgggagccctgctggtgtacgacatcaccagccgggagacatacaactcactggctgcctggctgacggatgccctgacccctgtgcaaccccaaaaaacgggtgcatttctctgtggtgaacaagaaatgacctggaccacttgagcgggaggtcactttcctggagggccctcccgctttgcccaggagaatggagctgatgttcctggagaccaggcgctctcacaggcgagaacgtgaagaaggcgttcctcaagtgtgcccgcactatcctcaacaagattgactcaggcgagctagaccgggagaggatggggctctggcattcagtacgggattgcgtccctccgcaagcttcggcagcctcggagtgcccaggccgtggcccctcagccgtgtggctgctgagctctgtggagccagctcacctgttctccaggaccagccctgctggggcccaggcccaggctctgagaggccgtgtcctaacctgccctggccccggagaagctacgtttgcncacctgtccccccttccctggcctggtggggcctggctttggggcaagactgagccacgggggaagggggaatcccgtacctgctgctgcttcctctgtcttgggtaaacgtttgtccccctgaacccctaaccatatcccaagagctcccaaagcctgagaccagggtcatttgtccccaactccccatctggccctgctgttgctagtacctgttatttattacctggaggcctgtcccccccccaccctacccccataaagcaatgttta

SEQ ID NO: 152897 - DNA, 1043 bp, Homo sapiens
cggtcaagatggcgctggtggcttctgtgcgagtcccggcgcgcgttctgctccgcgcgggggcccggctcccgggcgcggccttcgggcggacggagcgggcggccggcggcggagacggcgcagcggccgcttcgggagccagcgggtgctggtggagccggacgcgggcgcaggggtcgctgtgatgaaattcaagaaccccccagtgaacagcctgagcctggagtttctgacggagctggtcatcagccgtggagaagctggagaatgacaagagcttccgcgatgtcattctgacctcggacccgcccgggtgtcttctcggccggcctggacctgacggagatgtgtggggaggagccccgcccactacgcttgggtacttgaaaggccggttcaggagctgtggctgcggttgtaccagtccaacctggtgctggtctccgccatcaacggagccctgccccgctggagggctgcctggtggccctgacctgtgactaccgcatcctggcggacaaccccaggtattgcaaagggattcaaataagacccaaggttgggatcatttgccccttttggggttgaaaagaaacccttgggaaaaacctattggggcccggggggggggagtctgcccctgcaggtgggggctgctttttcccccggccggaaggccctgcaaggtggggcatagtggaccaagtgtggtccccggagaagcaggtgcagagcattggggctgtcagcgatagcccagtggatggccattcccaagccaatggctcacaagtttgaccaaggccataatgcgaaaaggccagggcccacccgcctggtcacgcaagggctatgcggacgtgcagaacttcggtcagcttcatctccaaagactccatccagaagtccctgcagatgtacttagagaggctcaaagaagaaaaaggctaacgattgggctgccacaggcttacggccacacgtgcccctgtgggtcccagggaggtcttaaacaaggtatttttcaacttaaaagtaaa

SEQ ID NO: 152898 - DNA, 2797 bp, Homo sapiens
atgaaggaagtggtttattggtcacccaagaaggtggcagactggctgctggagaatgctatgccagaatactgtgagcctctggagcatttcacaggccaggacttgatcaacctaacccaagaggatttcaaaaaaccccccttgtgccgagtctcctctgacaatgggcagcggctcctggacatgatagaaaccctgaaaatggagcaccatttggaagcacacaagaacggccatgccaatgggcacctcaacattggcgtagacatccccacccccgacggcagcttcagcatcaagattaaacccaacgggatgccaaatgggtataggaaagagatgataaagatccccatgccagaactggagcgctctcagtaccccatggagtggggcaagacttttctggcctttctttatgcactttcctgtttcgttctcaccacagtgatgatctcggtcgtccacgaacgagtacctcctaaggaggtgcagcctccactaccggacacattttttgaccattttaaccgggtgcagtgggccttttctatttgtgaaattaatggcatgatccttgtaggactctggttaattcagtggctgctcttaaaatacaagtctattattagcagaagattcttctgcataataggtacgctgtacctgtatcggggtattacaatgtatgaaactacactcacagcacctggtatgctttgcaactgttctccgaagctttgcggagactgtgaagcccaactgcgatgaataatgaagcatcattgctggatgtggcttgtctatcactggctctcacaacatgtgtggggactatctgtacagcggccacacggtcatgctaacacttacctacttatttatcaaagagtattcccctcggcgactctggtggtatcactggatttgctggcttctcagcgtagttggaatcttctgtattctcttagcgcatgaccactacactgtggacgtggtggtggcatattacatcaccacgagactcttctggtggtatcacactatggccaatcagcaagtgctaaaggaagcttcccagatgaacctcctggccagggtgtggtggtacaggccatttcagtactttgaaaagaatgtccaaggaattgtacctcgatcttaccattgggcctttcccctggccagtagtcccaccctcagtaggcaagttaaatacagccggctggtgaatgacacataacagctgtacaaagtggggaaaagacaaattgtccgaagtgctaagaactccatgagagaagatgccataaaataaacacctccctaatcctattatctttcaatggttaccttgacttaacctattgagttacctggtcagcactgtgatctttttttctctccaaagggacctgcgttggacaacaataaagaaaaatttaacctatcatgcactgtacacatttcctgttcataagtttgggatttacataacccgcaaccaccatgttcctttgtatatgatgcagcagcataaatgtaagcttttatatcataagttctggtctttccagtcacatctggaaataaagcgtattattttcttgggaaaacatacttttcatatctcttgccccaaagattgggctgtaagccattttctagcaaatgtctctatgaaggtttctaagtacctgaatggggtttgattctgaaatctttctacctgttgcaccgatattcaaataaaaatgatagacacagaaaggtttggtaactttgggttttgtaaaatcagcaaaggcagtgtttcaaaaagtgcaaaaaaaaagattctgttataaagggatggggtaaggtccctcctcaactttatttttcaaaatgatgttatgaacaccaaatttacagatttttaacatgtcacagagaacagagttaaaatttaaaaatgcatcttgggagagaaatttgtctatgtttctagtgcctttcttgtcttgattgtatggtcagcaggcaatcttaaatgtttttatttaaaataaagcattccttgaagatataaatatatgtatacactactaaattttgcatttatagctaaattgaatcagaagactgcttatggttttaaaattgccctgacttacataatgagggtggttaatttaagagtccagagcctgttcacatattgtgatcaggtagcattgacaggtaccacttaaattattttatcgtcgatttggtagttcgattttaactactcaatgaaaacagccatgaatatcttttccttaaagagagttttgaaaatgatcacttacctaaaacttgaaagctatgaattagttatccatactctcatgacaattttgttggtgaaccaccaaaaaagagatctatttctttaaaagatatttgtgcagaaactgcatgtaactataagttttactcataacatacatatgtttggggaagtattctattctatacttgccaatgtggagaccaaaatagtttttttaagaatgaagaagtatatatatccatatctgtattttacgtgcagcagaattatcttccgtagattttttttttgtattcacaaggtgatatttgtattgtaaaccaataatggtgaaggaaataaaaaggcttttaaatttttgtttcttttaattcctttgtaaagttattattccagagagtatactgatatcttacaacttacctaaatcataaattaatcaaaatgcactttttaataaaaactgatacttaaaat

SEQ ID NO: 152899 - DNA, 1126 bp, Homo sapiens
  misc_feature (1)...(1126): n = a,t,c or g
ccaagcaaggacaacatattatcttccccgcccttctcttttctacagaatctgttacctcagtcagattgaggcctgcacatatactgggaaaataatcgacttccagcgtccctcatgtagtctctacctgattcaggaatctctaacccagtatcggaacgttaagcncgcttctccgcttccctgcccgtgagaaactcgaggtgaccaaccctcccgttcccggttggctcccggttgcagagttgagtgtccctgagaggtcagattgctgtccagaccatggccccatgaacatgaacatggaccatggcccttgaccatcataaaatgggactttccagattataagacaatggaagatagaaggggacaccatttaggaaaactattccagaagaagcttggctgcaaaaagggcttaagggattccatggggcccgcaatgaagctttggagatacatgggtggctttgcaaaagagtgtttccttttcttgatgtattctttttaaaggattcaaatggggggatttgcttgcatttgtggtagctgttagggagcttgaatatttacctggggagtccccttgaattaaagataagaagcatcactgaagataatacctggaagcatcatagttggtttctttaactctccaaaataagatttcttctctgtagcctacttgtctgggtttatcccttacagaatacttagtaaagatttaatcaattaaaatatatatatatatgccaaaaaaaaaaaaaaaaaaaaaaaaagtacagtgtgttacttctctgagaactatatattccattaccttgctgacattcctatttggatacttttcagtcacctgagattcagcgctaaaactgaactcctgtggtcctctcacagcagttcttacagttctctcccttagtgaaaggtaacaccatcttcctagacctggagacctagggactgagagccatccttgactctacgctccctcatcccatagtccagcaattgttaagtcctgctcactttatctcttcaccatctctcaattctacttacttttttcccagtgccactatttgaaagtccagggtgttattcatttatcaggagt

SEQ ID NO: 152900 - DNA, 399 bp, Homo sapiens
agctcactctccaagatccgtgagtctatcaggcgaggaagtgagaagctggtctcccggctccgaggcgaggcggcggcaggagcagccggaatgaagagagccatgtcactcaacacactgaacgtggatgctccaagggctcctgggactcagtttcccagctggcacctggacaaggcccctcggaccctcagcgccagcacccaggacctgagcccccactaacgtccagtgaactgcgctggccgcagcttcttgggaacagtgcaggagggatgggctggtggggtgagagggggtctatcatctcctggcccccccttgcctctgggtacctggtggatagctgccttctcctgcgattaaaggctgtggacgtgacagtgagaaatgtca

SEQ ID NO: 152901 - DNA, 493 bp, Homo sapiens
gtgccccacccaggcacacttgtgcgcaaatcaagtgagaatggcttgtgatcgccctcctggggtggcgtgggaactgcatgggccagggggattgaacagcatccccggcccctccccaggcctttcgccgcagcagctcactctccaagatccgtgagtctatcaggcgaggaagtgagaagctggtctcccggctccgaggcgaggcggcggcaggaccagccgggtgagtgttgatcaggtcggcaaagagccctgacatcagcagaatagacagcccaccccacccccacccccattttgctcaagaaccttccatggctcccatctcccctgtgatacacacagatcaaaccctgtgctggaaaggtccctcgtggaggggggccactcctggattcactcatttcctccctgctgccctctttgcagaatgaagagagacatgtcactcaacacactgaacgtggatgctccaagggctcccggg

SEQ ID NO: 152902 - DNA, 436 bp, Homo sapiens
cagatctgcacgcagcactgttccgctagcgagaaaatggcaacagggcaagcgtccagcaatgggtaagcggtggggtcggtgcacgcaggcgtccagcaatgggtaagcggtggggtcggtccacccagggagcgctggtccccctggaaggaaacccaggctctaacgcggtccctctgaggaccctgctaggcgaaacgcgccggccatagaaagactgtcccgcaggagagggcggtgttcggcccggggtttgaggggtcgggaccaggaggagggacagcccggccgaacctgaacgcacttcaggccgcttgaacagcacacgcaggaactgcgccgacggaaaactttacttcgtgttccgccaccaaaaaaatatcgtttaaacaaacctgcggcagcttcccagctcccttaaaccaggatccca

SEQ ID NO: 152903 - DNA, 644 bp, Homo sapiens
  misc_feature (1)...(644): n = a,t,c or g
aagatacagatccaagggtgattcatcctanaactgatgaacagagatgcagacttcaggaagcttgcaaagatattctccttttcaaaaatcttgatcaggaacagctttctcaagttctcgatgccatgtttgaaaggatagtcanagctgatgagcatgtcattgaccaaggagatgatggagacaacttttatgtcatagaacggggaacttatgacattttagtaacaaaagataatcaaacccgctctgttggtcaatatgacaaccgtggcagttttggagaactagctctgatgtacaacaccccgagagctgctaccattgttgctacctcagaaggctccctttggggactggaccgggtgacttttagaagaatcatagtgaaaaataatgcaaagaagaggaagatgtttgaatcatttattgagtctgtgcccctccttaaagcactaaaggatgggcagaggttcaacccacacctccactttgcttttgaaggcccattcattagaccacttgtaaagattactccaacccagtttttatatctttggttcaaaacggcatgtctctccaacaatttaagtgcctgatacaaagtccaaagtataaacatgcaaaaaaaaaaaaaaaaa

SEQ ID NO: 152904 - DNA, 1875 bp, Homo sapiens
agtgacagcggcggcggtgccaggtcggccgtggtagcgtagggttgcgcggcccggaaacgcagagccggccaaagagcggcgcgacgtgagccggggccgtgcgcgaagagacctcgcgggcgcggagcgaaaggccggcgtgagtgagcgcggagacagtggccgccggcggcccaacccgtctatcccttcggccgccgccggcatgagccacatccagatcccgccggggctcacggagctgctgcagggctacacggtggaggtgctgcgacagcagccgcctgacctcgtcgaattcgcagtggagtacttcacccgcctgcgcgaggcccgcgccccagcctcagtcctgcccgccgccaccccacgccagagcctgggccaccccccgccagaacccggcccggaccgtgtcgccgacgccaaaggggacagcgagtcggaggaggacgaggacttggaagttccagttcctagcagatttaatagacgagtatcagtctgtgctgagacctataaccctgatgaggaagaggaagatacagatccaagggtgattcatcctaaaactgatgaacagagatgcagacttcaggaagcttgcaaagatattctccttttcaaaaatcttgatcaggaacagctttctcaagttctcgatgccatgtttgaaaggatagtcaaagctgatgagcatgtcatttgaccaaagggagattgatgggagacaacctttttattgtcatagaaccgggggaacttatgacattttaagtaacactagataatcaaacccgctctgttgggcaatatgacaaccgttggcagtttttggagactagctctgatgtacaacaccccgaggagctgctaccattgttgctacctcaagagggctccctttggggactggaccgggtgacttttagaagaatcatagtgaaaaataatgcaaagaagaggaagatgtttgaatcatttattgagtctgtgcccctccttaaatcactagaggtgtcagaacgaatgaagattgtggatgtaataggagagaagatcataagagaatggagaacgataaatcactcagggtgaaaaaggctgatagcttttacatcatagagtctggcgaagtgagcatcttgattagaagcaggactaaatcaaacaaggatggtgggaaccaggaggtcgagattgcccgctgccataaggggcagtactttggagagcttgccctggtcaccaacaaacccagagctgcctcagcttatgcagttggagatgtcaaatgcttagttatggatgtacaagcattcgagaggcttctggggccctgcatggacatcatgaagaggaacatctcacactatgaggaacagctggtgaagatgtttggctccagcgtggatctgggcaacctgcgggcagtaggtgtgccacaccccacgagccttcttagtgtgacaccaaaaccttctggtcagccacagaacacatacagaaaacagacatgacagaactgttcctgccgttgccgccactgctgccattgctgtggttatgggcatttagaaaacttgaaagtcagcactaacgcgatgggcagaggttcaacccacacctccactttgcttctgaaggcccattcattagaccacttgtaaagattactccaacccagtttttatatctttggttcaaaacgggcatgtctctccaacaatttaagtgcctgatgacaaagtccaaagtataaacatgctcctttcctctcttgctgctactcttgcttttgggaagttaccacaggggtctggcaggaaacctgttgtataactgtagacactctctaatggttctcaaagg

SEQ ID NO: 152905 - DNA, 1746 bp, Homo sapiens
tcactgctgacacgcctccttggtgacattaggcagtgggtaggcaaagagggagaagtccaggatatacttaggcagcacatcctgcagcagggcccggggggcactgcacaagtggtaatgcaggctttcggggctggctggccggtaccaggcctggcgagctggaaatcggacgtgaggtggtgcccgtacccactccagcacctgatttgcatcagcctccagcctctcataggagcccacaaagtcatagtgcacggcacaaggctggcacaggtggtacacgggcatccaatgctcattcatgcgctcagggtcctcatccaccaggtatctcaggaactcggggaatgtgacatcgtcgcctgcagggctgggccccgctccagccctgtaccgcctcactatctcagccccatagcgttgctggtactctcggatctcgccaaacttgttgcggtaggcagagaggaggcgttccaagggctcccgcacaaacaggaacttaaagtagtgctgcaggcggtagcgaatctcctcaggccgcaggtcggccaggaacaccaggtcactgcggtggtccatcttgaggcggacgtccacgctgtccaggacgcctgccagcaccttcatcacccgcttccagttagagcaggccaccttggggacgtagcagtagaggaagcggtaacggtcacttacgaggatgtggcgcagcagggtgcgcgcctgccccaccggcaagtcccaggggtcccggggcatgcctggctgtccgcacaccgcccgcaggtcctgttccggacgtcctgccgcacttgcaagtccgcgtccccagccctgccggtcccgaacctgctcgtgaattctctcagagactgcagctgtcttggcaaacataagcacccctgaggtaaggcggtcaagccgatgcaaggggtgtagctccttgagttggtgctccttgcctaggatgaagataactgtgttgtgtcggaagcggccacaggggtgaacgggaatggaggaaggcttgtctacaaccaccacatcttcgttctcagctagcaggcgaatgggctctgctgtgactggtggctcatgcctgtgcactgtgttccgcaagaaatcattgtccttgagcacgatgttgaggtcctgcaccggcttctcgttgagttgcaggcggcccgcccggacggcggcctcatagtaggccaggggctgagctcggaactcggtactgaagacgtgcagcaagctgtggcccacccagcgacctttgcagtaggtccggaagtcaaagtaatagggccgcaccttacgcaggccgccctcgaagtaataactggtttctgcaaagtgctcatctccgaagctcaccccggtccgccgcttcttcgggggcggcacgacacgctccctggttgcgccccgccgcttcttatgcttgcccgggcctggggctgcagccgagggatgctccccgcctactggggccggctccacttcccggccagccggcttcgggggcccgggggacagctcaaccttcgcgtcgccaccagcgtcaccgttttgctgatgcgaagccctcagcccgccctctgtcccaacctgggtagacactgtttctgccattgggcccttatcgccactccaagtcctggtaaagctagggcgcctaaggtcgtagcgccaatgtccaagaaccctgagccatccgcggcggtccagccacat

SEQ ID NO: 152906 - DNA, 1048 bp, Homo sapiens
gggaggaattcgctgcagtctctgagagaattcacgagcaggttcgggaccggcagctggagaatgagtacgtgtgccgggtggaaggggagttccccactgaggaagtgacctgtaaagaacccatcttagtggtgtcttacaaagtaggggtgtgccgtgtagatccccggggcaagccctgtgagacagtgttccagaggctaagctacaatggccagtccagtgtggtacggtgccggccactcacaggccgcacacaccagattcgagtccaccttcagttcttgggccatcccattctcaacgaccccatctacaactcagttgcctgggggtccttctcgaggccggggcggttacattcccaagacaaacgagggagttgctatttgtacctgggtaggcagagcaccaggccaaacagagcctggatgtgctagatctctgtgagggtgacctgtccccagggacttcacagactctacggccccctcctcagagttgggcaaggacgacctgggaagagttggctacagcttgcccagaagatgggaggaaagtaagctgaggcagcccctcaggagttggacacaatagccttggcatcaagagaaggcagttgaaacagatgttcatgaatcaagagacagaccccactctgtgcaaaatgccggctggtgcgacaggatcccttgccccaagaccttgtgatgttcctacatgccctaacgctataaagggccaggctttgagtacttttcacccaatgcctgcctgggcacaggatgactggcaaaaggactgagggtgtggcccaatggagggattgcttcttggggttttgacaaggatgggctattagggcaagggcttgaccccatgggctaatacttggggcttctattggaatgaggacgggcttctaaagggacctgctcatacttgctacctccttccagtgggaatttggagactttttggtttgtaaatatatccctttttctaacatcaaaaaaaaaaaaaaaaaaaaaaaaaaaaaaaaaaa

SEQ ID NO: 152907 - DNA, 863 bp, Homo sapiens
cttaatttgataaaggttatttataaaagacttctaggtagtatcatacttaatggtgaaatattaaacacatgtccttaagttcagaaacaaggcaaagatattcacattcatttctgttcattattctaaagaaataaggcaagaaaaataagcaaaaaataaagtttagacgttaggtaagactttcttttattggtattaacaggattatatatatatagaaaatccaaaatccacaaagtattggaataaataattgaatttataaatgtcaccagctataaagtcaatatacaaaaagatattgcaattctacgtactagccaaaaacattgaaaaacaaattaaaaatacaaagcaaaatatactagaaataaattaaacaaatcaagatttctacaatgaaaactataaaacactcttgagaaaagttaaagacaacctaggtaaatggacaattataccatattcatcaactggaaaactcgatattgtaaagatgtcaattatcctcaggttattttataaaaccaatgcaattacaggcatagtaccaaaaattcatttgtgaaaattaatcctgagattccaaaattaatttaggaaacatggggaacagagaaggcaagacaatcttaaagaataaaaaagttggaaggctttcactaccagatttccaaaaatattacaaagcaacataaattaagatagtatggtattgatgcaagaaaagacaaatgaaccaagaggcagagatcacctcagcaaagaggaaaccatggtctctttgataaatctatatacacacaccttgatcctacctcacacgctacaaaaaattattcaaagtagatcacaga

SEQ ID NO: 152908 - DNA, 456 bp, Homo sapiens
acagctttttttgttttttttttttttaaattaatagcttgtttattagtaatatgttacattattaaagtgcattgagaagaggtgcaggggccaaagctggaaggccactggccccagccactgccctgggtggccagacacagccggagaagggcccagctcccccctgaaatggatggacagggctgggggcagggccgcctgcctggagagctcggcccaggccatccccaccggaattttcacagtttagcctaagttataacatgtcctgagcgaaggtgggaggctaggagcatggaagcacagcccctggggaaggggggcttagaggaagggaggaggccccccgccccccaaccctcaacgccaagggcagagtcctggaacctccccctgaggacccggctcgtccttccaaatgaacacggtgaaactagggctcagttttct

SEQ ID NO: 152909 - DNA, 880 bp, Homo sapiens
ctgaactctcccttccaaaaagtagaagtcatccctgtcgagaaggaccaacactgtgcactggtcagctcacagcaccaagaggcccccttcctgcttttctgtcatgtgttcccccagtaatcattttctgaccaccctgaaagcaaagcctgggtgggtactggcagtgcaaaggccagtaggccaccatccctggccccaagctgcacaagcccacagacgagggtcctgtagaacaaacgctttgatgtgcttctcaggtagcctgcggcccagtccagggctttggggaggatcagctgcatggaagagtgaatgccaggctgaggtcatcagggccctgaggaacttggacgtggggtcttcactctcatggaactgcccttctaactggagacatagacaatataccagtggttctcaaccagagtcaattttacccccaggagacatttgacaatgtctggggaaaatttctggcctatcacagcttattgaaggaggttgcctactggcatcctagcaggcagagtgagtgctgctgttaaacccacccacaggacacagaacagtctcctgcaacaaagaattaccccaaggccctggcgcggtggctcacacctgtaatcccagcactttgggaagccaaggcaagcggatcacttgagcccaggagttcgagggtcagccctgggtaacgtggtgaaacaccatctctgcagagaatacaaacattagcccaggtgctgtgctgtgcacctgtggtcccagctactcgggaggttgaggtgggaggatcgcctgagcctgggaggtctagactgcagtgagccatgatcattgccactgcattccagcctaggcaacagagcaagac

SEQ ID NO: 152910 - DNA, 904 bp, Homo sapiens
tgttttttaagggggtcatcccaaaggtctttgaaggaccaaagatagtacttctaaaatttgacagggcttcattttgattttttctccccaaatagttgatagcaataatcaataccagttgagataccaaagaggcagccctttcccctgattccccacacccacttgtaggcctttgcctagaatggtcattaatacgtatgaatcagttgagctaaatattatttagaacgtggcaaaatgctggctgtaaattaaatcaaagataagtaattcaaaggctttaactgaaaatttctgaaaagatgtttgctgtgctattaaagatgttaaataacaaaaattaaaagaactgagaaagactattccatgaaagcgcataatagtgaagaaaaaaatgaagttcccttggcgttagccaggtgcatgcaaatctttttatctgaatgtagaaatgcaaaaagtaccaggagaacatttctgaaagtagtcaagtatgttttaacatttatctccttataatatgcaaactgccaaactggagttatgtttttagttggtaattgatatatatatatatatttgagatggagtttcactcgtcgcacaggctggagtgcagtggcacgatctcggctcaatgcgccctccacctcctgggttcaagtgattctcctgcctccacctcccgagtagttgggaccacaggcgtgtgccaccatgcctggacagttttggggtttttttgtatttttagtggagacagggttttgccactctgaccaggctaatctcgaacccctgacctcaggtgatccgccagccttggcctcccaaagtgctgggattatttgaggtcaggagttagtgatcagcctggtcaacatggtgaaacctcggc

SEQ ID NO: 152911 - DNA, 425 bp, Homo sapiens; identical to SEQ ID NO: 133002

SEQ ID NO: 152912 - DNA, 516 bp, Homo sapiens
tcaatgagcgactcggaagaggagccaataagcggagaggttgctggggtagccggcgtgggcggcgtcactgagccgcgccagctgagccaggtagggccctaccctcttctgttgctttctccctgtggctcgcgccgtcccccgccgcccgtcgaccccgcttccatgtccctggcggacacagctcccaggaacctccacgcccatggccactaggcagagggaatcctctatcacctcctgctgttccacctcgagctgcgacgcagacgacgagggcgtgcgcggcacctgcgaagatgcttccctgtgcaagaggtgcctgtcgggcgcggggttcggggccggcatctggggcgcgggcctaggtgggaggtgggcctgcatctgaagaatacgctcaaggctggcagggatgcagcccccgcctcgcacgaccctcgcttcccacagacaagatctagcttctgttaaatgttctcgtaacaccctgttcatcttcttggtggtcat

SEQ ID NO: 152913 - DNA, 384 bp, Homo sapiens
atgacggcagggctaagacagcggccttgggcggtgactgggaagaacgttgaacaccgtgtttgggctgaagaaaagagcaagggaagaggtgaggaacttcaggtgagggttgatgtagatgttacttacacagatggacacatactggattcaaagagatatgccgttattggagcagatctccgagacctgtctgaactggaagagaagctaaagaaatgtaacatgaatacacaattgccaacactcctgatagctgaatgtgtgctggtttacatgactccagagcagtccgcaaacctcctgaagtgggcagccaacagttttgagagagccatgttcataaactacgaacagaatgttaagagccaaatcttctga

SEQ ID NO: 152914 - DNA, 648 bp, Homo sapiens; identical to SEQ ID NO: 128409

SEQ ID NO: 152915 - DNA, 1457 bp, Homo sapiens
  misc_feature (1)...(1457): n = a,t,c or g
cgtcactgagccgcgccagctgagccaggtagggccctaccctcttctgttgctttctccctgtggctcgcgccgtcccccgccgcccgtcgaccccgcttccatgtccctggcggagcacagctcccaggaaccgtccacgcccggtggccagctaggcagaggggaatcctctattatcctcctgctgttccacctcgagctgcgacgcagacgacgagggcgtgcgcggcacctgcgaagatgcttccctgtgcaagaggtttgcagtaagcattggctaactgggcatgacccttacatacaggaccttggtgagactgtctaaacagagagaaagcccctgaaatcaacagaggatattttgctcgagtccatgggtgttcagttcagcttattaaaggcatttttacgggaagacagaatgtcattgttcaaattgttccaaccttggggggcagggcatgggatnaccacctttctgggagattaaaggatgaagatctttcttcccaagtaaatatttttgaggttgactttccaatgattgtcacggagaaagctgcacagtatcaaatggctagccttccccttatccagccccattctagaactgcattcagaggacacacttcagatggcctctgattgcatttgcagatggacacatactggattcaaagagatatgccgttattggagcagatctccgagacctgtctgaactggaagagaagctaaagaaatgtaacatgaatacacaattggccaacaccttgaatagctgaatgtgtgctggtttacatgactccagaggcagtccgcaaacctcctgaagtgggcagcccaacagttttgagagagccatgttcatattactaccaacaggtgaacatgggtgatctgtttgggcagatcatgattgaaaacctgcgtggacgcccagttttgacctggcgggagtggagaccctgcaagtcattagagtcacagaaagaacggctcctgtcggaatgggtgggaaaacaagcatcggcccgtccgaacatgattggagtttgtaccaccagggttaccctcgaagctgaagtgaagcaggatagaatcacttgaaatccctggatgaaaattgggagctgctggagcagctcattgcgggcattactgccttttgctgggcaacccaaaggaggaaatgaagccttgggctgaaggagataacttattaatctgtcggaaggcttatgccgagccagaagccgaagccacttgaccctcctggaggagacctgcaagctccctgagcggtgggcgggccctcgtccgcaggtctcatcccacactcttgaagaagccttggtcactacagtggtccgcacatgttcctcttcctgttcctgttgacatgtcgttgtttaaataaatctcacttgccaccagtcaaaaaaaaaaaaaaa

SEQ ID NO: 152916 - DNA, 509 bp, Homo sapiens; identical to SEQ ID NO: 121686

SEQ ID NO: 152917 - DNA, 1211 bp, Homo sapiens
atgcagctcaagccgatggagatcaaccccgaggtgagcgccaggtgcaccgctacccggagagcgcgaggccgagggagggggagccgagtcgctgatcggttcggttttgcctttttctttgcatttgcctttcagatgctgaacaaagtgctgtctccggctgggggtcgccggccagtggcgcttcgtggacgtgctggggctggaagaggagtctctgggctcggtgccagcgcctgcctgcgcgctgctgctgctgtttcccctcacggcccagcatgagaactttaaggaaaaagcagattgaagagctgaagggacaagaagttagtcctaaagtgtacttcatgaagcagaccattgggaattccttgggcccattgggccctaattcaacgcaggggccaaatatcaaagaccaactgggatttgaggatggatcagttcttgaaacagttttctttctgaaacaaaaaaaaatgttcccctgaaagacagagcaaaatgcttttgaaaagaatgaggccatacaggcagccccatgaatgcccgtgggcacagggaaggcccaatgtcgggtagatgaccagggtgaatttccatttttattctggttaaccaaccgtggatgggccaccttctatgaacttggatggaccgaatgccttttccccgtggacccatggcccccagcttcaggaggacaccctgctgaaaggacgcttcccaaggtctgcaggaggaattcaccggagcgtgagcaaaggagaagtcccgcttcttctgcccgtggcttctcctgcaaaggcagccttaatgctctgtggggagggatttgctggattttcccctctttccctttcaaacatggaaaatatattacccccccatgccagtctaaaatgcttcagtacttgtgaaacacaggctgttcttctgttctgccagacacgcccttcccctcagccacaccccaggcacttaagcacaagcagagtgcacagctgtccactgggccgattgtggtgtgagcttcagatggtgaagcattctccccagtgtatgtcttgtatccgattatctaacgcctttaaatggctactttggtttctgtctgtaagttaagaccttggatgcgcgtttaattgtttgtcctcaaaaggaataaaactttttctgctgataagataaaaaaaaaaaaaaaaaaa

SEQ ID NO: 152918 - DNA, 435 bp, Homo sapiens
ccataaagtggtattaaaactggatctcttttcttccatggcactactctcattttgaagtttatgaacggtacgacagtgtattgtaaattccctttagtttgttacagtagccaattgaaaatgtatatcccaaaatttaaaaaaaaaagtactagcagcaataaaattgcactagttttatctggtacatacaaaaacagcctggagcctagatctggtgcttcttctgtgctgtggtttaccccaaacctttaggttgtttattcattcagattagatagactggagccataaagttaatttgcacctagctttttggagaatagccatgattaactgctattcgtggtgggggtgggggggaaccctatgatttactatgcagatgaagagggtaggaactaaataaaggactttgtaagccaaaaaaaa

SEQ ID NO: 152919 - DNA, 2487 bp, Homo sapiens
ggaacgagggaggaagatggcggtggagtcgcgcgttacccaggaggaaattaagaaggagccagagaaaccgatcgaccgcgagaaaacatgcccactggtgctacgggtcttcaccacaaataacggccgcccaccacgaaatggacgagttctcccggggaaaatgtcccgtccaccgagttgcaaatcttcccactgggatggatgcaactttgaaagaactgacaagcttagtaaaaagagtcttacccagaagctagaaagaagggcactcacttcaaattttgcaatcgtttttacagatgttaaaagacctggctatcgttgattttctttcttacagagttaaggaggattggccagcacccatgtctggcagaaaggggactggatgattcccatgaacccctgcagtcgcaagaagttcccagataggagattacttgagacatagcgaattaccccctcccaaatcggggcacccaccctccttccagggcgcatgagacccatattaaatttctatttactatttgttgaatttatttttccgtcagttatgtaaaataaaacatactcttcttcctcccctgattattgccattaagcctttaaattctaaacgaaattataatgcgatcgatctatttaggagttagatttggatgtgctattgtatgattacgaatagtctggtatgtttcaagcccttctgtaaaatatgaagaaaagtgctcttagcattctgtgtaaaactgtactgttaaatatatgtgtgtaatcagcctgagtgtgaaagttaatggaggcctgggaacagggtttatactaagtagtggaggagcgtatggttaagcccaaaggggcaggaacaagaaagccacgggattgtatggaaatccaaacatgagtttgtgggtgtaggactgctgtatgcagttgggaaaggacacgtgagagtgagctcaagtggcagcagaggcagtttggaataagctgcggcaagttgaagaagctgtgttggacgagattgccccgccttgatcagggtaccatgacataaaaggttaaagaacaggcaacacaatgagcacttaagtttttaacatgtggggaatagggccattttaaaggctggaacccagttcagaggaaacaagggtttgggtagaggtagaaaggtttaattaaccctggagatctgccaaatggagggaggggtgaaaggaggaatccaagacccgagggaagaagagcccaaggacaaggtccaggttgaatgaagtaggaggtgttcacacatccctcttgtgtgcctaggtagtggcgtgccatctgatcctgagaggcagtaaagcagtgatgaagacagtgcagcagaacattgaagtcctgattgcagcgagtgactctgcaaccttggataaattatttcaatctttattttgtaaaacggagataacggcctataggattgttaagactgaatattttaaaagagcttagaatggtgcctgacaaatgagaaacaataaatactgattattggccataaagtggtattaaaactgggatctcttttcttccatggcactactctcattttgaagtttatgaacagtacgacagtgtattgtaaattccctttagtttgttacagtagccaattgaaaatgtatatcccaaaatttaaaaaaaaaaagtactagcagcaataaaattgcactagttttatctggtacatacaaaaacagccatttaaaatctgatgattctgtggaattggtgtccctgttagcaatggcagagaccaccctggagcctagatctggtgcttcttcctgtgctgtggtttaccccaaacctttaggttgtttattcattcagattagaatagactgggaccccaaaaagttaaatttgccaccccagctttttgggagaaatagccatgattaactgcctattccgtggtgggggtgggggggaacccctatgatttaactatgccagatgaagagggtaggaactaaataaaggactttgtaagcccaaagtggttgggctgcctttgtcaaattcccaccctttgccttggttcccaacatggaatttcttgtttaaagatttcagtatcccatcaaaagtacagttagagaatacctagtgaatttattgaatataacgctaagaatcaaaagacttgtactagtttacctctggctttggtaagcgtggctttgagtaataactgagctgtttccccgcatataaaatacagatatgtatgtagtcatcatgacagcaaaaataaaaaaaggggggggccctttaaatgactccctaaggggcccaagtttaacggggggctggaaagttttatctttctttcttattagggagccaattaaaacctccttgggattctttgggagggaaccttttttcgggggggggatatatgggcacactcccttaagaatt

SEQ ID NO: 152920 - DNA, 506 bp, Homo sapiens
tttttttttttttttttttgaaaacatccactttaagctttattacaacacattgtctccaaatacaaagggaggggccgggagcagaaggtgcggctgtggcgggaggggctccaaggggggctgaagggccggcagccacgtctacagagactggaggctcagcgggggacctgcaccctctcctccgctggacttcccagcaaataacaggaggggccgggtccattttggggcgatcccaatgccaggcagtggccaggtgggaggggccggagagaggcttggagaggactcagggctgggtcaggtgaaagccaccaggtggggccctggcccgcctcccgcagcactggaggaggcagtggccaggtgggaggggccggagagaggcttggagaggactcagggctgggtcaggtgaaagccaccaggtggggcctcagcccgcctcctgcagcactggaggaggcagtggccaacacaggaccttcgcccccctgctg

SEQ ID NO: 152921 - DNA, 768 bp, Homo sapiens
ccgccccggaattcccgggtcgacatttgcttctgacacaactgtgttcactagcatcgctcatacagacacgcatggtgcatctgactcctgaggagaagtctgccgttactgccctgtggggcaaggtgaacgtggatgaaagttggtggtaaggccctgggcaaggctgctgggtggtcctaccctgggaccccaaaaggtcctttgaagtcctttgggggaatctgtcccaactccctgaatgctgttaatggggcaaacccctaaaggtgaaaggctcaatggcaaaagaaaaagtgctcgggtgccctttaagtgatggcctggctcacctgggacaaccctcaaagggcacctttgcccacactgaagtgagcttgcactgtgacaaagctgcaccgtggatccctgaagaacttcaggctccttgggcaacgtgcttggtctgtgttgcttggcccatcacttttgggaaaagaatttcaaccccaccagtgcaagcttgcctaatcaagaaaattggttggcttggtgttggctaaatgcccttggccccacaagtatcacctaaagctcgcctttcttgctgtccaatttctatttaaaggtttcctttggtccctaaagaccaactactaaactggggggatattatgaagggccttgagcatcttggattttgcctaataaaaaacatttattttcatcgcatacaagaataaaacaagcgcggccgattaagaggatacttcaggggcgcaagat

SEQ ID NO: 152922 - DNA, 420 bp, Homo sapiens
  misc_feature (1)...(420): n = a,t,c or g
accggaagcgctccgctgtacctggatcctgctcctctgggttgaaacccgggcgccgccaagatgccggcttaccactcttctctcatggatcctgataccaaactcatcggaaacatggcactgttgcctatcagaagtcaattcaaaggacctgcccccagagagaaatgaagctgataggaccttgatatatataactctctacatttctgaatgtctgaagaaactgcaaaagaagtgatgagagcctatttacaacagctaaggcaagagactggactgagactttgtgagaaagttttcgaccctcagaatgataaacccagcaagtggtggacttgctttgtgaagagacagttcatgaacaagagtctttcangacctggacagtgaagggagcccgggcagccaccgtct

SEQ ID NO: 152923 - DNA, 974 bp, Homo sapiens
tttcgcttccgcctacctcgcccaggctgccagaccggaagcgctccgctgtacctggatcctgttcctctgggttgaaacccgggcgccgccaagatgccggcttaccactcttctctcatggatcctgataccaaactcatcggaaacatgggcacctgttgcctatcagaagtcaattcaaaggacctgcccccaagagagacacaaggataccagatattgtggatgaggccatctttttaccttcagggcccaatgtcttctttcaaaaactatgaaattaagaatgaaagctgataggaccttggatatatataactctctacatttcttgaatgtcttgaagaaactgcaaaaagtgccaattcccaaaagcccaaggtggaggaaaggaaatgttttacgctggggaatccactaatttttcccatttcctgggagagcctgggtttttcccactttaaccgccattttatgcccaaacctggccaaccacccaggaagatgaagtgatgagagccctatttaccacacagctaagggcaagagactggacttgagactttgtggagaaagtttttcggaccctccagaatggataaaccccagcaaagtgggtggacttgctttgttgaagagacagtttcatgaacaagagtctttcaggacctgggacagttgaagggagcccggggcagcccaccgtcttcccagaggccctggggcagcatttttccagcaagatgttacacaatctttttgcctttatctcgtaaagttttatagagacgagagaagagcatgtctttacttgaaaaactcttgatcaagaatttgggtgggagaacacagaaactgggttatccaagggtgatttgaaattttgtgcgagcattaaaactggcgcctccataagaataagtaataataaagaaatttctaacattccaaaaaaaaaaaaaaaaaacatt

SEQ ID NO: 152924 - DNA, 471 bp, Homo sapiens; identical to SEQ ID NO: 132925

SEQ ID NO: 152925 - DNA, 1527 bp, Homo sapiens; identical to SEQ ID NO: 132926

SEQ ID NO: 152926 - DNA, 721 bp, Homo sapiens; identical to SEQ ID NO: 132927

SEQ ID NO: 152927 - DNA, 981 bp, Homo sapiens; identical to SEQ ID NO: 132928

SEQ ID NO: 152928 - DNA, 1742 bp, Homo sapiens
  misc_feature (1)...(1742): n = a,t,c or g
gaggcgaaccggagcgcggggccgcggtcgccccgaccagagccgggagaccgcagcacccgcagccgcccgcgagcgcgccgaagacagcgcgcaggcgagagcgcgcgggcgggggcgcgcaggccctgcccgccccttccgtccccacccccctccgccctttcctctccccaccttcctctcgcctcccgcgcccccgcaccgggcgcccaccctgtcctcctcctgcgggagcgttgtccgtgttggcggccgcagcgggccgggccggtccggcggggccggcgatgatgtgtgctgctggacctggccttggaggggaatgtgcctgtcttcgggttcgtccctcttcttggtgctcgtggctgatgcatttcatggctatcatctacacccgattacacctcaacaagagggcaacggacagacagccactatagcaagctcccaggtgtctctcttctgaaaccactggaaaggggtagatcctaacttaatcaacaacctgggaaacattctttgaattggattatcccaaaaatttaatttacatacaatgctttttgactagtatgaagtgctcctttgtgtacaagatcatgatgatccagccattgatgtatgtaagaagcttcttgggaaaatatccaaattgttgatgctaagattgtttataggtggcaaaaaagttgggcattaatcctaaaattaataatttaatggccaggatatgaagttgcaaagtatgatcctatatgggatttgtgatagtgggattagaaatatttccagatacgcttactgacatggtgaatcaaatgacagaaaaagtaggcttgggttcacgggctgccttacgtagcagacagacagggctttgctgccaccttagagcaggtatattttggaacttcacatccaagatactatatctctgccaatgtaactggtttcaaatgtgtgacaggaatgtcttgtttaatgagaaaaagatgtgttggatcaagcaggagactttatagcctttgcttcagtacattgcgaaagattactttatggccaaagcgatagctgaccgaggttggaggtttgcaatgtccactcaagttgcaatgcaaaactctggctcatattcaatttctcagttcaaatccagggatgatcaggtggaccaaactccgaattaacatgcttcctgctacgataatttgtgagccaatttccagaatgcctttgttgcccagtttaattaattgggatgggcaggcccacccatgtgttcagatgggatattatggtattttttcanggggccattgcctgggcatggtttatatttgactacattccaactccaggggtgtcccagggtggccacactgtgtttttcaaaacttggattaatgcagtcgccctggttcatccgcgaatccatgacaatatacatttttttgtctgcattatgggacccaactataagctggagaactggtcgctacagattacgctgtgggggtacagcagaggaaatcctagatgtataactacagctttgtgactgtatataaaggaaaaaagagaagtattataaattatgtttatataaatgcttttaaaaatctaccttctgtagttttatcacatgtatgttttggtatctgttctttaatttatttttgcatggcacttgcatctgtgaaaaaaaaaagaaacacatctgtagtcgaggccaatcaggg

SEQ ID NO: 152929 - DNA, 2358 bp, Homo sapiens; identical to SEQ ID NO: 150777

SEQ ID NO: 152930 - DNA, 1328 bp, Homo sapiens
  misc_feature (1)...(1328): n = a,t,c or g
ttttatttttttgagacagagtctcgctgtgtcacccaggctggagtgcagtggtgcgatcttggctcactgcaacctccgcctcccaggttcaagcaattttcctgcctccagccttccaagtagctgggactacaggcgtgcaccaccacacctggctaattttttgtatttttagtagagacgtttttttcgccatgttgcccaggctggtctctcctgagctcaggcaatcggccaccttggccttctgaaagtgctagaattacgggcatgagccaccgcatccagccagaaagatacatatctaattctagaaataggcatggcagttattcagttcattagttaacaggccatgtgctggacctaaattaaaatttcttggatattgtgtatttaacctgaagtattgaggctagtttttttgttttgttttttgggtgctgaacattatgggtctaattctttgggcttcttaggaacattttaaaaaatctatggttttgctatcagccaaaggtaaatggtgttccacactaaccatataaggttactaaccttcattatacnggcaaagctaaaaagtggtgggatatttggggtcttaatgaaaattgtatcatttaattccataaatattaaaatatttgggtaccttttaagctttttttctttccttctataatggtggtacaagttctatattcattcagtttaatctcatttgaaattgtttaaatcagagtacatgtaaatatttgtgggttttttttttttggtttatagactcgagctttccttttacacagttttttttagggaaaaactaaagctattaggaaattctaaatcttgttgatgaagagttgggctttctttgatataattaataaaagggatgtatggtatttatggctgggtaggaccccagaaagccactttgtattaccagaagtgttaaaggctgggttgcctaataagtatgggaaccagaaacaccctctcccttgggtctccccctagtaatggttcaaagttccttcccccaggaagtcctaccatattaataactttggttccattatcctttccccttatagcatccattttccctttttgtagagtggaaatcagactagctgcctaaacatattaaggttaatcctccaaaaatgtactggggaggcattttagtcccaacaacttacatttggctttggaagttgttaacaaagcatagtcgatgtttttaaatcaaacataatttgtatcttggaacttacattttgacatttgaataaaacaaaaagactaaatgaaaaaaa

SEQ ID NO: 152931 - DNA, 467 bp, Homo sapiens
ggccagcaccacaaagcctgctgagcgcacggcatgtgtcagccttgcccacacccgccagccggctgctctggccttccaccgatgacccccaaaacgatgcccagggccgtgggtctcccctgtgtgtgccagctcggagacgttcctctgagccccgcaagaactctgcaatgaggctcttcttgtagatatcaaactggaaccactcgcggtcactccagatgctgcaagcagcccctcattgaccttcctctcatcgacttctgcgataccccagaagcacacgtggctgtaggatctgaaagcaggcctctgatcgacctcatgacaaacactccagacatgaataaaaatgtggccaaaccttcaccggtggtgggacagctcatagacctgagctcccctctgatccagctgagccctgaggctgacaaggagaacgtggattccccactcctcaagtt

SEQ ID NO: 152932 - DNA, 273 bp, Homo sapiens
atttgcaagtattcctgcaaatagctcccggcctctgtcaaacatcagcaagtcaggcagaatgggacacgccatgctgcggccagctctgcctgcaggccctgtgggggcatcctcctggcaggccaagcgggtcagaatcttctcaattgaataagactagaagtatcagacggcgacattcctgtctaaattccaagacaaaggttatgcctactcctacaaatcaatttaaaattcctaagttttctattggtgactccccgaaagctt

SEQ ID NO: 152933 - DNA, 472 bp, Homo sapiens
  misc_feature (1)...(472): n = a,t,c or g
gttggcagggtcactgtccacagcaccccggttagacgctcatctgggccaggaccacaaagcctgctgagcgcacggcgtgtgtcagccttgcccacacccgccagccggcgctgctctggccttccaccgatgacccccaaaacgatgcccagggccgtgggctctcccctgtgtgtgccagctcggagacgttcctctgagccccgcaagaactctgcaatgagaactgaaccaacaagggagagcaacagaaagacagattccangctggtggatgtgtcccctgacaggggttctcctccttcccgtgtgcctcaggcacttaacttttctccagaggaaagcgattctactttctccaaaagtactgccactcatcgacttctgcgataccccagaagcacacgtggctgtaggatctgaaagcaagcctctgatcgacctcatgacaaacactccagacatgaat

SEQ ID NO: 152934 - DNA, 1875 bp, Homo sapiens
tcagggaaacattaaatcaccctccatctctactgaacatcctgaacaacaacagcgccgcagcagcaaggacttgccttccttcttagggtcatccatgttcacgtcccctgcccggcaggctgaaggctcatcgcggccgccgcctccttccatggagagagcagcctgcagtgggggttggcgggtagaaggcttctgcatgaggtggacggtagctgccttgcggatgagccgctcggtcaggggcgagttgggcttcaaggcatcacgctccatcagaaggctccgggctacgttcttatggacgctggaggtgcagtttaaggccgcgtgaatcagcagctggttgaagacgtctctctgggcattgctcccaccgagctggacgatccggtagcggatgggcaggagcagctccaggacgcggtcagggttcccgtcctcagcctccaccagggcctggcacaggggcagccccacgtctcgggccaggaggtgctggcagttctcccctggggatcttccagcctcagtttgctcatctgtaagcaggcataacagtgccaatctaacagaaccgtcaggattgctgataatacaggcaaaggcctggcacctctcggcagggtgaggacccccaccccgagaaggcccctctgcatactcgctggcgtcccgcagggtggtcagcagctcctgtgtggtctgggggtcgtgtgcacccagggatgccatcaggaagtgtgcgtcattgaacagcaggatgtggtctcggctgtgcttccgggccacaggcaggacatcctgccaccgctggcccacagacactccttccatctgcaggcggtagagcatggagcagctgtccaccacgtccagcattgcatcgttggcctgcaggctgggaaggatgtgggtatcgtagatggtcagcgcggcctcatattcgccctggaagaataaagttctccttattaaacccttctcaatcagatataaagcccagtgccaatagttatgacaagccaacatatcagagtccttccagaaggtctctgagtgctgcatgaattccaacccatccttgatctctgctttcatctcgtggatgtgagcgacggtgtgcaccgaccatgcgtcagcctggggctgcagacacagagcccatgtgttaccactcctggccccatcacagcctgcttttcctgcccagtagttgtctgtggggtgctggtgttgaagacaaagagttggtgcctctttggcgagtttttctgcctggtcgtagaagttggtttccatcaagccaaaagagtagatgcctttcacatagctgcttagggggatgtcaggtgtccagaaggggtaaattcgagcaacagaatctctcatctgttcctgatagcccaggtaaaaataagcatcatgggaaaatttcagggccaacatgtctgtcgggtggtcctggagaatctgttcccatagttcacaggctttcggaaagttcccattggcaaatgtctctactgcagacacgtgcagctgctcccgccttgtcagcggctgggttcttgaaatctccaccattgtcttcacagccaggtccagctctttgtccagcttcacggagcttccagtgccaatcagcacaaggccagtagccatggcgtggcccatcacaaaggttggatctgctgctttgagctttgacaggcagccctcgatgccaccgagactcttgtcattggtccattttacatactgggtcagcgtggcatcgaacagcttgcaggcttcgttgcttgtggtggagagcgggagcctcgcatccttccaggcctggcagtcgcgcagaggcgaggctgcggccat

SEQ ID NO: 152935 - DNA, 565 bp, Homo sapiens
gcaagccggcgctgcatctggacttccaccgatgacccccaaacgatgcccagggcgtggctctcccctgtgtgtgccagctcggagacgttcctctgagccccgcaagaactctgcaatgagaactgaaccaacaagggagagcaacagaaagacagattccaggctggtggatgtgtcccctgacaggggttctcctccttcccgtgtgcctcaggcacttaacttttctccagaggaaagcgattctactttctccaaaagtactgccacagaagtagctcgggaggaagccaagccgggtggagatgcagcccctagtgaggtgggcggattacttgagcccaggagttcgggaccagcctgggaaatgatgtgaaactcctgtccctacaaaaaatacaaaaattagccgggtgtggtagtgcatgcctgtagtcccagctacttgggaggctgaagtgggaggatggcctgagctcaaggagatgcaggctgcagtgggctgtgattgtgccactgcactccagcctgggcaccaatgtgagaacctgtcttggaaaaa

SEQ ID NO: 152936 - DNA, 2115 bp, Homo sapiens
acattcttcttttggccgatgaaaaatttgacttcgatctttcattgtcttcttcgagtgcaaatgaagatgatgaagtcttcttcggaccctttggacataaagaaagatgtattgctgccagcttggaattaaataatccggttcccgaacagcctccgttgcccacatctgagagtccctttgcctggagccctctggccggggagaagttcgtggaggtgtacaaagaagctcacttactggctttacacattgagagcagcagccggaaccaggcagcccaagctgccaagcctgaagaccctcggagccagggcgtggaaagattcatacaggagtcaaaattaaaaataaacctctttgagaaagaaaaggaaatgaagaaaagccccacgtctcttaaaagggagacatactacctgtcagacagccccttgctggggccccctgtggggaatcatgcactgctcatgctgcaagtcaggcagcgactcagaggaagcccgggaccaaattgctgctgcctcgagcggcctctgttagaggaagaagcatccctggggctgcggagaagagaactgctaggatgcctaaaggaagaagaaaaagaaaataacaggtgttattttgaggatgaggatgttgtggaggatgaggagaaggctgaggatgtggagaagctggaagctcacgcattgctgcccaagaaagagattccagctagtccttccaggacaaaaatcccagctgagaaggaatcccaccgggatgttctccctgacaaacctgccccgggtgctgtcaatgtgccggccgccggaagccacttgggccagggcaagcgggcgatccctgttccaaacaaggtaaataacgagatctttgctgattctgttttttcacattttgccccagttggggctgaagaagaccctgttaaaagcacccggctctaccagcaatctcgcaaggaagtcctcctcggggcctgtttggagcggggcatccagtgcgtgcacatccccagcagtgggcaaaggcctctgctgcacacccgtgtgtcccgcaaggcccgcgagacccctgcactcctgctgctgcaagatgacaccttctcggccctggctcatgtggcagtgcagagagggactcgagtgtccctgaggttctggcggaacctgggtgctgccactcatgtgacaggagggctggaagaggcagcgggcagagtccacggccccattttggaagtagtgaggtgctggggtgaacatggaggcctggtgaacgcacaggtgactccccggacagctcaacaccaaagctttcgcgggcacagcggccgcagtcgtgcacgtcagttggcagctcacgacactgatgttgtgtttgccagggtcactgtccacagcaccccggttagacgctcatctgggccagcaccacaaagcctgctgagcgcatggcgtgtgtcagccttgcccacacccgccagccggcgctgctctggccttccaccgatgacccccaaaacgatgcccagggccgtgggctctcccctgtgtgtgccagctcggagacgttcctctgagccccgcaagaactctgcaatgagaactgaaccaacaagggagagcaacagaaagacagattccaggctggtggatgtgtcccctgacaggggttctcctccttcccgtgtgcctcaggcacttaaacttttctccagaggaaagcgattctactttctccaaaagtactgccacagaagtagctcgggaggaagccaagccgggtggagatgcagcccctagtgaggctcttcttgtagatatcaaactggaaccactcgcggtcactccagatgctgcaagccagcccctcattgaccttcctctcatcgacttctgcgataccccagaagcacacgtggctgtaggatctgaaagcaggcctctgatcgacctcatgacaaacactccagacatgaataaaaatgtggccaaaccttcaccggtggtgggacagctcatagacctgagctcccctctgatccagctgagccctgaggctgacaaggagaacgtggattccccactcctcaagttctaa

SEQ ID NO: 152937 - DNA, 3322 bp, Homo sapiens
cgaaccgtgtcgaccgcgtttaaatccgtgccggaggcgcgtcctgcatcgtctgccgctttggtgacttctgacagctctctccatggaagaaggcggcggccgcgatgagccttcagcctcccgggcaggggacgtgaacatggatgaccctaagaaggaagacattcttattttggccgatgaaaatatctccaccttcgatctttcattgtcttcttcgagtgcaaatgaagatgatgaagtcttcttctgaccctttggacataaagaaagatgtattgctgccagcttggaattaaataatccggttcccgaacagcctccgttgcccacatctgagagtccctttgcctggagccctctggccggggagaagttcgtggaggtgtacaaagaagctcacttactggctttacacattgagagcagcagccggaaccaggcagcccaagctgccaagcctgaagaccctcggagccagggcgtggaaagattcatacaggagtcaaaattttaaaattaacctctttgagaaagaaaaggaaatgaagaaaagccccacgtctcttaaaaggggagacatactacctgtcagacagccccttgctggggccccctgtgggttgagcctcggctcttggcctcctccccggccctgcccagctctggtgcccaggcccgcctcacccgggcgccggggcctccgcactctgctcatgctttgcccagggaatcatgcactgctcatgctgcaagtcaggcagcgactcaaaggaagcccgggaccaaattgctgctgcctcgagcggcctctgttagaggaagaggcatccctggggctgcggagaagcccaagaaagagattccagctagtccttccaggacaaaaatcccagctgagaaggaatcccaccgggatgttctccctgacaaacctgccccgggtgctgtcaatgtgccggccgccggaagccacttgggccagggcaagcgggcgatccctgttcccaaacaagttggggctgaagaagaccctgttaaaagcacccggctcttacagcaattctgcaaaggaagtcctcctcgggggcttgtttggagcggggcatccagtgcgtgcactccccaaccagtggccaaagctaaatcaagtgaatttgcaagtattcctgcaaattagctccccggcctctgtccaaacatcagcaagtccaggcagaatgggaccccgccatgctgcggccagctctggcctgcaggccctgtggggtgcatcctcctggcaggccaagcgggtcgatgtttctgagctggcagcggagcagctcacggcaccccccctcagcatcccccacccaaccccagactccggaaggtggcggcccagtggctgaactccagttgcgcttggtcagaatcttctcaattgaataagactagaagtatcagacggcgagattcctgtctaaattccaagacaaaggttatgcctactcctacaaatcaatttaaaattcctaagttttctattggtgactccgccggacagctcaacaccaaagctttcgcgggcacagcggccgcagtcgtgcacgtcagttggcagggtcactgtccacagcaccccggttagacgctcatctgggccagcaccacaaagcctgctgagcgcacggcgtgtgtcagccttgcccacacctgccagccggcgctgctctggccttccaccgatgacccccaaaacgatgcccagggccgtgggctctccccttgtgtgtgccagctcggagacgttcctctgagccccgcaagaactctgcaatgagaactgaaccaacaagggagagcagcagaaagacagattccagggctggtggaatgtgtcccctgacaggggttctcctccttcccgtgtgcctcaggcacttaacttttctccagaggaaagcgattctactttctccaaaagtactgccacagaagtagctcgggaggaagccaagccgggtggagatgcagcccctagtgaggctcttcttgtagatatcaaactggaaccacttcgcggtcacttcagatgctgcaagccagcccctcattgaccttcctctcatcgacttctgcgataccccagaagcacacgtggctgtaggatctgaaagcaggcctctgatcgacctcatgacaaacactccagacatgaataaaaatgtggccaaacctttcaccggtggtgggacagctcatagacctgagctcccctctgattccagctgagccctgaggctgacaaggagaacgtggattccccactcctcaagttctaagccgaaccaaatcctttgccttgaaagaacagccctaaagtggttttcaaccctcagaaacaagctttaggctggttcgcagtggcttacacttgtaaccctagaacttgggaggcttgaggtgggcggattacttgagcccaggagttcgggaccagcctgggaaatatagtgaaactcctgtccctacaaaaaatacaaaaattagccgggtgtggtagtgcatgcctgtagtcccagctacttgggaggctgaagtgggaggatggcctgagctcaaggagatgcaggctgcagtagggctgtgattgtgccactgcactcaagcctgggcaccaatgtgagaacctgtcttggaaaaaaaaaaaaaagaaacatgttttagtagaagttttatttgaaaaagaaaaataagcataaatatattcccagtgcctgccgagggtcgcctgcagcgactggggccaccacggaccacccaaggcctctgcttcccgccgccaccctcctcgctgccattctctgggctggaatctgaagcctcagtcactctaaatgaagaatcttctttcgaatgttttgtatgtaaaatagcaagtggcttattttttaaagttacgctttgtataaatagtcagatattctagatttacattaaattgtaaaataaatggacttattgaagcatatcttgatttttaagcttatcttgattttcaaacatgcatagctatttttatcactctaatcagtaaggctactatctagactcgaatgctttcatacaagtgattttcaaaaattagtcaataaaaattgatgtcagtgcagggcccaggcccgcccccagatacactagtttctaggtctggggccagcctagtaattgttactaggcacacaggtgatgctgactcgatggcctgagacacaccccttgagaagaagctgctctggggagacgagggtatgagtggaaagaggatgggcga

SEQ ID NO: 152938 - DNA, 353 bp, Homo sapiens
gatgtgcaactggagggggcaaaaattggctcaacagaaataacctttacaccagagaagatcaaaggtggaatccacacttgcatataccaagacagcagggagtgtgtgcctcttgatgcaggtctcaatgccgagtgttctctttgctgcttctccatcacaacttcatttgaaaggtggaactatttaaagttgcacaagatatggcaacggcagcagttagatgcatcaaaaaggagatccgggatttgtatgttaacatccagcctgttcaagaacctaaagaccaagcatttggcaatggaaatggaataataattattgctgagacctccactggctgtttgttt

SEQ ID NO: 152939 - DNA, 1548 bp, Homo sapiens
cgtcaggctcctgcaaccccaggcatgaaccaaggtttctgaactactgtgcgggagccaacgtctcttctttctcccgctctggcggaggctttgtcgctgcgggctgggccccagggtgtcccccatggcggggccgcgggtggaggtcgatggcagcatcatggaagggggcggccagatcctgagagtctctacggccttgagctgtctcctaggcctccccttgcgggtgcagaagatccgagccggccggagcacgccaggcctgagtattatgacctgaaggcctcaacatttatctggactggaaatgattcgagatttgtgtgatgggcaactggagggggcagaaattggctcaacagaaataacctttacaccagagaagatcaaaggtggaatccacacagcagataccaagacagcagggagtgtgtgcctcttgatgcaggtctcaatgccgtgtgttctctttgctgcttctccatcagaacttcatttgaaaggtggaactaatgctgaaatggcaccacagatcgattatacagtgatggtcttcaagccaattgttgaaaaatttggtttcatatttaattgtgacattaaaacaaggggatattacccaaaagggggtggtgaagtgattgttcgaatgtcaccagttaaacaattgaaccctataaatttaactgagcgtggctgtgtgactaagatatatggaagagctttcgttgctggtgttttgccatttaaagtagcaaaagatatggcagcggcagcagcttagatgcatcagaaaggagatccgggatttgtatgttaacatccagcctgttcaagaacctaaagaccaagcatttggcaatggaaatggaataataattattgctgagacctccactcggctgtttgtttgctggatcatcgcttggtaaaccggggtttaattccgacaaagttgtaattgaagcttgccgaatggctattagcaaatcttagacatggtggtacctgtggatgagtatcctgcaagacccagcttgattgttttccatgggcattagcccaatggagtttcccagaataaaaacagggaccagtttacactccatacgcaaacccgccgatacattttgctgaacaaattgccaagggctaaattttattgtgaagaaatccagaagatgaagaagacgccggctaaagatacttatattattgaatgccaaggaattgggatgacaaatccaaatctatagagtatttgcctcttaaatgataccctcattgaatatattgcactattttcataaatactataaaataatgactaggaagtaacttattaaaggctatgacttaaatttgaagatgaagtacagtgttctagggtttgctgagaagagcttcacttaaattaattcttcactcttgaatattctctctgagagataggacaatgaaatatcagttggtggatatgtgtgatagctgatttcaatattgaagtattgaaataaaatattctttacacctgaagtaaat

SEQ ID NO: 152940 - DNA, 903 bp, Homo sapiens
agtcaggaaatggagcacctgttcgtgtacctccaaagagaacagttaaaagaaatatacccaagctggatgctcagaggtcctttgccgtgtgtactgcgagaatgaagactttttcacagcaatcagactgtcgaccattcccagaaaaatgtcgacattactctgaaagggacgccccagtaatcgtgtaagggccccagagggaacctctgcggaagggacttcattcacatcaaatgtggaacctcagcctttcttggaaaagtaaaaaaagaggctcccgggtttgaccaaatggtggggtaaccggaaagggaactggcctacccgttcgggactatttggtagtcatgtacaggaccatgatccaaggggtgttaccactggggcttccgttaccaagatgagggtcctgtgtatgcctcaccttccccccatccaaccgttggtttatccccaggagaatgggtcctctttgttgaaatcccgaaattttcttgggtgaaaaaattatatcggcagggttcggatggagaccagggtgttgctttgttcagtatctcaaggccaggaaagatgaattaatcccttaaaggaaatgacatttgagcttgtttcaaatttcagcggctttgattcagcaagccccaccaggttaaaaacaaggatatcaggaaaatttttggatgggatttaagtttcttgaaaaaggaactgttcaaccaggcttgattgaataagatctaagaagttacctgggctacagaaagaagatgccacgatgacacttcacgacctacttgtgatatattaaaagatgcaaaaaaaaacacatattagatttggaccttcttcttaaaaaaaaaaaaaaaaaaaactccgaggggggggcccggtacc

SEQ ID NO: 152941 - DNA, 1189 bp, Homo sapiens
ccaaatccttaagtttacaaagctgttggaaaactttgtgtcctgatttcaacaatcacgctttgtttgaaagatgagccaagctcacagacactaaattttatgtcatgccataagctggagaggagccatttggctacagctgcggaacttcattgaggagcaaatgaaaggcacatggacgagcacgctggtgcagttcatgttcttcctgcctgtgaattgaatactgtcctggtagcagttttgggtcggtcaggagctcaaggctggtttgtgtggctgactacggatgagcactgaagttgcctcaaagaattaaggggtgtccacaccagcctctgggggtctttggtgtgtagtcttccaggtagagctggttttacaagtaggtggccatctacttgatgtgatgtgagcgatgccagacagctctctctgaaccccaggtaatgccctgaaatctggtgatcctggctgatctgtgaccaatagagattagctccttgggatttggggtcctaaaaggtccctgaaaaaatgcaccccttgtctttaagccaacattggtgaaggaactgagaactcttagggttacataaaaaaagacccctgttgagatagtttatgcagatacctggaaggaactagagatgccaggaggaagactgagacccagaatgaagcaaggcatgagggctccaaagtgaactgcacccatcccagagtctcagccaagatggccctttcctagagggacgggcaccttccacctgcccacaggcactgctacctatgggaattgcagaaggccgttgtacacacgcgcatgcacgcagtggccctctgccctttagaatatggaagcaaagtctgggtgcagtgactcacacttgtaatcccaacactttgggaggccgagacgggcagatcacctgagttcaggagttcaagaccagcctggccaacgtggcaaaaccccatctctactaaaaatacaaaaattagctgggcgtggtggcagtctcctgtaatcccagctacctaggaggctgaggcagagagagaatcgcttgaacccaggaggcggaggttgcagtgagctgagatcgcgcgactgcactccagcctgggcgacagagggaaactctgtctcaacaaaaaaataaataaaaaaaaaaaaaaaaaa

SEQ ID NO: 152942 - DNA, 2256 bp, Homo sapiens
cactgacttgctgtgtgaccttaggaagtctctgcccctctctcagcctcagtgtcccgagggccccgaagcattccattctcgtggaggagtttccttgctgagatttcaaatagtcctccccacctcaactgtcaccactgctaagggactctatccattgagcacatttttctaaggccctgctgtctgccgaggagcgccaagaagatgtcacttggttacacaacggactgcccacatccccaagctccgttcttgcccctcgtgtcctaggcccaacccagcctcccagacctcactttccccatcagcaatacctggtgttctcccaccttgaaaggactcttggctcctgccgggttcctgctcaggctggaattgggaaaatatgcatgtgacattcgatcatgctctaatgcccatcctctcacccatccatttcctcactcagtggagatttgccaaatgaataaacgacacctttgaggccccaggtgaagcggggccctactccggcctctgccttgggcctcgcctctgtcctcaggtcctctcagaggcagatacctaggggagctgctgctgcctgctcattctagcttccgattccattcccagcccctgcgttaaggtccctggagaggtggcgtcagtgggggtgaggaagggcatcttcctgactcctctgcccagtgctggaaggagcatgcctggggttagtggggccaggggccaggcagatggggggcctttggggaccagaagggggagatgttgcttcccagagcctctcttgctgtaaagaccccagtttttcctgggaagatgggactctggggtgtgtggtgctcaccagagttcaggccacccactgggcttcggcaggagattagggaagccccatcacctgaccacagccccccaccaacattcccccaaaatgcagcctaggaggccgcagtgctcttcttcctgcccagaccaaaatgttccttttagtcctcaatgttttatattctttttgttttgaaaatctcaattttaatcaggggttttaaaagaaaattgaaagcctgaacctccatttttcttcttggctccagttttgctggtcctctggagaactcttcgtgagcactggtgccgtgacccacttgggatctctgctgtgcccttctcgggcattccagaccaggtgtagcaaatgaaaaagtgcagttaattcaagaacaggaatccctgtgtccttgctgggatttccttttgggaacctgactttccgactccagatcctgctgtctggatcagtgttctggctggaggtgctggattctctgattttgcctcctcactctgtgtctggctttgctcctgggtcttggccctgggccatatgaggggccaggaaatgaacgacaaggaggataagagtgttctttcttgaaagccgggacttcccctcaagaacctgggcctggggccgggactctgcatgactgggagcaagtcacattaaacctcctgtgcctcgatttcccccttctacaaagtgggggccaatggattcttgtgtgtcagcactgttaactaccgagtgctgagttaaggggcaaaataatacccctttctctatgtatctctgtatgcacacgcactatatatatatatatatatatatatatatatatatatatacattcatgtaatcaccacttctcgatgtctatttcaaaacaaggctcctgagtagggggagaagagagccagcttgcaccttaaggcttaacaccataggaactttgctaagccattgtcccctgggaatacaagggccacacccgggaccaagtggcaaaacctgtgggcctttcaaacctcggggcccagggcattcctgcccaccccctgacaaaaaacaggttcccacagtgctacccttgcttcctgcccccttgaggtgggcccaggctgggctccctggctatgcagggatctctggttccccagggagacccttgggggcccaggcaggttaaggttcaggggtgataggggagagcaattactttgttcactgtatgcacccgcgggggcctgggagtccccatttgcaggtgggtagggcctccagcccaaaccacccagacctaggcttccctcttcgtcaggatccaccacagggttaggggacaggaagccttgttcttattctcaataaatcttacaaaattccaaaaaaaaaaaaaaaagggc

SEQ ID NO: 152943 - DNA, 850 bp, Homo sapiens
ttttttttttttttttccttgaccaatgccagaaaacctttatttccaccgagacctctcatccaattctcttctttccgggaactttttcccttccctactccaggtcgtaccctggccactcctttccttttggctggccaatgtctcctctgtaggctccagaaggctctcagggatgcaggcggcctcccgcaggtgtgaggttgcaatgggaacaaagacagctgtggtcccatagcaccctcatctggtgacatcctgctactgacagtcaaaagaagccttcccagatgaaattttagtcctctgcgcagccatgctcttcttccagcaaaagagccatgtgcagtcgggtctgctccccatgggggctttgatgtgggcccagcagtggatcagccttccagacacgctcaactctgcacactcttcctgccgcctcaggctttccaggaccctcccgagccttatcagagtcacttaccctcagggcctaactgaataccttgcctgggtgaccttggacagattcaacttaccctggactcagtttcataatatgaaaatgatagggttgggctacgtgattttcacgttgtgcttccagattgttagaagttagggggctgaaaggcattacctgtccctctctcaatttcactcatgctactttgtttttttaatctaccttttatatggggcttagaaaaaagggttctgggacaaacgtgagaatctctggctcctgtagctttcttttaaccttaccatcccagggttcctaagtgtgctctctccccaatggcgacctggccctgtttttcctttcttttttttggagatggag

SEQ ID NO: 152944 - DNA, 930 bp, Homo sapiens
atggcatatttacaagatagaacactaagaagtcgttacagtaactacagtagacctaaaagtactggtttggaaagactctttccaccacagataaaaacaagaatacctacttacgatgaagatgacaacactattctttatgcgtatgaaacaaaacctgaatttgtcaataaagttatatatgatgctctgcaaaacctggataagaagattgatgtgattcgtagaaaggtttcaaaaatccaacgtttccatgcgagatccctgtggacaaatcataagcgatatggatataaaaagcattcttaccggcttgttaaaaagcttaaactccagaaaatgaagaaaaatgaggtttacgagacattctcctaccctgaaagttacagccccactttaccagtgtcaaggcgtgagaataattccccgagcaaccttccaaggccatccttttgcatggaagaataccagcgagctgagctggaggaggacccgatcctcagccgcactccgagtccagtgcatccctcagatttctctgagcataattgtcagccgtattatgcatctgatggtgcaacgtatggttcttcttcagggctctgccttggcaaccctcgggctgacagcatccacaacacttactcaactgaccatgcttctgcagcaccaccttcaggtatgctggcccagggagagcccaatttggtacatgcccctgagatgatgagttactcagctttgatggagaataggtatactggatcatctctctgcttcccttctggtttggaaattgacgggaaggctctgctcctactcacgagtgacgtgttgctgaagcacttgggggtgaagctgggaacggctgtgaagctatgctactacattgaccgacttaaacaaggaaaatgctttgaaaattga

SEQ ID NO: 152945 - DNA, 3328 bp, Homo sapiens
caacttgtagtgtcgtggaattcagactgatgtcttaagtgtagttgggttaatgagaacacagttctgcaaatacatcttttcatgtagtcatagtatttacagtgagcaaaggtcctttgatatcacaaataggcctttgtaacagcctcttgaaagtgaaattaaaccctcaacttttcttttagttctgtctttcatcttcccttttaatttgttggtaaattttcctcagataaaaacaagaatacctacttacgatgaagatgacaacactattctttatgcgtatgaaacaaaacctgaatttgtcaataaagtatgttaattgctaattgccaaatatattaacatttgctgttttaaaggaaaagatgtaaattcctcgtatactatggagttcccgtaaactcacactcaagagaatatctctcccctgaatttgtatgcttgctttcatcagagaatgagcacttaaccaatttactttcccctttttcttatatagtagaaaattaagagcagttttgtactcactttcagtataaaactctaaacctggattcttctgatataataaattcttttcttgcccccttcctcaattggcagtttttcattctcatattaatgtgaattttaaaaatctctgcttaatttaagacttctgaaaccccttgaaaagttggtgataaataaaaacaatttaaataaataaatatagctcccccctgcccccagtgttcagtttggctgttacagaaataaatcattaactacttttaaaatattagcaggaaccgaatattgtatctgacgcatcctgtaatactgaagagcaactgaagacagttgatgatgtccttattcattgccaggttatatatgatgctctgcaaaacctggataagaagattgatgtgattcgtagaaaggcttcaaaaatccaacgtttccatgcgagatccctgctggccaaactcataagccacatcatcataacaagcattcctccccgcctgttcaaaagcttaaactccagaaaatgaagaaaaatgaggtttaccgagacattctcctaccctgaaagttacagccccactttaccagtgtcaaggcgtgagaataattcccccgagcaaccttccaaggccatcctttttgcatggaagaataccagcgagctgagctgggaggaggacccgattcctcagcccgcactccgagtcccagtgcatccctcagatttctctgaggcataattgtcagccgtattatgcatctggatgggtgcaacgtatggttcttcttcaggggctctgccttggcaaccctcgggctgacagcatccacaacacttactcaactgaccatgcttctgcagcaccaccttcagttacaaggtcaccagttgaaaatgacggttacatagaggaaggaagcatcactaagcacccttcaacctggtcggtggaagcagtggtcctatttctaaaacaaacagatcctcttgcattatgccctcttgtcgacctcttcagaagccatgaaattgacgggaaggctctgctccttactcacggagtgacggtgttgcctgaagcaacttggggggtgaagctgggaacgggcttgtgaagcctatgcctacctacattgacccgaccttaaacaaggaaaatgcctttgaaaattgaaaaaatcccttgtgcaaatttagattgggcccaaccttcctagaggcacccaatgccttccttagtgtggaatcatttttctgccctttagtcgtttttgttttgtagaaagtatctctcaaaatatattatagctagaattgtagaactatgttatagtccagtctacttctttaaaaaccatttaaactgctagatagtattagaatagtccaatagaaaattcattctttataggtctttaaaaattacttttattatattgtttacaaatatatttcatgcaagaaacagaaaaaaaaaaaaaccctttgattctggttcatctcgatacagagaaccaaaacagctaagagaggtattatcagggttgacaactcctatgattgaatctatgggaattattcctcagaagagaatttaaaggtgtacccatatatatctctttctggagtattttatctgtctgatgttgcagtattctacaagtttccagaaagagaatagccatataaattattttcctttctgctattatttctctatatgttttatttattcagatttagagtaaaaaataagcatataaacttttattatgtgctcttatcagaccctaagatatactattcgaaacatcgacgggatatttgatgcaagaaatattgtaccgcaagggtgggtttggatgacctactcgacatactttttttcaaaccaactattatattcaaactgtcatattttggctaagtttggacctataactacactttccattgtttgcaactctctatgaaggtacgtctgtcccaaaccttttaaaaggcataactgtattttatgtgtttattctttatatagatagtattttatattttattctcacccgaagtattcacacaatctttttaaaaaaaatttgaaatgggcattttgtattgccacagaggtagggatgagccatatattaggtggaaatgttttattttgtaaaatataaatggggttatttgccatcattaggtacccgctcaacttactttttagggggccagggaaccaatctgtagattggtttccatacagggaagttctccgtcctatgcaatgtttctaattaatttgcttaattctgagccattaatcctgctacactttgaatgatacattaattcagactaatctttgggggctttattttgtaagttagaactttcaagggaaacatgttcaacactattattttgttataaatttataactttgttattaccattgtgtaaccaaatataagggtttaccgagcctatgagaattgcctgcctatcacccattagcctatttgcctgtaatgtcaagaaaatgttcaccagatgcaagaatgtacattttcctttttagaaaacccaaatgtactttagacatgaatgcaactatttaaagaatagcttcatttatgttattccttacatgtcataagattcttacttaaacttggtcttctttcaagttgtttgtatgaagatgctgtacccacttgaacagtcctcaggtgtttacataaatactatgttttacagttttcatattttaaaatattaataaagttaaatcacaatagttcattg

SEQ ID NO: 152946 - DNA, 423 bp, Homo sapiens
gggcaagaattcctggcatctgtggctcggggagtagctcctgcagactcaccagaagctccaaggcgcagctttgctggtggaacatgggattgggaatatttaggatttgcatcaccagagtatcggaggaggcacagacaacgtcgtcgaggagatgttcacagtctactcagtaatcctccagaccctgatgagccaagtgaaagcactttagatattccagaaggcggcagcagcagccgcaggcctggcacatccgtggtaaggtctgcatctatgagtgtgctgcacagctcttccctgcgtgactacacccctgccagtcgctctgaaaaccaggactctcttcaggctctgagttccttggatgaagacgatcccaatatacttcttgcaatacagttatcactgcaagagtcg

SEQ ID NO: 152947 - DNA, 527 bp, Homo sapiens
  misc_feature (1)...(527): n = a,t,c or g
tttctncatctatgagtgtgctgcacngctcttccctgcgtgactacacccctgccagtcgctctgaaaccaggactctcttcaggctctgagttccttggatgaagacgatnccaatgacaatcttctcggcnacatcatggcttggtttcatgacatgaaccctcagagtattgccctgattcctccagcaactacagaaatcagtgcagattcccagctcccctgtatcaaagatgggtcagaaggtgtgaaggatgtggaactggtgctgccagaagantcaatgtttgaagatgccagtgtcagtgaaggtagaggaacccagatagaagaaaatcctttggaagaaaatattctggcgggggaancagcatctcaaactggtgacagtggtaacgagncagccaacagaggagatggttcagatgtttcaagtcaaacacctcaaacctcaagtgactggcttgaacnagtncanttantntgaactccacatagctgggcaccttntggagcnnnnnngn

SEQ ID NO: 152948 - DNA, 755 bp, Homo sapiens
atggcttggtttcatgacatgaaccctcagagtattgccctgattcctccagcaactacagaaatcagtgcagattcccagctcccctgtatcaaagatgggtcagaaggtgtgaaggatgtggaaatggtgctgccagaagattcaatgtttgaagatgccagtgtcagtgaaggtagaggaacccagatagaagaaaatcctttggaagaaaatattctggcgggggaagcagcatctcaagctggtgacagtggtaacgacggcagccaacagaggagatggttcagatgtttcaagtcaaacacctcaaacctcaagtgactggcttgaacaagtacatttagtgtgaactgcacacatctggggctctaaatggatttacaggtacagatcggtatgctaaggtgggaagtatgcttgatagagactttgaattcactttaattccaactcaggtgataaaccactgacattagggttgaatacagagaagttcccttggaatggtagcttccatttttttattttaaccttaccagggaatttcctttggtacttaattggaatagcttttccccctttttgctgacaaaaagaagagcaagagaaagagaaacaaaaatgaaataaataagttgtattccacactctaagaaaatgcagtcctctatttagcctaggcttgacaatacttaaattgaacatttaaaataaaggcttactccctaatctttgggtggctttcctttaaa

SEQ ID NO: 152949 - DNA, 4190 bp, Homo sapiens
atgaggcagaactcagggggtaatgttcacttgcccgctgctcacctcgtgctgtgtggcctggttcctaacaggccatggacaggaaagaacaaaaacaaaagacatcaccttggatgtatcccccaacccccaactttagccaaaattgccaaagcagccaagggatcagcaggtaattttcgctaccctctaatacttggaagttttcctgcaaactgggtattcatgaacttctttcagagtaaagccacattggacttcaacttaatatgcagtttgaatgtgaaagatgttgcagaagtgttccagaagtggctgaagatagaaggaaaaaagtgccactgcctatcagaaaaaacaaaacaaaacatgggaaatacaaccaccaaattccgtaaagcactcatcaatggtgatgaaaacctggcctgccaaatatatgaaaacaatcctcagctaaaagaatctcttgatccaaatacatcttatggggagccctaccagcacaatactccattacattatgctgctagacatggaatgaataaaatattagggacttttcttggtagagatggaaatccaaataaacggaatgtgcacaatgaaacatctatgcatttgttgtgtatgggacctcaaattatgatatctgaaggagcccttcatcctcgcttggcacgccccacagaagatgatttcagaagagcagattgtctgcagatgatcttaaaatggaaaggagcaaaacttgaccagggtgaatatgagagagcagctattgatgctgttgataacaaaaaaaacacacccttgcactatgctgctgcctcagggatgaaagcctgtgtagagcttttagtaaaacatggaggagacttgtttgctgagaatgaaaataaagatactccttgtgattgtgctgaaaagcaacaccacaaagatttggccctcaatctggaatctcaaatggtattctcacgggatcccgaggctgaagaaatagaagctgaatatgctgcattagacaaacgagagccatatgaaggattaaggcctcaggatcttcgtagactaaaagatatgcttattgtggaaactgcagacatgcttcaggctcctctctttactgctgaagctttacttcgagctcatgactgggacagggagaaattacttgaagcttggatgtccaacccggagaactgctgccaacgatcaggtgttcaaatgccaactccaccaccaagtgggtataatgcctgggacacgctcccatctccaagaactccaaggactacacgctcttctgtcacctccccagatgaaatcagcttatctcctggggatttagacaccagtttgtgtgacatttgtatgtgcagtatctctgtatttgaagaccctgtggatatgccctgtggacatgacttttgtaaaggatgttgggagtcgtttttgaatctgaaaattcaagaaggtgaagctcacaacattttttgccctgcatatgattgcttccaacttgtacctgtggatatcatagaaagtgtagtttcaaaggagatggacaaacgatacctacagtttgatattaaggcctttgttgaaaataatcctgccattaaatggtgtcctactccaggctgtgacagagcagtaagactaacgaaacaagggtcaaatacatctggatctgatacactcagcttcccattgctgagagctcctgctgttgattgtggaaaaggacacctcttctgctgggagtgccttggtgaagcacatgagccttgtgactgccaaacatggaagaattgcgctgcaaaaaataaccgaaatgaaaccagaagaactgtgtgggagttagtgaagcctacgaggatgaccgccaatggtctgctgagtgatgaactgaactgccaagccttgtgccaactgtaagtctccaatacagaagaatgaaggctgcaatcacatgcagtgtgctaagtgcaagtatgacttttgctggatttgccttgaagagtgggaaaaaacatagtttcgtccactgggaggttatttacagatgtactcggtatgaagtcatttcaacacgtggaggagcaatccaaggaaatgactgtggaggctgagaaaaaacacaaacgatttcaggaacttgacagatttatgcactattatacaagatttaaaaaccatgagcataagttatcagctagaacaacgccttcttaaaacagccaaagaaaagattggagcaattgagcagagctctcaaagaaactcgaaggaggctgtccagataccacttttcattgaagatgcagttcatgtgctcttaaaaactcggcgcattctcaagtgttcttatccatatggatttttcttggaacctaaaagcacaaagaaagaaatttttgaactaatgcaaacagacctagaaatggtcactgaagaccttgcccagaaagtcaataggccttaccttcgcacaccccgccacaagatcatcaaagcagcatgccttgtacagcagaagaggcaagaattcctgggcatctgtggctcggggagtagctcctgcagactcaccagaagctccaaggcgcacttttgctgggtgggaacatggggattggggaatatttaggatttgcatcaccagagggaatatggctggaattttcagtattcggagggaggcacagacaacgtcgtcgaggagatgtttcacagtctactcagtaatcctccagaccctgatgagccaagtgaaagcactttagatattccagaaggcggcagcagcagccgcaggcctggcacatccgtggtaagttctgcatctatgagtgtgctgtacagctcttcccctgcgtgacttacacccctgaccagtcgctctggaaaaccaggactctctttcaggctctggagtttcttgggatgaaggacgatcccaatatacttcttgcaatacagttatcactgcaagagtctgggctggccctcgatgaagaaactagagacttcctcagtaatgaagcatccttaggtgcgataggcacttctttaccttccaggctggactctgtccccagaaatacagattagccctcgggctgcattgagcagctctgagcttttggaacttggtgacagcctcatgagactaggagcagagaatgacccattttcaacttgacacccttgagctcacaccctctcagtgaggcaagaagtgatttctgtccctcatctagtgatcctgactcagctggccaggaccccaacatcaatgacaatcttctcggcaacatcatggcttggtttcatgacatgaaccctcagagtattgccctgattcctccagcaactacagaaatcagtgcagattcccagctcccctgtatcaaagatgggtcagaaggtgcgaaggatgtggaactggtgctgccagaagattcaatgtttgaagatgccagtgtctgtgaaggtagaggaacccagatagaagaaaatcctttggaagaaaatattctggcgggggaagcagcatcttcaagctggtgacagtggtaacgaggcagccaacagagggagatggttcagatgtttcaagtcaaacacctcaaacctcaagtgactggcttgaacaagagacaatgtttagaggcttagcaacaagaggtgagattgaaacaaacagtgcaaacggtgctttgttactcctgcaggcaggcagaggaagggatgttttcaaggtaaggagtcagcaactcctgttacaatgtaaaataaatggtgttatcaataagaaccttgcttttcgattgagagccttggatagactgaaaacagaaggttatttgattgagctgcaagcagttgcaacactgttcaaatgccgaagtgaaggcaatgccatgcctaaaagtgcagagcaggccacagctgattcagccagtaatgagggcaaggtgctgggtgcaggagtgacagaaggtgccgaagacttcgggacgcagaataaaaatgaaaaggtcgatgatgtccaagtagatgttcaggatagcaaaaacatacccttcagggtccagggaataatggcggtgccctcccagcatgagctgcacatcgatcaccaagtacttgaagaaaaggaagaattagctacttaa

SEQ ID NO: 152950 - DNA, 1714 bp, Homo sapiens
cgggagtgcgcacattcgcagcccgggcagccctgctcggcaccgggcctcgctgcccgcgccacgccgcccgcagccggcctccaaggatcagtgtggtatgtcagcaccaggggcgtacaccggtgtcaactttgagggggccctcttctctggctatgcacctgacgggggcctctttatgcctgaagagctcccacagttggacagagagaccctgtgccagtggagcacactctcctatcctggcctggtgaaggagctgtgtgccctcttcattggctctgagctccttccaaaagatgaattaaatgatctgatcgaccgagccttcagcagattccgtcacagagaagtggtccatctgtccaggttgaggaatgggctgaacctgttggagctgttgcatggcgtcacatatgcatttaaggacctgtccctgtcctgcacaacacagttcctgcagtacttcctggagaagagggagaagcacgtcactgtggttgtaggaacatctggggacacaggaagtgctgccattgagagtgttcaaggggcaaagaacatggacattatcgttctgctgcccaaaggtcactgcacaaagattcaggagctccagatgacaacggtgctggaagcagaacgtacatgtgtttgggagtggagggaaacagcgattgagcttcgattgagccgatcaagactgtgtttgccgatgtggcttttgtcaagaagcacaatctgatgagcctgaattcgatcaactggtcccgggtcctggtgcagatggcccatcacttctttgcttacttccagtgtacgccatccttggacacacatcccctacccctggtggaggtggttgtgccaacaggggctgccggtaaccttgcagctgggtacattgctcaaaagataggcctgcccatccgtctggtcgtggcagtgaaccgcaatgacatcatccacaggactgtccagcagggagacttctctctctctgaggctgttaaatcaaccttggcatcagctatggacattcaggtgccctacaacatggagagggtgttctggctgctctctggctctgacagccaggtgacaagatccctcatggagcagtttgaaaggacccaaagtgtgaatctgcccaaggaactgcacagcaagctttcagaggcagtgacatccgtgtcagtgtcggatgaagccatcacccagaccatgggccgctgctgggatgagaaccagtacttgctgtgcccccactcagcggtggccgtgaactaccattaccagcagatagacaggcagcagcccaggtacaggcaatgggggcctgggccactgagggaccatttgaatttcaggggccctcttcttctccaagcagtgggagagacaggactacgaaaaaatggctgtaatggagtgtgatgggtgctgtgtggaactgtgccttggaaactgtgggcccagaagagggagcgtgacagatatcccagggacagccatggtcagaggtggtggctgagctggcctccaaccaggaggagcagtttgccaggtagcgtcattgtagcaataagttcaaggtgccaattgtctgtctgtgtctctgtcctccatacccccccatccctaaacttcctctgtttcttattcctcctccaccttctcctttcccatctctctattctctcattggccc

SEQ ID NO: 152951 - DNA, 316 bp, Homo sapiens
cgagtccaccgtctcatgctgcgagaagcccacgggcgcgatgccatagatgcacacggcatgtggtcgtccatgtccatcgatctggcgcttgacgaagctgtcgatgcgcttgcggtaggtgcggttggtgagccgtcccaccatgcccagcccatacggccgcttctcccgggcgaagagcttgcgcaccggcaccgcgatacgctggccccgtcgcggccccgcggtgctcaccacctcctgtcggagccgcaccttgggctgcggggctgcggcgccctccttctgcttccgccagcctcgctccaagggc

SEQ ID NO: 152952 - DNA, 885 bp, Homo sapiens
ttaacggtatttggaggtcagcacggtgctcacagaagccaggaacttgtccaaggaggcgtgcaccgcaagggtgaactctgcggggaagtgggcggccaaggtcaccaacaggcagtggcttaagagcttgaagttgaaccgggtccaccctataacttgggcgcatgcaggatcctcaaggcggacaaatgcgttgggcatattctctaacattcgccaaggacgtttgtcaactcggtttgtctcattattttgcgggggcagcatcaggaggctgcgctcaagctcgctgcggtccagggccccgccggtgaggtccgcctgctccggtgccttctcccagtcctttagcgctgcctccgatggggactcgaaaacttcatccgggtatgtggacagctcttcatggaggataccttcccgggcaaagaaggatgtgtccagctcatcggggaaatcagttgtgtcctcctccagaaagctagctggagtgaagcttcgacgctgtgcccggcgaaaggtgccatccctaacggagcggcctttcatcagcgctgcggccgcccggaagctcatcttggccaccgactctcgcttgcgccgccgcgggagccggtggaaacctgagcgggagctggagaatgaacatagggaggcagcaccctgcgtgaccggagtgtgtggggcactcatgcctttcgcaatgtcatctgccacacggaaggcacgggcaccggccagggggtctattatttctaaacggcccctcggaaaagttttttgggcatcacttccaccccacaaaaaccctaaagggcttgcccggaaatgcttttcccattcaagaaacttggcccccttggtgcaaatacccaaaaccat

SEQ ID NO: 152953 - DNA, 974 bp, Homo sapiens
  misc_feature (1)...(974): n = a,t,c or g
ggatttccagcgccccacagcttgcgggccacaagagacagtttggctctgtctgccaccaggatcccagggtgtgtgatgagccctcctccgaagaccctcatgagtggccagaagacatcaccaagtggccggtgagctgcagtgggggggttgttagggagccctccgtgtcatgtgggagagaatgccacaccccacccactggtgataccagagattcccatcatgggaccacctcacgttttcagaggctgtgcacctgccctttgtacagcctgtccatcaaccagcgcctgcccctctgagcaagtagatcaagagaactagatggagacttgaaaggtcaagtgacattattccagtttgatagagactcagtgtggtggcctgcttgaagtcaaggaagccacaccgttttctgctttatgagcccacccatctttgcctctacccccaaacgtggtgtggggccaaaggttgggggaggccctgactcagctcgtcctcatttgtgacccagatctgcaccaaaaacagcgctgggaaccacaccaaccatccccacatggactgtgtcatcacaggacggccctgctgcattggcaccaagggcaggtacgtgtgcgtgccagcgagtgcagctggtctctgggctcagagcatcgccctagggtgtgccttctccctaaccaaatcctgaaataagccagtataccaaggatgtggggttagagggggtctggacttccttggggccaacaaaggtgggtaggtgcggctgaaactcgccctggatgccagcaatccccctctgcaaggcagcagtctccgaaccctggcctgcctttctaggtgtgagatcacctcccgggagtactgtgacttcatgaggggctacttccatgaggaggccacgctctgctctcangtaggtctgcagagtggccgtcgttcccctcccccagctactg

SEQ ID NO: 152954 - DNA, 3138 bp, Homo sapiens
atgagtgaggcccgcagggacagcacgagcagcctgcagcgcaagaagccaccctggctaaagctggacattccctctgcggtgcccctgacggcagaagagcccagcttcctgcaggtaggccctggcctgcagggactgtgggtgccccctgtccagtaccctcaccatgaccctgttgcccagcccctgaggcgacaggctttcctgaggagtgtgagtatgccagccgagacagcccacatctcttcaccccaccatgagctccggcggccggtgctgcaacgccagacgtccatcacacagaccatccgcagcagccgacaagtacgcttcgggcgtgtccacactctgcccctcttgggtccccggggctgcccgcagggccttcccacagcgccagtctctctcttggtccctgctcagggggaccgccgaactggtttggagtgagcaaggacagtgacagcacccagaaaatggcagcgcaagagcatccgtcactgcagccagcgctacgggaagctgaagccccaggtcctccgggagctggacctgcccagccaggacaacgtgtcgctgaccaagcaccgagacgccacccccactctacgtggggccatgccagctgggcatgcagaagatcatagaccccctggcccgtggccgtgccttccgtgtggcagatgacactgcggaaggcctgagtgccccacacactcccgtcacgccgggtgctgcctccctctgctccttctccagctccccgctcaggtttccaccggctcccgcggcggcgcaagcgagaagtcggttggccaagatgagcttccgggcggccgcagcgctgatgaaaggccgctccgttagggatggcacctttcgccgggcacagcgtcgaagcttcactccagctagctttctggaggaggacacaactgatttccccgatgagctggacacatccttctttgcccgggaaggtatcctccatgaagagctgtccacatacccggatgaagttttcgagtccccatcggaggcagcgctaaaggacttgggagaaggcaccggagcaggcggacctcaccggcggggccctggaccgcagcgagcttgagcgcagccacctgatgctgcccttggagcgaggctggcggaagcagaaggagggcgccgcagccccgcagcccaaggtgcggctccgacaggaggtggtgagcaccgcggggccgcgacggggccagcgtatcgcggtgccggtgcgcaagctcttcgcccgggagaagcggccgtatgggctgggcatggtgggacggctcaccaaccgcacctaccgcaagcgcatcgacagcttcgtcaagcgccagatcgaggacatggacgaccacaggcccttcttcacctactggcttaccttcgtgcactcgctcgtcaccatcctagccgtgtgcatctatggcatcgcgcccgtgggcttctcgcagcatgagacggtggactcggtgctgcggaaccgcggggtctacgagaacgtcaagtacgtgcagcaggagaacttctggatcgggcccagctcggaggcacctcatccacctgggcgcctagatttcgccctgcatgcgccaggacccgcaggggctcagcttcattcgctcggcgcgcgagcgcgagaagcactccgcctgctgcgtgcgcaacgacaggtcgggctgcgtgcagacctcggaggaggagtgctcgtccacgctggcagtgtgggtgaagtggcccatccatcccagcgccccagagcttgcgggccacaagagacagtttggctctgtctgccaccaggatcccagggtgtgtgatgagccctcctccgaagaccctcatgagtggccagaagacatcaccaagtggccgatctgcaccaaaaacagcgctgggaaccacaccaaccatccccacatggactgtgtcatcacaggacggccctgctgcattggcaccaagggcaggtacgtgtgcgtgccagcgagtgcagctggtctctgggctcagagcatcgccctagggtgtgagatcacctcccgggagtactgtgacttcatgaggggctacttccatgaggaggccacgctctgctctcaggtgcactgcatggatgatgtgtgtgggctcctgccttttctcaaccccgaggtgcctgaccagttctaccgcctgtggctatccctcttcctgcacgccgggcaagtgacactgatcttgcactgcctggtgtccatctgcttccagatgactgtcctgcgggacctggagaagctggcaggctggcaccgcatagccatcatctacctgctgagtggtgtcaccggcaacctggccaagtgccatcttcctgccataccgagcagaggtgggtcctgctgggctcccagttcggcatcctggcctgcctcttccgtggaagctcttccagagctgggcagatcctgggcgcggccctggcgtgccttcttcaagcttgctggctgtgggtgctcttcctctttcacctttggggcttgttgccgtgggatttgacaacttttgcccacatcttcgggggttcatcagtggccctcttcctctccttcgccttcttgccctacatcagctttggcaaagttcgacctgtgccggaaacgctgccagatcatcatctttcaggtggtcttcctcgggcctcctggctggcctggtggtcctcttctacgtctatcctgtccgctgtgagtcgtgtgagttcctcacctgcatcccctttcactgacaagttactgtgagaagtacgaactggaacgctcagctccactgagctggctgcgggctccagcggccgtgtgctccagcaggccagagccagacacgacctccctgagccctacaggccttacaggagtcacctgctccatgtggggaactggcactgttttcctgaacacagacctctttcttgtgccttgttcacttctgttgaacccctcgtacttgccgggcatttattatactacttcctgtcataaccttctaacttgtttcttgacgaccacctcatgtggccaataaatggactgggagcgttttagctgccattaacttgaaaaaaaa

SEQ ID NO: 152955 - DNA, 939 bp, Homo sapiens; identical to SEQ ID NO: 126917

SEQ ID NO: 152956 - DNA, 1026 bp, Homo sapiens; identical to SEQ ID NO: 126918

SEQ ID NO: 152957 - DNA, 1366 bp, Homo sapiens
tctcggctaactgcaacctccgcctcccgggttcaagcgattctcctgcctcagcctctcgagtagctgggattacaggatgcgccaccatgcctggctaatttttgtatttttagtagagatgggtttcacctgtaatctcagcctctcgagtagctgggattacaggcatgcgccaccatgcctggctaatttttgtatttttagtagagatggggtttcaacatgtttgggccaggctgggtctcaaactcctgacctcaaggttatctgcccacttgggcctcccaaaagtgctgggattacaggcgtgagccactgctcctggcctgttatatatgtcttaagtacccttctgcatgcagtcagaaatgttcttttcaagaggacatttcctttaaaaagttcaagtttcttatcttacgataaagagatatttcctatacttattggcctaaaattctatttggtcactcttacctcttttgtgaaaggccacatcttgctaaagtagcagctactgaactgaccagaaacaaactcaaacactgaatttgacaaaccaacctgctgaatataagcaactttttctaagatgaaatgtaaaaaagaaaaagaaaaaccaaaaagcaacaccttctagaaagccattcatcttatctcataaaattaattccccagagttatctcatgtagtagcagcattatcaaatagtgcaattcttcaaaattgatttcaaataatatctttctaaaataaattacatttacttacagctttgcttataaaaccacagcttaaaacacttagccctcaaatgggtaaattactataagcaataactgtcttgtctacatggtaatgaaatgcacgtgcacgcacacatgtgtgtgtgaaggccaaagataccgcaacaaggtaaaaacatgtaatattaaataaaaagtaaacagtacataatggaatttttagttttggtacttctaatcatattcccgtcaataataagaactataaataggtaattgttaaattaagcatctatgtaagaaaaggcaaggagctatatactaaagaacagtgataatttgtatgtttcatgctatataacctataaagtacatgcaaaacagcatgatcctgaattccatattttatagttaatttacataaatgtggcacatacagaaaattacaaatcttaaaagattatgcttttcccgcccacttttttcatcttctatttattaatcagaaactaggcactttaatctaaaaattcgcaatttaaaaatgcattttaggagtaagacatggtgacacatgcctctggtatgaggagttgaattccaccgcactgtactg

SEQ ID NO: 152958 - DNA, 403 bp, Homo sapiens
  misc_feature (1)...(403): n = a,t,c or g
gtcatcaccaatgttctgcagcctccagccaacagacctcaggaaagaggngatgaacttgcagactctgcgcttgagatcttcaaacaagcatcagcgttttccagggcttcccagaggtctgtgcgactagttattagagaggatgaagcattagcttgaagcactacaggaggaatgcaccacggcagctctccgccaatttctctcagatttccacagagactgtttgaatgttttcaaaaccaagtatcacactttaatgtacatgggccgcaccataatgagatgtgagccttgtgcatgncnnnngacggaagggagagagatgtacttttnnaanatcatgttccccctaaacatgggctgttaacccactgcatgcagaaacttggatgtcact

SEQ ID NO: 152959 - DNA, 676 bp, Homo sapiens
ccggagagctgccgtggtgcattcctcctgtagtgcttcaagctaatgcttcatcctctctaataacttttgatagacaggggctgaaaaagagaagttggtaacgtcaaataggtgcagatctccccatgtctgtctaggacactgtcagaatctcaaggaccagggccaagcagcctccttctgccatgctctcctgcacatagcaggtgctttgtggtttgtgaaacttcactctttactcaaggcccgatgttctggttttctgtacctatcaacttggaactagatcctcaccatgggttcctgccaagccctttgcaatattcccagacttcctaagctgaaaactcaccttaaccctaaaaggttgttactcttattatcctcatcttacagagaaggaaatggggtgctctgggtctgaccccaagtcaccctgctgttctgactccaaaggccaggcttcttttactgcaccatgatgttcttatctatatacagcagatggcaggcttgggcttgcttgggggtaaggcctaaacaggtctgcaatgacttcaaacccagaccagactcacctagtcgcacagacctctgggaagcctgaaagaaaacacaaggtgtcaggttttctagtgaaagttatacctgcaactgcttatgacaatggctt

SEQ ID NO: 152960 - DNA, 1106 bp, Homo sapiens
ggaaggttctcaggtctttatttgctctctcaacttccaggaattgacttatttaattaatccatcaacccttcatagcaaatatttgagaaaacaaatttatattcaggttcttaacttcattagggaagtaagaagttgcagctcagcgcaccatgaagttgagacagagatggagacatccagcccacttctctggaacaggaaagatgatcggggagggaacacaggtcagtgtggggacaggggtcacggtggacacgggggtgggctgtctctccacctcctcacattatgctaacaggaacgcagacacattcagatgcctttgcagaaagagatgccagaggctcttgaagtcacaaaggagaggtgtgaagaaatcctgcatctcagtcccacacaggcagctgtctcaggctttacaagcgatgagagactcatcagagccctgggcactgtctatcaaaagtttatttagagaggatgaagcattagcttcgaagcactacaggaggaatgcaccacgggcagctctccgccaatttctctcagatttccacagagactgtttgaatgttttcaaaaccaagtatcacactttaatgtacatgggccgcaccataatgagatgtgagccttgtgcatgtgggggagaagggaaaaagaatgtacttttttaatccttgttccccctaaacatggctgttaacccactgcatgcagaaacttggatgtcactgcctgacattcacttccagagaggacctatcccaaatgtggaattgactgcctatgccaagtccctggaaaaggagcttcagtattgttggggttcataaaacatgaatcaagcaatccagcctcatgggaagtcctggcacagtttttggtaaagcccttgcacagctggagaaatggcatcattataagctatgagttgaaatgttctgtcaaatgtgtctcacatctacacgtggcttggaggcttttatggggccctgtccaggtagaaaagaaatggtatgtagagcttagatttccctattgtgacagagccatggtgtgtttgtaataataaaaccaaagaaccataaaaaaaaaaa

SEQ ID NO: 152961 - DNA, 548 bp, Homo sapiens
  misc_feature (1)...(548): n = a,t,c or g
aaaatcacggnaaaaaaatgaactgcctcaacctgcctatgcangtttaaccattcctacggggttcctgggaatctctgcaaccctacccagcaaccagatgagaaaacaaaccaggcctgggtgtggtggcctcaacatcccataaccctaaccactttgggaaggctgaaggccaggcggaatcccttgagcgccaggagtttgagaccagtctgtgcaacagggcaaaaccccgtctctataaaaataaaaaaattagcaggtcgtggtggtgcgcacctgtagtcccagctactcgggaggctgaggtgggaggattgcttgaacctggaggcagaggttgcagtgagccgtgactgcacnactgcactccagcctcgacaacagagtgagactgtctctaaaaacaaaaaattaaaatgaaaaaacagccaatacacacccctcacacttatccaaatgatgggtttctgagtgcagatgctcttacacaatcaggctcactcgtgcctggtcctaattccgccaggtctggatctcgtgcc

SEQ ID NO: 152962 - DNA, 494 bp, Homo sapiens
ggccgggggcagcctgcgccccaggaacggcggggtggtcacgtcgcggatcatgagcacgtactcccctgcaaggggcgggtgggctggtcctcagcaggctcctgtcccttcccctccctggcctcagcccactgcccactgtctcatgtgcccgctggcccctgtgcccccgaccctggtcatctctgcctgggttctgggattcttggcactgtaaccacaggactggccaccggaccggtcctggggggctggacacacagtcagcataggtgaataaactaatttggggtaaaggaaaccacctctgacctcaggccacagcccagctatggcctccagctcggaggctggcaaggatggacacgaccctcgcatggtggccgctctcaagcccccactgctgacctggctacaggtccctgaaggattcttttgcaaatactttcctacttttttaggagaaaaataattcattccctcctcgtgcc

SEQ ID NO: 152963 - DNA, 633 bp, Homo sapiens
  misc_feature (1)...(633): n = a,t,c or g
aacgaaagacgacgacagctacgatgaccagcctgtgccgcaaggtgaatggcggacatgctggatgagaaaccctgcgaaggctcctggttgtctacccatggacccagaggttctttgacagctttggcaacctgtcctctgcctctgccatcatgggcaaccccaaagtcaaggcacatggcaagaaggtgctgacttccttgggagatgccataaagcacctggatgatctcaagggcacctttgcccagctgagtgaactgcactgtgacaagctgcatgtggatcctgagaacttcaagctcctgggaaatgtgctggagaccgttttggcaatccatttcggcaaagaaatcacccctgaggtgcaggcttcctggcagaagatggtgactggagtggacagagccctgtcctccagataccactgagctcactggccatgatgcagagctgtcaaggataggctttattctgcaacaatcaaaaaataatctattctgctagagatcacagnnnnnnnnnnnngacggccccttaaagaaacaattttagaacgcggctggagagttataaatttttaaggggccaccaaatattccatggcctggtttaaaaagcgagcagaag

SEQ ID NO: 152964 - DNA, 701 bp, Homo sapiens
aattttgccctcgaggccaagaattcggcgagggcaataagctcctagtcccagacgcccatggggtcatttcacagaggaggaccaaggcttactatcgacaagcctctggtgcaaggttgaatgtggaaaaatgctggaaggaaaaaacccctgggaaaggctccctggttgtctaccccatggaccccagaggttctttgacgagctttggcaaccctgtcctctgccttttgcccatcatgggcaaacccccaaagtcaaggcacatggcaaagaaggtgctgactttccttgggagatgccaacaaagcaccctggatgatctcaagggcacctttgcccagctgacgtgaactgcactgtgacaagctgcatgtggatcctgagaacttcaagctcctggggaaatgtgctggtgaccgtttttggcaatccatttcggcaaagaattcacccctggaggttgcaggcttcctgggcagaagatgggtgactgcaagtggccagtgccctgtcctccaggataccactgagctcactggcccatgatgcagagcttttcaaggataaggcttttattcttgcaagcaattacaaataataaatctatttctgctaagagatcacacatgattttcttcagctcttttttttacatctttttaaatatatgagccacaaagggtttatattgagaa

SEQ ID NO: 152965 - DNA, 331 bp, Homo sapiens; identical to SEQ ID NO: 135477

SEQ ID NO: 152966 - DNA, 1152 bp, Homo sapiens
  misc_feature (1)...(1152): n = a,t,c or g
ggcacgaggctccggcggggaaggaggcgggctgcggctgcggctggggctgaagctgaagctggggctggggttgggggactgcccggggcttagatggctccgagcccgtttgagcgtggtctcggactgctaactggaccaacggcaactgtctgatgagtgccagccccaaaccgcgcgctgctcgggaccttagagcctctgactcaggctggaagatttgagagctggattaagtacttgttggctcacgcccgtgactgttccgctgtttagctcttgttttttgtgtggacactcctaggatagaaagtttggtatgttgctatacctttgcttctcccaccttccccaatatctaatatgtatttctcattcttagaataatccagaatggcgtactctgatctatgttgataaggaaaatggagaaccaggcacccgtgtggttgctaaggatgggctgaagctgggggtctggaccttcaatcaaagccttagatggggagatctcaagtttcaaacaccacgttttggcaaaacgttcgatgcccccacccagccttacctaaagctacctagaaaggctttggggaactgtcaacaggagctacagaaaagtctgtaaaggacccaggggaccccctcaaacaaaaaaacggccnagccttttccggcccaaaaaagatggacctgaagaaggactgtttaaagcaaaaaagcctctgtttcctggccttcaggattgatgcctaatccgagaaataagacaaaattctttccccttcaaatcctcttagacttttgaggagtttttgaccctgccctgaagagcacccagatttgcggcaccttccccctttgagttggagttgcctctcatgattcccttgacgagggagagagagctttgaaaaagctggtttcagctggggcccccctttcacctgtggaaggatggccctcttccaccatggggaattccaatctgtttgcagttttcctttcaaggcatttctgttcggacctggggtgttggatttgccacctgtttgctgtgacatagatatttaaatttcttagtgcttcaagagtttgtgtgtatttgtattaataaagcattcttcaacagaaaaaaaaaaaaaaaaa

SEQ ID NO: 152967 - DNA, 359 bp, Homo sapiens
ggcacgagagtcatcaaacggatcagcagctccagggaaggcctggctgtcccgggtctaaatgccactcccgccccatcagcgttcgtgctgtcagccttgcagccttctcctactcattccagctccaatacccaacggctgccacaccgagtgaccggcggcttctcattgaatggacagctcattggcaacaaggccaggagccctgggcagcatgacggcacgtacttcgggcggctgggaatcgcaaacgctgccacggactttcagttggaagtgactcctgagaacattacgctgaaccccggctttggtgcgcctgcgttttcctggagggaccaagctgtgctgcggca

SEQ ID NO: 152968 - DNA, 638 bp, Homo sapiens; identical to SEQ ID NO: 135653

SEQ ID NO: 152969 - DNA, 416 bp, Homo sapiens; identical to SEQ ID NO: 135656

SEQ ID NO: 152970 - DNA, 1485 bp, Homo sapiens
acaaaggaggcccttctcagaatcctggaagatatgaaagaggaagactatctgaatttcatcctgttcagtggagatgtgtccacatggaaagagcacttagtccaggccacgcccgagaacctccaggaggccaggacgtttgtgaagagcatggaggataaaggaatggacaatttcctcatgagaaaggggaagacgaaagctaagctagaagaaaggggagccaaccaggactcgaggaatgggagcaaggtccgctaccggagggccgcatcccacgaggagtctgagtctgaggctgctgcctgcatacgtgatgccatggcctactcagtgcatcataacctgaggtgcctggtgtcagttgattctagtgttggtgaaggtttcattgataactgggagcaggagcttcccgtgtctgctgcgtctgattatggcaagctcactgggcccttgcagcaaactcagagaggggctaccacaggttcacaggtggagaaagtgaggtgctggcagggccagaaaatcaactgtgactcctctgctgttgcacaaattcagcagccagtccagggggtcatgtcccagaaggccagacacacttacctggtggccaagcccccttcttccgggaagccgctaggggcctcggggagaactatggagcaattcaccatccacctcaccgtcaatccccagagcaaggtcacgtttcagctgacttatgaggaagtgctgaagagaaaccatatgcagtatgaaattgtcatcaaagtcaagcccaagcagctggtgcatcattttgagaccaaggaggcactccttaaaattctgggggacatgcagccaggggactactttgacctggttctttttgggactcgagtacaatcgtggaagggctcgctggtgcaagcatctgaggccaacctacaagcagctcaagactttgtgcggggcttttccctggatgaggccacaaacctgaatggaggtttgctccggggaattgagatcttgaaccaagttcaggaaagcctcccagaactcagcaaccatgcctcaatactcatcatgttgacagatggcgatcccacagaggatcccccagtatttattcgcgataagctcatggagcggcgtaaccgtcgcacaggaaggacagagaaagcgcggatctgggaagtgacggacagaacggtcaggacctggattggggaggcggttgccgccgctgctgctgacggtgtgacgttctctgttccggtcacaccacatacgttccgccattcctatgcgatgcacatgctgtatgccggtataccgctgaaagttctgcaaagcctgatgggacataagtccatcagttcaacggaagtctacacgaaggtttttgcgctggatgtggctgcccggcaccgggtgcagtttgcgatgccggagtctgatgcggttgcgatgctgaaacaattatcctga

SEQ ID NO: 152971 - DNA, 3060 bp, Homo sapiens
  misc_feature (1)...(3060): n = a,t,c or g
ggtctgactgaggtgacagggcagcaggagccttagagcatggacggtgccatggggcctcgggggctgctgttgtgcatgtacctggtatctctcctcatcctgcaggccatgcctgccctgggctcggctacaggcaggtccaagagcagcgagaagcgacaggctgtggacaccgctgtcgatggcgtgttcatccggagtttgaaagtcaactgcaaagtcacctctcgcttcgcccactatgttgtcaccagccaagtggtcaacactgccaatgaagccagggaagtggccttcgacctggaaatccccaagacagcattcatcagtgactttgccgttacagcagatggaaacgcatttatcggagacataaaggacaaggtgactgcatggaagcagtaccggaaagcagctatctcatgagagaaagccaggccttgtcagggcctcggggagaactatggagcaattcaccatccacctcaccgtcaatccccagagcaaggtcacgtttcagctgacttatgaggaagtgctgaagagaaaccatatgcagtatgaaattgtcatcaaagtcaagcccaagcagctggtgcatcattttgagattgatgtggacatcttcgagccccaggggatcagcaagctggatgcccaggcctctttcctgccgaaggaactggcagcccaaactatcaagaagtccttctcaggaaaaaagaccagtaatggctcacactctcgacggttccagggtcatgtgctgttccgtcccaccgtgagccagcagcagtcctgccccacatgctctacatccttactgaacgggcacttcaaggtgacctacgatgtcagtcgagacaagatctgcgacctcctggtggccaataaccactttgcccacttctttgccccccaaaacctgacaaacatgaacaagaacgtggtttttgtgattgacatcacgtggctccattgagaggccagaaagtgaagcagaccaaggaggcactccttaaaattctgggggacatgcagccaggggactactttgacctggttctttttgggactcgagtacaatcgtggaagggctcgctggtgcaagcatctgaggccaacctacaagcagctcaagactttgtgcggggcttttccctggatgaggccacaaacctgaatggaggtttgctccggggaattgagatcttgaaccaagttcaggaaagcctcccagaactcagcaaccatgccttcaatactcatcatgttggacagatggcgatcccacagagggggtgacggaccgttcccaaatcctcaagaacgtccgcaacgccatccggggcaggttcccgctctacaacctgggtttcggccacaatgtggactttaactttctggaggtcatgtccatggagaacaacggacgggcccagagaatctacgaggaccatgatgccacccagcagctgcagggtttctacagccaggtagccaaacccctgctggtggatgtggatttgcagtacccccaggatgctgtcttggccctgacccagaaccaccataaacagtactacgaaggctcagagattgtggtggccgggcgcattgctgacaacaaacagagcagcttcaaggctgatgtgcaggcccatggggagggacaagaattcagtataacctgcctagtggatgaggaggagatgaagaaactgctccgagagcgtggccacatgctggagaaccacgtcgagcgcctctgggcctacctcaccatccaggagctgctggccaagcggatgaaggtggacagggaggagagggccaacctgtcatcccaggccctgcagatgtcgctggactatgggtttgtgaccccactgacctccatgagcatcaggggcatggcggaccaggacggcctgaagcccaccatcgacaagccctcagaggattctccgcctttggagatgctgggacccagaaaggacgttcgtgctgtcagccttgcagccttctcctactcattccagctccaatacccagcggcctgccagaccgagttgaccggcgtgggacacagacccttcaatttcattcattccacgtgccccagaaagagggacaccctgtgctttcaacatcaatgaggagcctgggtgttatcctggagcctgggtacagggaccccaacacagggtttttcagtggaatgggacagctcattgggcaacaagggccagggagcctgggggaaggcattgacgggcactaatttcggggcggctggggaattcgcaaaccctgccacggaacttttcagttgggaagtgactccttcagaacatttacgctgaaaccccggcttttggtgggcctgtgttttcctggggagggaccaagtttttctttccggcagggacggggtggtggtgaccatcaacaagaagaggaacacctgtggtgtctgtggacgacggtggcaccttttgaggttgtttttgcaccgagtgtgggaaggggagctcgggtcnaccaggacttcctggggcttctaatgtgctgggacaagtcaatcgggatgtcaagcccgggacgcaagggctgctgggggcaaatttttcccacccccatcggttttgaaagtgtctgaacatcccaccccagggttccgacccccacaaaagcccaaatgcccacgatggtggttaggaacccgcccggcctcacggtcacccaggggtttgcaaaaagacttacagcaaggacccgtggcatggggccgaggtgtcctgctggttcatttcacaacaatggggctggactcatcgatggtgcctacactgattatattcgtccccgacatcttctgagccctctgggccagcaacgcctgttccntgcccccgggggccaaggcagaggaggaggacgacatcctgacctgctgctgaggctgtacctccttgacctaagctggttcctttgtgtcaaagcacctcatgccttcccattaaagagaggccgtgtccaaaaaaaaaaaaaaaa

SEQ ID NO: 152972 - DNA, 2233 bp, Homo sapiens
cgagattccgggattggaatcaaaatgctaatttaaaaggtcaagtgaagctgctcctcacgttttggcgtgccttgcctctctctgcaggcagaagcgaacaaagacccagcaagagaaggcagaggctaagacccatcccgtatctgctctcctgaaataattctggagtcatgcctgaaatgccagaggacatggagcaggaggaagttaacatcccctaataaggagggttctgggttactgggtgccactggggcttccttggcagagctgtacacaaagaatttacagcagaataatttgggcatgcagttggctgtgggtttcagaagagcaagaccaaaattttgaacaggttaaatctgttgggattctaatgcagtttcatcacatcatttcatgatttttcagccccatgttatagtacattgtgcagcagagagaagaccagatgttgtaggaaaatcagcccagatgcttgcctcttcaacttaatgtgggatgcttctggggaattttaggccaaagggaaggcagctgcctgtttggggagcatttctccattctacatttaggctcaggtttttgtattttgatgggaaccaaatccaccttacaagagaggaagacataccagctcccctaaattttgtatggccaaaccaaatttagatgggagaaaaggctgtccttggaggaaccatctaggagctgctgttttgaggattcctattctgtatggggaagttgaaaaacctcgaaaaaaagtgctgtgaactgttaatgtttgaataaaagtgccagttcagccaacaaagtccagcaaaacaatggatccactggcaagcaagaggttcccccccacacatgtccaaagatgtggccccactgtgtgcccggcagcctagcagagaagagaatgctggatcccatcaattaagggaacctttccactggtctggcaatgaacagatgaactaagtatgaaaagggcatgtgccaattgccagatgcccttcaacctccccagcagtcaccttaagaccctattactgacagccctgtccctaggagcacaacgtccgagaaatgctcagcttgactgctccaaattggagaccttgggcattggccaacgaacaccatttcgaattggaatcaaagaatcactttggcctttcctcattgacaagagatggagacaaacgggtctttcattagtttatttgtgttgggttcttttttttttttaaatgaaaagtatagtatgtggcactttttaaagaacaaaggaaatagttttgtatgagtactttaattgtgactcttaggatctttcaggtaaatgatgctcttgcactgatagaattgtctaaagaaactaaagggcagtcatgccctgtcttgcagtaatttttctttttatcattttgtttgtcctggctaaacttgggagtttggagtaatagtaaaattatgaccccttaaaatatttgaagaagtccaggatgaaagcagaacctgctgtaagaccttttccagatgaaaattgttccattcctcgtaacctcccatattttccaggatttttgaagcctgttgaccttttccatgttgattattttaaattgtgtgaaatagtataaaaatcattggtgttcattatttgctttgcctgagctcagatcaaaatgtttgaagaaaggaactttatttttgcaagttacgtacagtttttatgcttgagatatttcaacatgttatgtatattggaacttctaccgcttgatgcctcctgcttttatagcagtttattgggaagcacttgaaagagcgttgtgtccatgtattttttttctaggcaaacattgaatgcaaacggtgtatttttttaatataaatatataactgtccttttcatcccatgttgccggctaagtgatatttcatatgtgtggttatacttcataataatggcgccttgtaagtcttttcaccattcatgaataataataaatatgtactgctggcatgtaatgcttagttctcttgtatttacttctttttttaaatgtaaggaccaaacttctaaactaattgttcttttgttgctttaatttttaaaaattacattcttctagatgtaacatgtgatacatacaaaagaatatagtttaatatgtattgaaataaaacacaataaaattaacacttgaaaaaaaaaaaaaaa

SEQ ID NO: 152973 - DNA, 463 bp, Homo sapiens; identical to SEQ ID NO: 112928
  misc_feature (1)...(463): n = a,t,c or g

SEQ ID NO: 152974 - DNA, 779 bp, Homo sapiens
  misc_feature (1)...(779): n = a,t,c or g
gctgcttcgggcttcagtgatattgcaaagcatctccagaagttagcacaggcagtagtgaatgcaggagctgttgctcatttagcccagatgatcctanaccctgatgctagattgaagcatcagatctttccagctcattctgagaccctagcaatggcagtcatcatttctaagggtgtacnccagttgtcagtctgcttgtcagaagaacggaaagatcatattaaggctgcagctgcttgggccttaggacagattggaagacacactcctgaacacgcacgggctgttgcagtcacaaatactttgccagttctgctttctttgtacatgtcaacagaaagttctgaggatctccaagtaaaaagtaaaaaagccataaagaatatcctgcaaaaatgtacctacttaccagcccttgaaccatttctatatgatgctcctcccaatattctgaaacatgtggttggacagttcagtaaggtgctgccgcatgatagcaaagctcgacgactttttgtaacaagtggtggccttaaaaaagttcaagagataaaagcagaacctggttctctccttcaagaatacatcaacagtattaacagttgttaccccgaggaaatagtgaggtattattcccctggatattcagatacacttctgcagagggtggacagctatcaaccacttaataactgagcaaagttatattgtgatactcaaattcacagcagagtagttttgagtaacagtaattaaatccttctaaatatttg

SEQ ID NO: 152975 - DNA, 2606 bp, Homo sapiens
tttttttttttttttttttttttttttttttttttttgctgtttttatttaaaattttattgaaaccctctttcacccgtttaccacttcctaagtaaaaatgcatgtaaactctgagcctgatggtattagcttcaaactattccttaaatacctgaaaatgtgacttttgaaacttgggaaagtgacgttaggacaaggatccattttacatgcctgcttctttgttcattcatgagcagagctagactaagaaacctttcaatgagagggagagcatgtatgcaggagtataactctctattctgaattctaccctcgctgggcccaatgaaaggtaaggaacactttagatagggtggggaaggaggtttggaaaacttgtgataaagaggagtaaatttttcctaaattcttagtaaaacctaacaggttacccacagagtccgtgtcttaagttaatgcacttatataactagcatcagagtctccttcaagtgccctgtatatctgtcatcagtttcctccttcaaagatttctcttgtgtatactactatatagttagcaaggccagctttccttgcctatgcctatgacaaattggctagaataatttagggtttttgaatgccatctcttaactatatctcattggaggtgtctgcatgtacgagtgtgtgtggtttttaacagaataacaaaatgccttaaggccctttaacgtgtttttaaaatctacctgtagaacaaatcctatgcatgcgaatgaccatgaatagttcctcacatattcaagctacgaatgtttaaagtattacataaatttagaaaatattatctaaaggtatttcccattaaataaatctagaatatacttagttcaaatatttagaaggatttaattactgttactcaaaactactctgctgtgaatttgagtatcacaatataactttgctcagttattaagtggttgatagctgtccaccctctgcagaagtgtatctgaatatccaggggaataatacctcactatttcctcggggtaacaactgttaatactgttgatgtattcttgaaggagagaaccaggttctgcttttatctcttgaactttttttaaggcccaccacttgttacaaaaagtcgtcgagctttgctatcatgcggcagcaccttactgaactgtccaaccacatgtttcagaatattgggaggagcatcatatagaaatggttcaagggctggtaagtaggtacatttttgcaggatattctttatggcttttttactttttacttggagatcctcagaactttctgttgacatgtacaaagaaagcagaactggcaaagtatttgtgactgcaacagcccgtgcgtgttcaggagtgtgtcttccaatctgtcctaaggcccaagcagctgcagccttaatatgatcttccggttcttctgacaagcagactgacaactggggtacacccttagaaatgatgactgccattgctaggttctcagaatgaactgctacataaccaagcatcatgatgccaggcagccgtgtgttccctttgcaggacccaatgcagtcaatcacggcagcaacccctcctgcgttaactaccagctgtgaaagctcgggtgtatgttttgcaatctctctaattaaagtagaagcatttttcttcacgtattcatccttgtccttcagacaggtaagtacaactggaaaaatctctgcttcaacaaccatttctgccagatccacggaatgttttgaaacctgactgagagctgaaaggatctgatgcttcaatttagcatcagggttcaggatcatctgggctaaatgagcaacagctcctgcatccactactgtctgtgctaactctggagaatgctttgcaatatcactgagggccgaagcagcaatccttttcaaagcaatttctggctcctggatacagagtactaaaagaggaacagctcctgcatccaccacagcttgtgacagttctgcattatgtcttgcaatatatctaagtgcccaggctgcagcctccttgactccagggtcaaaatcttccaagcatatgaccagcgtatccagtgctccacaatcgactattgcctgagctagctggggagaatgtttaccaactgctcgtaacacaaaggcagctgctttcttgtagaagcgattctgttctgccaatgaataaacaagctgtggaagaatgtcgcacttcacaacagcttctgctaggtcatcattataattggccagtctcccaagagccaaagcagcagtctgttgaattgttgggaccacgtccagaagaagagttctcagcaaagacattacacccgcgttctgcagcgtctcgatgttttggggtctagtcgccagctccgccaccatctgcacgaactgggtcctggccttctggtattgctcgaacacttgcagcacctgcctctgactcatggcgcccccgccgccgtctgccctcctcgagctctgcggggaagccgctcggcctgcgagtccaccaagggggcgatcgtggcgacgactcggcctccgacgggagccgcttctc

SEQ ID NO: 152976 - DNA, 1639 bp, Homo sapiens
  misc_feature (1)...(1639): n = a,t,c or g
actcttgggaaaactgctgggcaccgtcgtcgcgctgaaggtggttctgtacctgctccgagtgtgcttagcgatggcctggaaatccggcggcgccagccactcggagctaatccacaatctccgcaaaaatggaatcatcaagacagataaagtatttgaagtgatgctggctacagaccgctcccactatgcaaaatgtaacccatacatggattctccacaatcaataggtttccaagcaacaattcagtgctccacacatgcatgcatatgcgctagaacttctatttgatcagttgcatgaaaggagctaaagctcttgatgtaggatctggaagtggaatccttactgcatgtttttccacgtatggtgggatgtactggaaaagtcatgggaattgatcactttaagagtctagtagatgactcagtaaataatgtcaggaaggacgatccaacacttctgtcttcagggagagtacagcttgttgtgggggatggaagaatgggatatgctgaagaagccccttatgatgccattcatgtgggagctgcagcccctgttgtaccccaggcgctaatagatcagttaaagcccggaggaagattgatattgcctgttggtcctgcaggcggaaacccaaatgttggagccagtattccaggctccaggatggccagcatccaaaatgaagccctctggatggggggtgatatacgtgccctttaaccgngataaagaaaaagccagtgggtcccaggtggaagtgattttatcttctgctcttccttccttccacacatggcaagggatgaattgttaaaagcaacatcagctttgacccagtttaaatttacagtgggattgctccatctccagtccctccaaagctttttggaaaaccaacaccatccacagcttggttttgggactttggttaacactggttatttttcaggcatgaaaatgtgtgttttttttagggtttttgattcttcaaaaaggcacagagccaaattggtagaggaaggatgcaaagtataaatttgtgtaatattactttaacatgcccatattttacttggaaatattaaaagaaagggttttgtaaaatggaaaacttagtttgtgaattgattttgaggagtggtttttcttttcttggacacttaattctgttctgatattaatttatcagattgcttttgtgcattggataacaccaccattcacaagttaagattcttggtatttggatatctgttagatgctactaagaaaatagagatgagctttctttttaaagcttttgatgtggtgtcataaaatagcatgttgtagatacaatcagctgctttgttaccttaaaactaggcatttgtacaatattaaaccttaagaatggcaggtgaatgtcctgtaaacactcagctgttcagattggacataactgacttagttcttcccttctctctctctcaaaattataggagacttgtagtttagtgtggttttctgtttctaatttgctgctgataatgtatatgaacttaacatgctgtgtaagctgtgtcctagttcttgaacagtttatgcagtgctgctttgccaaataaagttaaaagtaaaagaggc

SEQ ID NO: 152977 - DNA, 1826 bp, Homo sapiens
caaaaagtcgtcgagctttgctatcatgcggcacaccttactgaactgtccaaccacatgtttcaggcagcggcggcgacggcagtaacagcggcagctacagcggggacgcgagcggggcggtgacggtgtgggaggtggtctcactcttgggaaaactgctgggcaccgtcgtcgcgctgaaggtggttctgtacctgctccgagtgtgcttagcgatggcctggaaatccggcggcgccagcacttcgggagctaatccacaatctccgcaaaaatggaatcatcaagacagataaaagtatttgaagtgatgctggctacagacccgctcccactattgcaaaaatgtaacccatacatggattctccacaaatcaaatagggtttccaaagcaacaatcagttgctccacacattgcaatgcatatgcgcttaggaactttctattttggatccagttggcatggaagggagcttaaagctctttgatgtagggtctgggaagtgggagtccttacttgcatgtttttgcacgtatggttgggatgtactgggaaaagtcatagggaattgatgcacattaaaggagctagtaggatgactcagttaaattaatgttcagggaagggacgatcccaacacttctgtctttcagggggggagtacagcttgtttgtggggggatgggaaggatggggatatgctggaagaagccccttatgatgccattcatgtgggagctgcagccccgtgttgtaccccagggcgctaatagatcagttaaagcccggaggaagattgatattgcctgttggtcctgcaggcggaaaccaaatgttggagcagtatgacaagctacaagatggcagcatcaaaatgaagcctctgatgggggtgatataccgtgcctttaacagataaagaaaagcagtggtcaggtgggatgattgtaaaagcaacatcagcttgaccagtataaaattacagtggattgctcatctcagtcctcaaagctttttgaaaaccaacaccatcacagcttgtttttggactttgttacactgttattttcaagcatgaaaatgtgtgtttttttaggggttctggattctttcaagaaggcacagagccaaattggttagaaggaaggaatgcaaagtataaattttggggtaatattactttttaacatgccccatatttttacttggaaatattaaaagaaagggttcttgtaaactggaaaacttagtttggtgaattgatttctgaggagtggtttttcttttcttggacgcttaatccggttccggatattaatttatcagattgcttttgtgccatgggataacacccaccattcaccaagttaagattcttggtatttggatatctgttagatgctactaaagaaaatagagcatgagcctttccattttaaagccttttgatgtggtgtccatagaatagccatgttgtaagatacaatccagcctgcctttgttacctctaaaacataggcatcttgtaaatattaaacccataagatggccaggtgatgtccctgtaaacactcagctgttccagattggacataactgtacttagttccttcccttctctctctctcaaaattataggcgacttgtagtttagtgtggttttctgtttctaatttgctgctgataatgtatatgaacttaacatgctgtgtaagctgtgtcctagttcttgaacagatttatgcagtgcctgctttgccaaataaagttaaaagtaaaagaggaaaaaaaaaaaaaaaaaactcgagggggggcccggta

SEQ ID NO: 152978 - DNA, 478 bp, Homo sapiens
gcggccgccgcgcgttccctcttggcggggttggccggccggggcgttgcgcggcgctccggctcgaggcattcggagctgcgggagccgggctggcaggagcaggatggcggcggcggcggctgcaggcgaggcgcgccgggtgctggtgtacggcggcaggggcgctctgggttctcgatgcgtgcaggcttttcgggcccgcaactggtgggttgccagcgttgatgtggtggagaatgaagaggccagcgctagcatcattgttaaaatgacagactcgttcactgagcaggctgaccaggtgactgctgaggttggaaagctcttgggtgaagagaaggtggatgcaattctttgcgttgctggaggatgggccgggggcaatgccaaatccaagtctctctttaagaactgtgacctgatgtggtataagcaaaactacatggactctgtcctggtatccttttcctgtgtg

SEQ ID NO: 152979 - DNA, 1969 bp, Homo sapiens
  misc_feature (1)...(1969): n = a,t,c or g
atggcggcggcggcggctgcaggcgaggcgcgccgggtgctggtgtacggcggcaggggcgctctgggttctcgatgcgtgcaggcttttcgggcccgcaactgggtaatgctgcgggctggggctgctgggtctccgcgggggtggccgggggctttcgtgtggaacccggcggggggcagtctagaggaaggtctacgcgtctattcctgtttccgagtgcgtgcgcacgccagtcccagggcgctgggcctttgctgtgcaaggaggtgctccgtgggcctccgccagacccaaaaagtccggcgtgactcgggagagaattccaaaggggaggaacgggagcagggtggtgaagtctgggcttttagtgtaaccatcacccaaatagtgtacatttaccaaggttttcttgttgctcagaatctggtacaggaatatgcttctgaagaattcagtcacaccactcccttcctgccacccatctgctcagtgcttggggacactgatgagggcgctttcccaggtcttcagagatgcatggtgtgggttgccagcgttgatgtggtggagaatgaagaggccagcgctagcatcattgttaaaatgacagactcgttcactgagcaggctgaccaggtgactgctgaggttggaaagctcttgggtgaagagaaggtggatgcacattctttgtgttgctggaggatgggccgggggcaatgccaaatccaagtctctcttttaagaactggtgacctgatgtgggaagcagagcattattggacatccgaccatcttnccagccatcttggcttaccaagcatctcaaggaaggaggcctcctggaccttggctgggcgcaaaggctgccctggatgggactcctggtatgatcgggtacggcatggccaagggtgctgttcaccagctctgccagagcctggctgggaagaacagcggcatgccgccccggggcagccgccatcgctgcgctcccgggttaccctggataccccgatgaacaggaaatcacatgcctgagggctgacttcagctcctggacacccttataatttctagttgaaactttccatgactggatcacagggaaaaaccgaccgagctccaggaagcctaatccagggtggtaaccacagaaggaaaggacggaactcaccccagccatatttttaggcctcatctcagtgcctatgaggtggcctgcccagaaaagtcactaacctgtcttaggtgtggccttgtcagcccttgtgttttctggtaacccctgttttgtggtacgaataaatgagtctattttttctctcacataaatatgccatttgctctcctagggacaagtgtaatacatttatgtgaagtaagacaatgcgagactgggtggcctgcaaataagcatcccgtcaatctgtgtttaactcataggggagggctctgcatagcacctgttatagcggtgtccatgtttggatcgctttttgtgactgttcattctgtcccttgacaagtggctgtcaatcttgacctactttgtttgattctgctcggtattggggaccattataaacggctgagttatttttgaaatgtcatgtttatggtccgtagatgtagttttccgcatcccttgaattaaactggccttaactccttttgtggtataaagcaaaactccatggactctgtcctgggtatccttttcctgtgtggttgcccctgtgcctgtggtctggcctagggttaagtgtgcaagataactactccgtgagttattcagaatgttgttcctaataaatgcacttgttgtctgtcttctttaatcaaatcacatcttatatacagcagtcagagatgagtatactagaatcatggattgctggaggtcttttaatctgatgttctcagaagggggtggatttaaatcctgaaataaatatttcaacac

SEQ ID NO: 152980 - DNA, 297 bp, Homo sapiens
  misc_feature (1)...(297): n = a,t,c or g
ccacagacactggagagtcatgtacatttttctgggtttctctgaagnaaaaatcttgtatgtcgtggctttcatgtctttccaacattactgtctggaatatttctcctgtattactctccttttttggtggtaattccttgatctcacatttagnaaaaatacctgaggaagaaccattcctgacgcctttgctttcctcttccccttccgggtttctncctcatgtaccaagagtccttagaagtcaatccgccacggtgtaactttcactccacataatccgcttccgggttt

SEQ ID NO: 152981 - DNA, 516 bp, Homo sapiens
atggatttggagccagtgcagacagagcagagtggtgctggtgtcaaggagaaccgagggagaaacacagcatggaggacacctggtgatctgcatcgcaggattcatactggagagaaaccatataaatgtaatgaatgtggcaaggtctttaatcaaatttcacaccttgcacaacatcaaagaattcataccggagagaaaccttataaatgtaatgaatgtggaaaggtcttccatcaaatttcacaccttgcacaacatcggacaattcatactggagaaaaaccttacgaatgtaacaaatgtggcaaggtgttcagtcgcaattcctaccttgtacaacatctgatcattcatactggagagaaaccttacagatgtaataaaaggaaaggaactgaaattaagggaagggagagattgaaaggtggtgctgaaattgaaaggagaaagatgatgagggatagtgacaaagttggagaagacagtaaaaagaccacttacccaatttga

SEQ ID NO: 152982 - DNA, 3040 bp, Homo sapiens
  misc_feature (1)...(3040): n = a,t,c or g
cggaanncccgggtcgacgatttcgtgcggggcccgccgaggcccggcttctgtcctgcgcgcgcagattctcgcaaatctggaagcggatcgcgtggagtgacggtcacaccgcggcgaattaatttccaaagactcatgttacatgagaaagccaccaagaagaccaaagaaaaggagacaaggatggctcttcctcagggatgcttgactttcagggatgtggctatagaattctctttggaggagtggaaatgcctgaaccctgcacagagggctttatacagggccgtgatgttggagaactacaggaacctggagtctgtgggattgacttctaatgactcttgggacatgaggaacaaacccggaaggggaagaggaaagccaaggcggctggaatggttctttctcagggtctattgacattcagggatggaggccatagaattctctcaggaggagtggaaatgcctggaccctgctcagaggactctatacagagatgtgatgttggagaattataggaacctggtctccctgggtattttttctaaatgtgagatcaaggaattaccaccaaaaaaggagagtaatacaggagaaatattccagacagtaatgttggaaagacatgaaaagccaccgacataccaagattttttgcttcagagaaacccagaaaaatgtacatgactctcagtgtctgtggaaacatgattgaagacattataagcgagtgcgtgtgacctataagggaaagtctcattggtagaagagaccatgccagggtagaagggatgatgccacaaaagccagccctgttaaaaatccagccttggattaaaccccgcagtcacatcctacccagaacctgccagcctatttccaagcctgaagggaaaatatataaatatgatcacatggaaaaatctgtcaacagtagttccttagtttccccaccccaacgtatttcttctactgtcaaaacccacatttctcatacatatgaatgtaattttgtggattcattattcacacaaaaagagaaagcaaatattgggacagaacactacaaatgtagtgagcgtggcaaggcctttcatcaaggcttacattttactatacatcaaataatccatactaaagagacgcaatttaaatgtgatatatgtggcaagatcttcaataaaaaatcaaaccttgcaagtcatcaaagaattcatactggagagaagccatataaatgtaatgaatgtggcaaggtcttccataatatgtcacaccttgcacagcatcgcaggattcatactggagagaaaccatataaatgtaatgaatgtggcaaggtctttaatcaaatttcacaccttgcacaacatcaaagaattcataccggagagaaaccttataaatgtaatgaatgtggaaaggtcttccatcaaatttcacaccttgcacaacatcggacaattcatactggagaaaaaccttacgaatgtaacaaatgtggccaaggtgttcagtcgcaattcctaccttgtacaacatctgatcattcatactggggaggaaaccttacagatgtaatgtatgtggaaaggtcttccatcatatttcacaccttgcacaacatcagagaatccacactggagagaaaccttacaaatgtaatgagtgtggcaaggtcttcagtcacaagtcatccctagtaaatcactggagaattcatactggagagaaaccttacaaatgtaatgagtgtggcaaggtcttcagtcacaagtcatccctagtaaatcactggagaatccacactggagagaaaccttacaaatgtaatgaatgtggcaaggtcttcagtcgcaattcataccttgcccaacatctgataattcatgccggtgagaaaccttataagtgtgatgaatgtgacaaagcattcagtcggaattcacatcattgtacaacatcacagaatccatactggagagaaaccttacaaatgtgatgaatgtggcaaagtcttcagtcaaaattcataccttgcatatcattggagaattcatactggacgaaaaagcttatagatgtaatgaatgtgggaaggtcttcggtctacactcattcctagcacatgatcctaaaattcacagctggagagaaacctttcaaatgtaatgaatgtggcaaagcttttagtatgcgttcaagcctcactaatcatcatgcgactccacactggagagaaacatttcaaatgtaatgaatgtggcaaactcttccgcgacaattcatatcttgtacgtcatcagagatttcatgccggaaagaaatcctaacacatgtaattaatgtggcagagtgttcagttagcattaaagccttgtaagacatacaataatttatactggagaaaaactttggcaagtataatgaatgtagcagagcctttagttttttgttcaaggcttaataaccgttagctagaccatagagggacagaaactttactaatggtactgaatgtgggcaaggtcttaaagggttaaaatctgagacccaggaatttttccaaaagaattccttgcttggtgagaaacctaaccaaatgtaatggaatgtggcaaggtcttctggccacaattctcacattgtacaatattgccaaaaatttcatggcttgaggaggaaacaaaaaccactgagagtgggaaacccattatgacttcaaacattcatcaacatcagagaatcccatactaaagagcatttataataattatatgtgatagagattttcccacaggccaaagtctcactagggcatcaaaaaccttttttgatgaaaccatacgaaatgtaacgtgcatgcttaagcttttacccaggcatcaaaaccggaacatcacagggtttatactggagagtaactacacaaagataatgtaataagcctttcagtgtaatattcatgattttgtcgtgagagatccactcaataaaaaccgaggcaaatgtaaaaaaaaaaaaaaaaaaa

SEQ ID NO: 152983 - DNA, 581 bp, Homo sapiens
gctcgaccagaacacagaatgttcttggtgagaagggccggcggattcgggaactgactgctgtagttcagaagaggtttggctttccaggcagagtctctgcgttacaaactcctaggagggcttgctgtgcggagggcctgctatggtgtgctgcggttcatcatggagagtggggccaaaggtgcgaggttgtggtgtctgggaaactccgaggacagagggctaaatccatgaagtttgtggatggcctgatgatccacagcggagaccctgttaactactacgttgacactgctgtgcgccacgtgttgctcagacaaggtgtgctgggcatcaaggtgaagatcatgctgccctgggacccaactggtaagattggccctaagaagcccctgcctgaccacgtgagcattgtggaacccaaagatgagatactgcccaccacccccatctcagaacagaagggtgggaatgcagagccgcctgccatgccccagccagtccccacagcataacagggtctccttggcagctgtattctggagtctggatgttgccctcctaagacctttaataaa

SEQ ID NO: 152984 - DNA, 565 bp, Homo sapiens; identical to SEQ ID NO: 144959

SEQ ID NO: 152985 - DNA, 1007 bp, Homo sapiens
  misc_feature (1)...(1007): n = a,t,c or g
ggagctcaaggatccttaattaaattaatcccccccccccccgcctttcctttcagcggagcgcggcggcaagatggccagtgcaaatttccaagaagaggaaggtttgtcgcttaatggcattctttcaaagttaaacttgaatgagtttctttactcgggaactgggctgaagatggcttactctggaagttgaggtgcgagttacaccaaccaggaacagaaaatcatttatctttagccaccagaaacacagaatggttcttggtgagaagggcccgccggattcggggaactgccttgctgtagttcagaagagtttctggcttccccagaggggcagctgtagagctttatgcctgaaaaaggtggcccacctagagggtctgtgtgccatttgcccagggcagagtctctgcgtttacaaancctcctagggagggccttgctgtgcggagggccctggctatggtgtgctgcgggttcattcattggagaagtggggccaaaaggctgcgaggtttgtgggtgtctgggaaaactccgaggacagagggcttaaaatccatgaagttttgtggatgggcctgatgatcccacagcggagaccctgtttaactactacgttgacacgtgatgtgcgccacgtgttgctcagacagggtggtgctgggcatcaaggtgaagatcatgctggcctgggaccccaactggtaagattggccctaagaagccccgtgcctgaccacgtgagcattgtggaaccccaagagatgagatactgcccaccacccccatctcagaacagaagggtgggaagccagagccgcctgccatgccccagccagtccccacagcataacagggtctccttggcagctgtattttggagtttggatgttgctctttaaagacctttaataaaattttgtacaaagacaaaaaaaaaaaaaaaaaaaaaaaaagtcgacgcggccgcgaatttagtagtagtagtaggcggccgc

SEQ ID NO: 152986 - DNA, 724 bp, Homo sapiens
atgtactaattcaacaatttctgcatttctgtacatttatgctgtttctagttttttattatctcaaaaaacacttcacacagtcttgtatctgactctttgggcacttgtatgaatatttcttcaggctggatgcctaaaattagtcattagatcaaaggctggagacatttcacatgttgatacacactgtcaaactgtccatccaaaagctgtatcaatttctacaatgactgagaatactcctttcctcacattatctccagcactatcaccaatctttaataatctgccatttcaatgtattgaaaaatagtatctcattttaactttaattttcctgattgcttacgaggttgaaagtttatgtttatagtctgtatttcttatttataaaatatttttatagcctttgtccaatttttgttgtttgtaggtgctctttatattatcttaaatcttctgttctattacatgtattttcccactcctttatttatgaaatctaattttatcaaagttttgtaaaaagtgaaaggttttactttttaaaaatgtagtcaaatctatcttttttttcatggctactgggttttgtgtcttggttgggaatgcctttcttacacatttattacaatttttttccagtattttcttctagttatttttaatttccatgtttaattcatcttgatttttttcatccatgatatgaaataagcaa

SEQ ID NO: 152987 - DNA, 1262 bp, Homo sapiens
tttcgtagcgtgtgaagtaggcgctggcaacgcggggttattcgctgttattgaggagtaacggcccagcggaccacccaggcttgaggcagcggcgggaaccactcggtttgctgcgataccatggaaggaggcgggggaagcggcgacaaaaccacaggggtattggccggctttttcggagccggcggagcagggttactcgcacgcggatttggctggcgtcccgctaactaggatgaaccctctgtgtccttattttaaatgtgggatccacgatacctcgtgcaaggatacaagatgaagtttatttttaccttacccgagctaattaaaacccgggggcaagatttgaagctggccttctttacgattggaggatgttgcatgacaggggctgcgtttggtgcaatgaatggtcttccggctaggattgaaggaaacccagaacatggcctgggtccaaaccaagaaatgtacagattttgaataatgggtgactagggaaaggggcacttttgggctaaatactctaggtctctgggctttgctctataagtgcatttggtgtccatcattgagaaaacacgaggtgcagaagatgaccttaacacagtagcaagctggaacccctgccggccatcttgtatacatgtacagggtggtcttcgagggatagcaccgaggtggtctgacaggactaacactttcccagccttctatgcactatatataatacctggggagcacatggaaagggctccttggcttccaacagttcactctggaaggtttttgcccaacctccatgaaatgggaggacaccttcaggtaggtcattcctagatccctttttaataaggaccagtttgggaggttattcctcctcctccttcctaccctacaattaggtttgaaaaattgggagattttgatttgcctgtgatgaaaatccctggatggctgacccaagactggcactttgttcccagcccattagtgagttgaagccaaagcccctttggtgactcaactgagtacccatggttctgtctctcctctggagatcttgcacgtatctgttttcctcccccatgaactagaaaacccacttactcccagaattcaggtcgtgcttgttagtactatatcaccaagtccattcatttaatgatccaaaacttgtaatgttgcactggtattccaaataaaggggtaaaaacagaaccaaagttataactccaacacacaaaaaaaaaaaa

SEQ ID NO: 152988 - DNA, 285 bp, Homo sapiens
  misc_feature (1)...(285): n = a,t,c or g
gttataattcgcctccctatagggaaaaagctattccgttgcaagcccgggtaaacttgggcccccccagggatcctttaaagcggccgcccccggnnnnnnnnnnnnnnnnnattttaaaactaaatgcattttttatttgaaagggaatcttcatttcaccgctgcaaatggaaagctggcatcacttgtgttaaatcatggtacccatgaaaataagtagaatgaaaataaaataatgttgtcacactctggatgtggctgaggtgtcgaagcctccatgct

SEQ ID NO: 152989 - DNA, 1431 bp, Homo sapiens
  misc_feature (1)...(1431): n = a,t,c or g
cgccattttttttttttcttgagtagacttcagtgaccacactgtggaaaatacctttgcagacgtggcacccgagtgcacacaccgaccgccacatgtgcttttctgccgggaatccctggggtgaacgcatgttttatgggcgtttccaggagcgcgcgtgcacctccagacggggagctggcgggcgggggtggcagcagcagctctagccttggggggacaagcctctctcagctacgccaggggaaaagagagttaaggacactcacccccacccacgcacacacacaaggcagcgtcgggtgggagagagaaggccgtttctccttctgtagcctgggtctcccacgggccttccccgctgctgagcgagtacaccagtagccaggtgaagggccacagcgggccaggccccgaccctgttgtgacccacctggggcacctttcccggaccagcttccgccttccccttgccctcctctctccaggaaggagccagaaccctcacccctctcccaccctccccaaggggtaaccccaggccaagcacagataggtcaactgcgaacctctggcctctggggacataaacggggcggctgggccagggcggaaggggctcctgtttccctccttctgcgtggtccctttgacgggccggccaccgtgtccgaggcgcaacgctaggcctccaggccacgcatccatctccaagttaacagcccgtcctgcccaaagttctggggcaggtaggagagggccgtcaaaaaacctgtccgccccgtgaagtgaacccgggggggcttccgggtggaaggtggagcccaccaaggcccttcctcaaggggtcaacttattaaaaagtcccaacgcctgaggccagggccctctgcacagaagccatcatgccgggccaggcgcgcctcctcctctgtccacggaaaccgttgcccatcgtagccttcgtaaagacctgtctcctgtttcccagccgccgcctgtggttctagcaggttctatgccatctgcattgggatgtctggttgtttttatttctgacttttttaaaattccaggtgtgccgcacccactttctcgcagtgttttaatattgtgtggagttgtcgataccacgtgaattcatacacaataaaaagcctcactctcccttttnnnnnnnnnnnnnnnggggcggccggtttaaaggatccctcggggggcccaagtttacccgggcttgcgaggaaatagctttttccctataggggggcgtattataacctacctggggatttttgggaaggaacccttattttgggggggggacatattgggccaacctccctacagaaatttaaggctctagggnnnnnnnnnnnttttaaagggaaaaaggggtaaaacaacctgcatatgctggcggcttga

SEQ ID NO: 152990 - DNA, 410 bp, Homo sapiens
caggctctccagaaggattgaatgtagagggctgcttcctcttctgtcagcaggagcgagagtgggattggcggccgtgggatgtttttgggttgattgtttccgatttatcttgaggacagggtgtacgtgagatcatggtgaaatgggaaaccggaaaatagtgctctgcactgaagccatgaaaaagcatttcctctactggcgcaacccttgcagatctgctcccacagattcttgcttgacggctcggtgacctgccacgacgagacaggcagctcgcgggacgcgagagacacggtgggcaccggcgtccgggtgaacgacgagtctgtagagcagctgggcttgaggcgcactatgtggctggggatttgccgcggtgccgccatggccgccggacgcgtggg

SEQ ID NO: 152991 - DNA, 431 bp, Homo sapiens
gcttggcacgaggagacacacaaagtagaccttgggctcccagagaagaaaaagaataagaaagtggtcaaagaaccagagactcgatactcagttttaaacaatgatgattactttgctgatgtttctcctttaagagctacatccccctctaagagtgtggcccatgggcaggcacctgagatgcctctagtgaagaaaaagaagaagaaaaagaagggtgtcagcagccctaggaaaggaagtaaaaagaagccagtcaaagttgaggctccggaatacatccccataagtgatgaccctaaggcctccgcaaagaaaaagatgaagtccaaaaagaaggtagagcagccagtcatcgaggagccagctctgaaaaggaagaaaaagaagaagaggaaagagaggggggtagcaggagacccttggag

SEQ ID NO: 152992 - DNA, 531 bp, Homo sapiens
  misc_feature (1)...(531): n = a,t,c or g
gtgtggtggaattcggaggaggaaggcagaaaggcagctctgtgcagaggtgggcagtggtgttggctggacctgggctggaattctgggggtcactagttaggtttctgtctccagctaagctgcagacctctattttctcctctgtgcaatgggaataacaacagtgtttctcatagggctgtctttaggattaacggaataatccgttgttgagcttattagcactgtgcctggtacacagcagccatctaatctgctgggccctccctgatgagggtgggggtcaagggaaggaaagggctttgaactcaaggaaaatagccacctttttcctctcctcacagggaacccagtttggccagtgggatactgctggttttgagaacgaggaccaaaaactgaaatttctcagacttatgggtggcttcaaaaacctgtccccttcgttcagccgccccgccagcacgattgcaaggccccnacatggccctcggcaagaaggcggctgacagcctgcagcagaatctg

SEQ ID NO: 152993 - DNA, 510 bp, Homo sapiens
cttcgcttggtgaagcaggctagccattccgggaagcagaacagcaaagatgaaagtttccaaatattctatgggagaacatgtttttgggttgattgtttccgatttatcttgaggaacagggtgtaacgtgaagatcatggtgaaaatgggaaaccggaaaaataagctctgcactgaaagccatgaaaaagcatttcctctactggcgcaaccgtaatcacaggctcctgtttgactttatatccttctggaaagggaggctgctcagcttcatactccttgcagatctgctcccacagattcttgcttgacggctcggtgacctgccacgacgaaacaggcaagctcgcgggacgcgagagacacggtgggcaccggcgtccgggtgaacgacgagtctgtagagcagctgggcttgaggcgcactatgtggctggggatttgccgcggtgccgccatggccgcggtttccacggtaaccgcgttcgccggaaggccgcgaattcc

SEQ ID NO: 152994 - DNA, 2559 bp, Homo sapiens
atggaggtggacttcaaaatcagaaaagtcggccagtggacaatcacccttcaggagcacccagtcagtgttttgctattcatagaagagacccatccagaaaacaaacccacaagtacagcagtagaagaaagccacatcagccgtgatactgtgatggttaattttcagtgtcaacttgactggagtaagggatacctagaggcctatttgaccaaaataaactcgatctgctcccacagattcttgcttgacggctcggtgacctgccacgacgagacaggcagctcgcgggacgcgagagacacggtgggcaccggcgtccgggtgaacgacgagtctgtagagcagctgggcttgaggcgcactatgtggctggggatttgccgcggtgccgccatggccgcggtttccacggtaaccgcgttcgccggaaggccgcgacccggaagaagccggaacccgagagggtgggccggcgactcgaagtggacttccgggtcacggcggagctggctctcacgtggaggcggggaaatttcgcccaccggaatgatcaccaagacacacttttgtttaccttgggctcccagagaagaaaaagaagaagagggtggtcaaagaaccagagactcgatactcagttttaaacaatgatgattactttgctgatgtttctcctttaagagctacatccccctcgtaagagtgtggcccatgggcaggcacctgagatgcctctagtgaagaaaaagaagaagaaaaagaagggtgtcagcaccctttgcgaggagcatgtagaacctgagaccacgctgcctgctagacggacagagaagtcacccagcctcaggaagcaggtgtttggccacttggagttcctcagtggggaaaagaaaaaataagaagtcacctctagccatgtcccatgcctctggggtgaaaacctcccaagaaccctagacagggtgaggaggaaaccagagttggcaagaagctcaaaaaaacacaagaaggaaaaaaaggggggcccaggaccccacagccttctcggtccaggacccttggttctgtgaggccagggaagccagggatgttggggacacttgctcagtggggaagaaggatgaggaacaggcagccttggggcagaaacggaagcggaagagccccagagaacacaatgggaaggtgaagaagaaaaaaaaaatccaccaggagggagatgccctcccaggccactccaagccctccaggtccatggagagcagccctaggaaaggaagtaaaaagaagccagtcaaagttgaggctccggaatacatccccataagtgatgaccctaaggcctccgcaaagaaaaagatgaagtccaaaaagaaggtagagcagccagtcatcgaggagccagctctgaaaaggaagaaaaagaagaagaggaaagagagtggggtagcaggagacccttggaaggaggtagtttttccttcagaaatggactttgccgtgggagaattaagggaaacagacacggacttagaggtggtgttggaaaaaaaaggcaacatggatgaggcgcacatagaccaggtgaggcgaaaggccttgcaagaagagatcgatcgcgagtcaggcaaaacggaagcttctgaaaccaggaagtggacgggaacccagtttggccagtgggatactgctggttttgagaacgaggaccaaaaactgaaatttctcagacttatgggtggcttcaaaaacctgtccccttcgttcagccgccccgccagcacgattgcaaggcccaacatggccctcggcaagaaggcggctgacagcctgcagcagaatctgcagcgggactacgaccgggccatgagctggaagtacagccggggagccggcctcggcttctccaccgcccccaacaagatcttttacattgacaggaacgcttccaagtcagtcaagctggaagattaaactctagagttttgtccccccaaaactgccacaattgctttgaattattccatttatgctggagattacaaattttttttggtgaaaaaatcagatcttgggtgaggaacctcgagcagtaagatataaataactccccataagcttaggcgttccagttaatggaacacctagggcataaatgggtttattccagtggtgcaaatgaaagccatctgacagttggctccacattgaacacctgtggagattaaggacgaggacaactatattgatgggcttggatgaactggggcagggcaagctccatatttcgggagccaggagaacgagtgagtgctaaaacctcctgttttctgtgttaaacattccgtccctgtttgagacatcagtatgtacagttaacttttgttgagtgtttagcaggtactagggacatactagtgttttccttaatgtatttaatcttcataattatgaaatgggtgctattattagccccatcttatagatgaggcaactgaggttcagggataaagtaataaaattgcctggggtcacccagcccactaaaaaaaa

SEQ ID NO: 152995 - DNA, 2148 bp, Homo sapiens
tcaggctacccttttacagccacaggtcttagttctgtttaagggctcctgtttcagaaggatatttatcctacatgcatcattgaagtttccttcaaagactccaatcttcacagctccactactgcctttatctttctttttcttccacatcttaaaggttccagcggggagaggattgaaggcttctctgaagataagtgacaccaacacatttgtgccatataaacacagctctgccagcagtgtgaagctggcatgggactggatgaagttaggtacagaggcagtttgcgaggcagttgtaatggtctggttgagcactgataggggtctgcacctgttttctaaatcaggaaatgcagacgtaaggaaagtaagcaccttgcccagggtcatgcagcaggtgagtgcagcagctgggttgggctgtgtgactgccaggtgggcagctgcccattctctcccacagctggagcaggcagttgacttggtcatgagatttagaaacagcaggacgctccccccgaccatgcaccaggtatcatccttctgcagtgccaagacttggaaactggactccaccttgaaagcacctacagaccctcctacaccactgacagatgaggcaaagatctgagtcccaaacatggtagatgtgaagctccatgggatcacaaaggagggcttcaaagaggtgacgtcatcgggggtgaataccatgggattactgttaatttcctcaggtgtgatcctggcatggccagttagtgagaggtacttactgaagtcattccacatgaagtcacctgatatctgggatttgttttcaactaccgtgtcctgactccaggtagaatccacctcaggagagctggtggttttcacataaacttgcccctgctcggggacccacccgaacctctcagcgtccccgatgccagcaggagtctggtcgctgggtggggttggctgtacggtctggaacacaggtgtggctgcgtaaccacatgtgtttccctgcctgccctggtcacccaaccgcaaggggacccaccattccccagtgtcgggaccatcaagacagccattttctcccttgacccaggacagccctccaggtgtgcagggctctgctgtggaccatgggcctgatgtgagcagccaggtgctttctcggagccttagtctcctcctcttgtgtgcctgctgataagcactggtcagagccaatcctcgctcttcacgaagtgccctccgtgggtggtctctctggtgccacttgctctgttgctctgttctgagctcagatgcctttccctggaggccccaccctgggtcagatgaaggaagcagtactgagctgtccagaaggtccttctgaaatccacagggcttggtgcttgttctccacgtggagcgggggcagatttggaagtccaattcccctgccacgaatgcccaggaaacacctgctttggactcagcatccattatactctgagaccagcaggcatgaggagagatgtggggccacatgcagagacattcaggcagatcaacaaaccaccgcagcgagccgcccttctgggccgctcctctgttttcctttcccatccgttccctttgcctcggctgctcggagacatgtctggtggcgatcggggacccagagcccggcagccgctcctgtccctgtccctgcgatccctgtcccttccctttgtctccccgcgcagcgctctccgccgcggaaacttcgcgtgacacaaactcctgagtgcggagatttgctgctgctgtagctaccctgccacctggggccgctccatctgggcagcaccaggcacactgggccacagacacggatacctgggtttccgtggccacccctgtgtcccctaatgtctggtagtcttggcccatagacccgtctgctcctggtgcccccagctcctcagggtccggccgggtcacctgggccgatccaggcgggcaggggcctcgctgctcctcccccgcagcccctctcgccctcccggggaccgtgtgcggggagcagctgggagctgcgtctggaggggctgtccgactggggaacttgtcctgtgccttgtccatgccattacattcatcctcccaagaacc

SEQ ID NO: 152996 - DNA, 459 bp, Homo sapiens
  misc_feature (1)...(459): n = a,t,c or g
gggcggggttggagcctactcggggcgactgcgatggacgccttagaaggagagagctttgcgctgtctttctcctccgcctctgatgcagaatttgatgctgtggttggatatttagaggacattatcatggatgacgagttccagttattacagagaaatttcatggacaagtactacctggagtttgaagacacagaagagaataaactcatctacacacctatttttaatgaatacatttctttggtagaaaaatacattgaagaacagctgctgcagcggattcctgagttcaacatggcagccttcaccacaacattacagcccaataggctcagctcatgatgacagaacacatcttggaaagactgactctgntatgtaactcttcatttatggtaagtattaataggtcaaaaccaaaatgacctaaccctcctggacctatttatcctg

SEQ ID NO: 152997 - DNA, 2065 bp, Homo sapiens
  misc_feature (1)...(2065): n = a,t,c or g
agcggccgcgccctgcatgcgagttgggccgcgggcggggttggagcctactcggggcgactgcgatcggacgccttagaaggagagagctttgcgcatgtctttctcctccgcctctgatgcagaatttgatgctgtggttggatatttagaggacattatcatggatgacgagttccagttattacagagaaatttcatggacaagtactaccttggagtttgaagacacagaagagaataaactcatctacacaccctatttttaatgaatacatttctttggtagaaaaatacattgaagaacagctgctgcagcgggattcctgagttcaacatggcagcctttcaccacaacattacagcacccataagggatgaagtggcttgggtgacaatattcggcaatgctggctccacctttcacaagattttcctgggcttttaaaggaaatgttttttggactacagagcagaaaaagaaggnccgaggactgggacttaagcagtggcttagttggtgacttcattgtgcaaatcatcttctctggccagcttcccagaacaatctgcggcactaggtcctacctccagccaatggaatggggatccattctgggatgtcaccagcccaatagggttcagctcatgattgacagaacacatcttgggaaagactgactctgttatgtaactcttccatttatgttaagtatttaataaggtcaaaaccaaaatggacctaaccctcctggacctattttatccggaaacaccttcttgtattcattaaccatagtactcctccccacctcaagtagacacctctctcaggagcttctgaagtcagacgccttctggagcgagccctatgtcaggcactcccacctggggggcccctttcccccagcatacctgctgggtgtgtaaagtgtgggacttaacccgccgccaccaccctctgttcccagcagggctctgcatggaatctttgtggcacttgcacctcttttttcacatggggccacagttttcagtatttcaggcctcagtgggggttcctggatgtttatcttggggtgtttacttcaaggcccagtttgagattttggagttctcctgtgatcacatcttgtgttcgggtgtagggaatcaacagaaggagacgtcctctacataaaaagctccatgtggaaaagctactcctagtctttaacatttggcagtccttgtgttcactgtcttctgggtcctgatgtagtcccactgttttctaggaagtctcttttaagcattatttttgaaaaaaaaaatatttttatagatgaatactcaggctaaccctagtggatgtgatcttggaacttccatgattatccacttaaagatcaaagtattaatatgctgtgtgcttttttaggtgtttgttagtactgggaaggcaaaaatgccttcctaccatggacattccatccctatttttactggggcacctatgaatgtaatgcccgtgggggctaaaaatagactaaaaccatattccctatagccatgttagtgtgtttgccatgtttgctgtaaaatccctttgtgtataaaaccagttttgtaaaggttcctctggggttaggtaggggactctgccagttttcttcctgtccaaaatctctcctacccaagatggtgttcccactgtcccagccccagcatgagtagccaggtagagcacagctttactggctgtttgtatgctttgggtttagtgcaatgtgtgggtaggattacttatccaggaaaacatattatgtccatctcttaggaacggaggaaaaaagcatagtagttccaattccccagtgtgtccctttgattttttttttttttaatagtaaaaattagaatcctggactgacttttcacttggccattctggttttaaaggacaagctacaagctctgtgtttctgtactgatgtgtcacttattaaatacttttgtaccatgagtaaaacttcatggtgtttcgcaagaaccaccattctcaaaaaaaaaaataaaaaaaaaa

SEQ ID NO: 152998 - DNA, 1090 bp, Homo sapiens
aggaagtgtcggcgccgccactgtccggccacagcctaacgctcttcgctgtcgtttgcggtctcgcgcagggcggtccccggttctggtgtttggcgtcggaattaaacaaccaccatgtccgagcaaaaaggcaaagaccaagaccaccaagaagcggccctcagcgtgcaacatccaatcgtgtttgccatgtttgaccaggtcacagattcagggagttcaaagagggcctttcaacatgattgatcaggaacagagatgggtttcattcggacaagggaaggttttgcatgatatgcttgcttctcctagggaagaatccccactgatggcattaccttgatgccaatgaatgaatgaaggccccaagggcccattcaagtttcaccaatgttccctgaccatgttttggttgagaaagttaaatgggcaccagatcccctgaagattgtcatccagaaaccgccttttgctttgcctttgattgaaagaaagcaaccaggcacccatttcaggaaagattacctaaggaggagctgctgaccaacccatggggggatccggtttccggatggagggaagtggatgagctgtaccggggaggcaccttattggaccaaaaaaaggggaattttcaaattacattcgagtttcacacggcatcctggaaacatgggagccaaagaccaaagatgacttgaaagaacttttagcttaaaatcttcccagttacaattgtcttactctcttttacttctcagacactttcccccaccctcaatagaaccgtgttgcatgcaaccttagtttcaccaggctttgccgtcttctttttgatgtatttattcccagaccttttctgccactttagcacttggtataatcagactgggaaatgggggatgagggtggtaaattgtattgaaaaagatcgcgaataaaaaatccacaaatgtgaaagcccagaaaaatatattcgtatttcctgggttttgctgggatttttacatttttatataataaaaatgttattttgaaataaagattatgctgactcaaatgcaatgtaaaaaaaaaaaaaaagggc

SEQ ID NO: 152999 - DNA, 1361 bp, Homo sapiens
  misc_feature (1)...(1361): n = a,t,c or g
ttaaaaatatgtataattgtattatatattgtatgtatatccttaacaatatggttgtataacccccaccaatggaaatatacatccaatgaaaatggacagctataaaacaataaaacttgtgaattcctagagacatgttgagtgaaaaaaacccaaatccttagacctacatagagtatgatacaattttttttgaagttcaaaaagaaagaaaactataaaataagtcactttagggatacatatgtattttaggtctttctacattcgaacaaatctattaaaaagagagcgggggggtcggcaaagatagggagaagagctcaaataggataaaatacaagcactcataattgttattcttaagttagggtgatgagttattatgcttgataatttattgcaatccccaatttacccttttataaggcatcaaatattacatttaaatataaagtcccaaattatgtataaagtgttgambyyavmttatatctgcatggctgttcctaaaactatgcttattttatcaagcagagttcttggttttaggcaattcaggttagttttaataacagcaaaaaaatgattttattaaaagtaattctcaggatctctaggacagccagcaaacaagaattagaggttacaggccaggcacggtggctcatgcctataatccccagcactttgggaggcccaaggtggggtggatcaccctgagggtcaggagttcgagacccanccctggccaacacgggtgaaacccccatctctactaaaaatgcaaaaattagccgggcgtggcggcacatgccatgtaatccccagctacatgggaggctgaggtgggagaattgcttgaacccagggaggcggaggcagaggctgcagtgaccccaagattgtgccactgcacttccacccttgggcaacagagcaagaccccattctcaaaaataaataaatatatataaaaaataaaaagctatttctagtttatttcacctataaagttttgcctttattaaaaagcctaataaacagctattaatcacagtgtattagtatttgttacatttttgtatttcactatctttatactatataatatggtaacttgggtaccgggggaactttaaaatttcatctcaaaaataatttttaaaaagcctgaggtatgatatagcataaaagatttgagatgaaaatatatttccctgtagagctgaattactcctttaaaaattttaacttccatatggggacccgaattaggacactggctgaatcctgtacagccttactcataaataaagtacttactgaatttccaccattcaaaaaaaaaaaaaaaa

SEQ ID NO: 153000 - DNA, 1815 bp, Homo sapiens
ttactcttccgcccacgcgtacgcccacgcgtgcgggttaaaatatcttgatattttcacaaattttaaacaaaaaattaaatatctataaagtgaatgttcaacaacgatgatgagcaatagaaatctatatatgagaaacgcttggataatatttgcctcagggattgtttacctaaaacagaactatggttatttatctcagattgtaagttttattttgaagtgacatttttatggcaatattgataacacaaaggaccacaaactaaatcataaaataatggaatccttacactttgagaaaacggatagcttctgtgttatgataccaaacaaaatattttcatatttattgcttacaactatttccacaatatttatatctcagcttttttatggcactcgaaaaaccaaaccttgtgaaaaatatgagatttgtacttcatttgtgtattagttcattttctgtttctattacatagtttttaaagtcaatgaaagagattgagaatgttaacatttgttgatcaatgtggagctgtccacattcggtatcttttcatttttatatatattttacagtttcaagaaaacttagtactactagtatctgccttattttcttaagtctgatgataatttttggttcaggagtgagatataaacattttgctttttttcagatttgaaatatagtttggcatcctgtgaaaaccacctcgtttgctttttgtttgtttgttttgcttttttagtgtagacctaaaattatttttgcctataaacagtgaacttaatatgtttctgtgagagtgacagagctgtgcccgtttatcttcattgtattaattattacataaagattaacaaatacattgcaaatgcaaattataggatgtttggaggatttattaatgagcatgtattgattgcctattccatatccagtgcaatgctaggtatgtctatggaaggagtattattacttcatttctaaacaaatgaagtcaagcaaattgagatctttctgaaattatgaagacatcttctgataacttatctgttgtatttcctagtctcaaagtcaagaaacccgtatatgtggacctagggctaataggaggtccctatggcactaactgggaaaattacatggtgcttttcaactacagaaagaagtaatgactaatgggcctgtctgtagagaagaaaaggagaagagtacacatttgctggaactatatataattcacagtggagatagttaattctttgctaaaactagggttttatgagtattttttaaatctacatttaagtttttgtttttgtgaaaagttattcagtaagaaaactttataatattaagtagatacagttatgtattaaaaatttccttatatacccttttgccagccaagatactgatattttaaaacaaaatggaaaaatgtccaatacaatattctctttctggaggcttcctacaagtgaaagcagattttgtcattttatttggcctttgcttggctttgatatatttctttatgtgtttttcaaatacatactggttgagatttattgtcttgtatttgcaagtatgccggttgagagaactaaaatggttatagtattgtttatccgaaagaggaagtgtacttaagattattttatttatttagatgaaaggcttctacataaatgcactgaaataaatgctagtaatttcttgtatcccacttctttttttgcttctcatggaaatgtttgtacttttttatcattgtcttttatgaaatataatgttctaaa

SEQ ID NO: 153001 - DNA, 2358 bp, Homo sapiens
atgagggcagtgtcattgcttgtgttggttcttggggtcacaatgtcctatgtaatgccttggcctcaaactgagaattacaccatctacttccctggttctgaggccttcaaacttggacgagccataagctcacttcccagcatccagtatccagggtcttcagcttacagatggcctgttatggagcttctcagcctctataattacgcaaggagggccttgatgggcaacttagcaaatgtcattccctgggggtggtctgagaagatgaccattgagtatttaaatccggggacaggagaacttttaaacaacagccgaggcgatgcgcctcattcagaacatgtgcaccatcgccgagtaccccgcgccggcaacgccgcggcctccgactgctgtgtgggcgccgcggcgccgcctggtcaagatcgccgtggtggggccagcggcgtgggcaagaccgggagccgctgccccttgggagtgggcttagccgttgtctacgccacccgcctgcttccacagacgggggaaacaaggatcaagaatggccaggcagctttctggggacaccggcaccgccgccatcagaactttggggtgtttgagcctctgcaatgcctggcacagaaaggggagttagtgaagctagcccccctgggaggtcttgaagcactggtggtccggttcctcaccaaacgattcatcggtgactatgaaagaaatgcaggtaatctctatactagacaagttcagatagaaggtgaaaccctggctcttcaggttcaagacactccaggtattcaggtccatgagaacagcctgagctgcagtgaacagcttaatatagtgcattggctgtgcacatgctggggggatggggtactccatcactgactacaagagctatgaactcataagccagctccaccagcacgtgcagaagctacacctgggcacccggctgcctgtggtggtcgcggccaacaaagctgacctgttgcacatcaaacaggttgaccctcagcttggactgcagctagccagcatgctaggctgctcattctatgaagagtctgtcagtgaaaattataatgatgtctacagcgccttccacgtcctctgtaaagaggtcagtcacaaacagcagcctagcagtacacccgagaagcgaagaacctccctcattcccaggcccaagtcacccaacatgcaggacctgaagaggaggtttaagcaagccctctctgccaaagtgaggactgtcacctccgtctgaagcaggaggagcactcaagggggtttggtcttcccaaggaagagggcctgaggttctcctagtgcaggaacgttgaatatttggcaatgattcctggttccagaaagggctggagcagaagggccaagagggcctgtggaacttgcttacagaaaaggaagtgtttgtttctgagcagggggacaggatttgattgaggtttgaaaagagcccactgagccactctctgaatatgtgaaatgtactcatgtgtcttttcctttagagtggggagggggcataatccgtttcggtttctgcattcaaactaccttgtaaattggtggtccgttgcaagtttcaccaaatgtattggatgtgatttacagtgggaatgaaagaacagattaagcattgataggctttcttttttcccccttttttcttttttctcttttcttctttcttttcctctttttccccaagaggaaggaattgcttttctcttaccagtatggatttgtaactctgggaacactattcttacagaatgcctttctaacctgaagggatacccagatttctttctttatgtacaagatgggaaaatcccctacccctcaaaaacaggttgagtttatggggccagaatattctgtatacccagaccattgggtaaggctctcatgggttacagggaagggctctgggttccccccctcacagggatgaggcatgcttcagttggggcgtgtgtgggagggagctgtggaacttcacgctccttcaacccccagacttttgactgtataggtttttgtttttttaactgttcccatcaggaaaaaaatgtgtcagttgattttggtgtgacttgtgtaaatggttcatggcaatgacgttgggttgcttcctaggcctggctgagttgtgcctaagggtggctgaaatactaaaacacttattcttacagcaagtgaacaggggctacctgccacatcccctccacagatgcactttaaaaagcccactccatgctttggcttaaactgtaattaatttattttatgtacaataaatcgcatttgaaaaagaaa

SEQ ID NO: 153002 - DNA, 1960 bp, Homo sapiens
ctttacccagagaaaatgctactttaaaaaaaaaaaacacccagaaatttagagttcaataatgaattttgctttcttggcacatttttgaaatgatcatatcattacatgtagctaggtctttatctcctgaatgctcctcctagggaggcaaggtatctaaacaacaaaataaccctacaaaaaaagttaatattgtgagcagtctcaatttgtagttattaaactcaaagtctaatgctgaaaggcaacagtaatttaaacagatttgtttatttttattattattttttgagatggagtcttgctctgtcactctggctggagtgcagtggcacaatctccgctcactgcaatctccatctccccaggttcaagtgattctcctgcctcagcctccccagtaactgggattacaggcacatgccaccatgcccagctaatttttttgtatttttattacatgacggggtttcgccatgttgctcaggttggtgtcgaactcctgggctcaagcaatccacctgccttggcttcccaaagtgctgggattacaggcacctgccccagatttataatgctattcacagatcttgcagaattataacaggctccttctacaacttggttagtgacatcaagtactaactatatatgttccaggtcaagaacttactcttgagatattcaaaaagtgcttgtcaagaatatcaggaatctagaatttatggcaaattgtatatattttaataaaaaccttaaaataaattctaattttaattgctacccatagaaactcctcaagagaagacattagccaaccagacatgaaatatccacagcatttagctactcccttcgtcttcagtactgtctctaacttcagttgcagtatatgtgctgctgaagagcagtctgcttccaatttcaacacagcattaaggtaccctatagccatcatccaatatacttgctttaaaaacagcactactctgatttagcctggctttctaagaatgattctctggagagaaagaccatgtgaatggtctgtggaagaccagaacaatcctgctgcagtccaagtggattttcctagagacaagcctttgttaaaatattctaaaagtatatgtggcaccttccaattctgggaacctggcctttctaagcacatgcaacacaaccccctcgcttaagccacctgtgagagagctacaaatggcaaaacttcttttgctactctaaatattaatgcattaaaagatctgtctagatagggagcagatccctgctttaaaaaaagtagatagattactatctattgcatatttgtttactaaagagcaaagcatattactagcatgcaggcttaaaaagttacatttattctgcactgtagaaacactggaaatgaagagccaacaaatccaattcccacagctccatgcaaggaagaagcatatcaccactttctctggaaaagttagacaatcgtgattaaccatataccctacaataactgcctgccaatgtcagtcatttgtaccactgtcaaacataaaaactaaaatatgcaaatcacatggggtacataatccataaaggaaaatcagaaatttacttaagcttcctaaaatgtccagagcatcatacgttcaagtttcagagatttaacccccttttacttttaaaactgtcccttttaatggacatgtcagagtgcttcaaatgtagcatactagttaaaattcttcctggaaggttttaatgctggcagctaacttactaaagttattcacccacagggtgttcaagcaagagcatgctgacttacaaagacacctcatgggacaaagaaaattctggtctgacttcacaaattttctatagagtacttaaatccagaactgaggtcaagataaggccactctgaacacaggcatcccggacgcgtggg

SEQ ID NO: 153003 - DNA, 371 bp, Homo sapiens; identical to SEQ ID NO: 146374

SEQ ID NO: 153004 - DNA, 1434 bp, Homo sapiens; identical to SEQ ID NO: 146376

SEQ ID NO: 153005 - DNA, 684 bp, Homo sapiens
tcagctattgaagcttgtgtatccttcatgaagttcttgtactgtggttatcagctccatcaggtcatttaagctcttctctagattcttcattctagttagccattcgtttaacattttgtcaaggtttttagcttccttgcaatgggttagaacatgctcctttagctgggtgtagtttgttattactgaccttctgaagcttacgtctgtcaagtcatcaaacttattctccatccagttttgttcccttgctggtgaggacttgtattcctttggaagagaagagacgttctgatttctggaagtttcagcctttttgctctggtttctctccatctttgtggttttatctacctttggtctttgatgttggtgacctatggatggggttttagtgtggatgtcctttcctgttctgatgttgatgctgtcctttgctgatgttgatgctattcctttctgtttgttagttttccttctaacaggcccctcagctgcaggtctttgggggtttgctggaagtccattccagaccttattttcttgggtatcagtagaggaggtctctccgggctcgcgctgcctcggggattcccgtggcgtcctgggagttcccgtgccaccttccttccagctggcagctctgcagacacctccacccgtgaacatcacgctcaagtt

SEQ ID NO: 153006 - DNA, 471 bp, Homo sapiens
cgagcctgacaattccaagtctatccctagcatggaagaagcagggaaaacacagctcaaatccaaaggccctttttggcccaaatcatacttggctgattatgaaacaagatgaaccaggctccatttttgctcacctgaacctaatgtatcattatctagctgagcagctggtgagagctacttctccctgaacctcagttccttcatgtgtaagatgtaggtatatcatcctaagatcttcgtcagctctgacaaacatcctaggaacccactctaactcctcattttttcatgcctcctccagtgctcttcactcatgctgtttccccttcttctcttggcttcagactctggacattaatgtgaaggccccagccctgatgacaaaggcagtggtgccagaaatggagaaacgagggtacagagagtgagagagagcctgggtgagaggggacccaacactgtatt

SEQ ID NO: 153007 - DNA, 585 bp, Homo sapiens; identical to SEQ ID NO: 150045

SEQ ID NO: 153008 - DNA, 1053 bp, Homo sapiens
atgcacaaggcgcggctacgaggccactgtgcccgggcagggaagtcggtgcggttggccagctccgggatgacccgccgggacccgctcacaaataaggtggccctggtaacggcctccaccgactggatcggcttcgccgtcgcccagcgtctggcccaagacggggcccacgtggtagtcagccgccggaagcagcagaatgtggaccaggcagtggccacgctgcagggggaggggctgagcatgacgggcactgtgtgccatgtggggaagatgaaggactgggagcggctggtggccacaggcttcagtccttacaatgtcagtaaaacagccttgctgggccttgcccagacccctgcccatagagcttggccccaaggaacattagggttgaactgcctagcacctgggacttatcaagactagcttcagcaggatgctctggatggacaaggaaaaagaggaaagcatgaaagaaaaccctgcggataaagaaggtttaggcgagcccagaggattgtgctggcaatcgtgtctttcctgtgctctgaagatgccagcttacattcactggggaaaacagtggtggtggatggatggaaccccgtcccgcctctgaggaccggggagacagcccacaggccagagttggggctcttagctcctgggtgctgtttcctgcatttcacccactggccttttcccacctctgctcaccttactgtttcacctcatcaaatcagttctgccctgtgaaaagatccagcccttccctgccgtccaaggtggcgtcttactcgggattccctgctgttgttgtggccttgggtaaaggcctcccctgagaacacaggacaggcctgctgacgaaggctgagtctaccttggcaaagaccaagatattttttcctgggccactggggaatctgaggggtgatgggagagaaggaacctggagtggaaggagcagagttgcaaattaacaacttgcaaatgaggggcaaataaaatgcagatgattgcgcggctttgaaaaaaaaaaaaaaa

SEQ ID NO: 153009 - DNA, 1703 bp, Homo sapiens
  misc_feature (1)...(1703): n = a,t,c or g
tgcggccgctccaacatcagtggacccagacttgctggtctgatccatgcacatggccaggctgctaggcctctgtgcccngggcacggaagtcggtgcggatggccagctccaggatgacccgccgggacccgctcacaaataaggtggccctggaaacggcctccaccgacgggatcggcttcgccatcgcccggcggttggcccaagacagggcccacgtgttcgtcatcagccggaagcagcagaatgtggaccagggcggtggccacgcttgcagggggaggggctgagcgtgacgggcaccgtgtgccatgtggggaaggcggaggaccggggagcggcttggtggccaccggctgtgaagcttcatggaggtatcgatatcctagtctccaatgctgctgtcaaccctttctttggaagcataatggatgtcactgaggaggtgttgggacaagactctggacattaaatgtgaaaggccccaagccctgaatgacaaaggcagtggtgccagaaatggagaaacgaggaggcggctcagtggtgatcgtgtcttccatagcagccttcagtccatctcctggcttcagtccttacaatgtcagtaaaacagccttgctgggcctgaccaagaccctggccataaaagctggccccaaggaacattagggtgaactgcctagcacctggacttatcaagactagctttcagcaggatgctctgggatggacaaggaaaaagaggaaagcatgaaagaaaccctgcggagtaagaaggttaggcgagccagaggattgtgctggcatcgtgtctttcctgtgctctgaagatgccagctacatcactggggaaacagtggtgaacttgagcgtgatgttcacgggtggaggtgtctgcagagctgccagctggaaggaaggtggcacgggaactcccaggacgccacgggaatccccgaggcagcgcgagcccggagagaatcaggccaggtcctctccccgcatggccctacgacccgagttccctcccgagtcagcaagtacaagctggatgggtcctgagccggtggggaatagagaaaggccctgcaagccggcaagaaaggtcggcgccagcccgcgggctctcaggaggctcggcagcgcgacgcgcatgctcagtcgggcagctctccgggccggcgtgggagcccgcgctccaaggcccggtggggggaggggcgctcacgcaaccgccactgtctggagcgggctcgcctctgcggcagccctcaccgcccgggctttactgaagcggagtctagcatgtgcggctgctccacagcggtgtgggtggcggcggctcctctgcagcagcctcggcattaggggttcagggtggccatgcccaccgtggagctcaatttaagagttgtaaggtacgggactgcctccgtctttgggacgccccgtctggtaacatcccagatccagcacgttacttccagccctgcaccccggcccggagcctcacaccccgataccccatgcatccagactctaaggcagcccctgcatctcaggcctgacatcgctgtccctggagcatcctacgctggagctggagcttgacagagccttacacaggttatctctagacctgacaacaacccaagcaaggcaaggactattctctcggtctgcagacgctggctcaa

SEQ ID NO: 153010 - DNA, 2316 bp, Homo sapiens; identical to SEQ ID NO: 123560

SEQ ID NO: 153011 - DNA, 1824 bp, Homo sapiens
catacgattggtttaattttttttttcagcaggagaaaaaagaataaagttacaagaattcttttaattttttcacaatgttaaaactaaaactgacctctaggctatgtgtgtaagtaaatctaaaacacaaaagggttaaataaaattttcttttttaaagataccagaaattaaagctttccttacatttaacaaacttcacaagaacagatactgcaggggaacaagccccaccccccaccccccccagctctaagtcaggaagcgaacatgggcttcgctcccccaggccagctcccctgggctccttcccatgggctgcctccacgcagcaggcagaggagggggcggggggccctggggagggccgggaagggctcgcacaagcctcttcgggaaccagagcttggcggaagcctatggggggctgcctcactgaggatggcccgtatggtggccccaaagggctgtggccttgaacaaccaatgggtaaaaacgcctggggcaagaccctggccccctcctgcccccgggttgccccctagagcaaagacacccggtcctgggtccctgaaagcaagaattaaggctggggattttgcagccgggtttccactcttggtgggtggagggtgggaagagcatgacttccgtatttcagtacgtcggatcaaaaaaacatttgcagttgcaagtgttcaactgttaaatttgcaagacagagttgaaaccatttgttgtttttataaaaaggaaagttgctgggttaaactattccagtagcctatgtgtgggcagatccaccgctgcctccgaaggggcactcctgccctcacccacctggatctgatgcggcactaggaccactgggactgctcaccctgcctgggctttcaaggggatcctgatcctgtccacccagccccagccccacctgactggtagtgatttcctaacatggggcaaccaggcccacccccacccttccccacctggcgtgcgcagttgcagctgctgaaatcctctgtgaacatgagggggcacaggtggagaaatgtaccctcaggccctcacctaccagagcaaatatcactctcggagctgggccacagccacaaaccgctgttcctaagacagaatccaaaccccactgtcccctgggacgtaatgctgcccttccccttactaaacttgctatatggtaagatgtggaactgggtgtccttggacttatggggctgccatagaaacgaagaatggaggcccacgaacatcatcctcttggccccctggaggcacgggcggctccagctgaaaggggcaggagcccgtgggcggcagcttccccagctgctgctcccagcacttctactgattcttgttggctatgaaatgtctttttaaaaaactcccaatatagaaatctggctgcagaggccagtgtgcagacccagcccccgcgctgtgctgccattcgccacatctggtccgtgccagatccctgcactggagaatggcagaccagagccggcggaggcggggcactctggctgcttctcgtgaccttggatcctgtgtagaaaaggcgggtctcgttcgtggactagtcttgagtggagctaattttcaaagagaggtgggtgtttttcatcaggtgttatgagtttcttcctagcaagtcagggaaaaaaatttccgtaagagtagtccccctccccccttgagttgtgtggagagtagtcgccctcagtccagctgtggcaatccacagcctccctggcaggctcctgacctcaggttcaggctttggtaataagctt

SEQ ID NO: 153012 - DNA, 2316 bp, Homo sapiens; identical to SEQ ID NO: 123560

SEQ ID NO: 153013 - DNA, 1919 bp, Homo sapiens
  misc_feature (1)...(1919): n = a,t,c or g
tttttttttcatacgattcggtttaatttttttttttcagcaggagaaaaaagaataaagttacaagaattcttttaatattttcacaatgttaaaactaaaactgagctctaggctatgtgtgtaagtaaatctagaacacaaaagggttaaataagattttctcttttaaagatacaagaatttaagctttccttacatttaacaaacttcacagaacagatacttgcagggggaacaagccccaccccccaccccccccaggctctaaggtcaggaagcgaacatggggcttcgctcccccagggccaggctccccctgggcctcccttccccatgggctgcctcccacggcaggcaggcagggcagagggaggggggcggggggcctcggggagggccgggaaagggctccgcacagccctcttcgggaaccagagcttggcggaagcctatggggggctgcctcactgaggatggcccgtatggtggccccaaagggctgtggccttgaacaaccaatgggtaaaaacgcctggggcaagaccctggccccctctgcccctgggttgccccctagagccaagacacccggtcctgggtccctgaaagcaagaattaaggctggggattttgcagccgggtttccactcttggtggggttgaaggtgggaagagcatgacttccgtatttcagtacgtcggaatcaaaaaaacatttgcagttgcaagtgttcaactgttaaatttgcaagacagagttgaaaccatttgttgtttttataaaaaggaaagttgctgggttaaactattccagtagcctatgtgtgggcagatccaccgctgcctccgaaggggcatcctgccctcacccacctggatctaatgcggctctaggaccactgggactgctcacccggcctgggctttcaagggaatcctgttcctgtccacacagccccagccccaccagactggtagtgatttcctaacatggggcaaccaggaccacccccacccttccccacctggcgtgcgcagttgcagctgctgaaatcctctgtgaacatgagggggcacaggtggagaaatgtaccctcaggccctcacttaccagagcaaatatcactctcggagctgggccacagccacaaaccgctgttcctaagacagaatccaaaccccactgtcccctgggacgtaatgctgcccttccccttactaaacttgctatatggtaagatgtggaactgggtgtccttggacttatggggctgccatnagaaacgaagaatggaggcccacgaacatcatcctcttggccccctggaggcacgggcggctccagctggaaggggcaggagcccgtgggcggcagcttccccagctgctgctcccagcacttctactgattcttgttggctatgaaatgtctttttaaaaaactcccaatatagaaatctggctgcagaggccagtgtgcagacccagccaccgcgctgtgctgccattcgccacatctggtcccgtgcccaagatcccctgcaactggccaaatggcaagaccaagagccggcggaaggcggggcaactctggctgccttcctcgtgaaccttggatcctgtgtaagaaaaggcgggtctcgttcgtggactagtcttgagtggagctaattttcaaagtgaggttactgtttctcttcttgtgtgatgagttttttcatagcaagtcaggtaaaaaaatttccgtaagaatctgtcccccatcctccccatttccagctatgtgggagagtcaggcctgccctttagtccacccaggtggccaatctcatcagcctcccgtgggcaaggctcacgtggccatcaggtatcctgggctactgggactaaggataagtgaagaggtgaaaggccga

SEQ ID NO: 153014 - DNA, 1073 bp, Homo sapiens
tttaaagatggcggcggaggaacctcatcagcagaagcaggagccgctgggcagcgactccgaaggtgttaactgtctggcctatgatgaagccatcatggctcagcaggaccgaattcagcaagagattgctgtgcagaaccctctggtgtcagagcggctggagctctcggtcctatacaaggagtatgctgaagatgacaacatctatcaacagaagatcaaggacctccacaaaaagtactcgtacatccgcaagaccagggcctgacggcaactgtttctattcgggctttcggattctcccacttgggaggcactgctgggatgacagcaaggagttgcagcggttcaaggctgtgtcttgccaagagcaagggtagaccttgggtgttcccagggggtttcacttgaatttcacaattttgagggattttccacaacaagtttcatgggacctgattgagcaggtggagaaagcagacctctgtcgccgacctgctggcctccttcaatgaccagagcacctccgactgaccttgtggtctacctgcggctgcttcacctcgggctacctgcagcgcgagagcaagttcttcgagcacttcatcgagggtggacggactgtcaaggagttctgccagcaggaggttggagcccatgtggcaaggagagcgaccacattcacatcattggcgttggcccagggcctcaacggggccatccagggggaggacatggaccgcggcgagggcggcaccaccaatccgcacatcttccctgagggctccgagcccaagggctaccttctctaccggcctggacactacgatatcctctacaaatagggctggctccagcccgctgctgtcctgctgcccccctctgccaggcgctagacatgtacagaggtttttctgtgggtgtaaatgggcctatttcacccccttcttcctgtcacatgacccccccccatgttttattaaagggggtgctggtggggaacatggaacccctccacaagaaggggcccccccttttgaaatttgccactttcgcacccccagcctgcg

SEQ ID NO: 153015 - DNA, 2051 bp, Homo sapiens
  misc_feature (1)...(2051): n = a,t,c or g
ataacattgtcgccngcggaaccggaccggaattcctggcacgacccacgcgttcgatggtgggggaggaacctcagcagcatatgcaggagccgctgggcagcgactccgaaggtgttgactgtctggcctatgatgaagcgcatcatggctcaacacgaccgaattcagcaagagattgctgtgcagaaccctctggcgtcagagcgtgtggagctctcggtcctatacaaggagtatgctgaagatgacaacatctatcaacagaagatcaaggacctccacaaaaagtacttcgtacatccgcaagaccagggcctgacggcaactgtttctatcgggctttcggattctcccacttgggaggcactgctgggatgacagcaagggagtttccagcggtgaggaagggtgggcactggggcaccgaggcaggtgggtgtctacctcctccccggggcgagtaggatgtgtctcgagtagggtgtctccctccttcccgggcgatgggctggactctggccttgctcaggcggggcagtgctgtctcggccctggcgtctgggctggtcgaggagcccatgctgggcccgcctttccatcccacccccaggttcaaggctgtgtctgccaagagcaaggaagacctggtgtcccagggcttcactgaattcacaattgaggatttccacaacacgttcatggacctgattgagcaggtggagaagcagacctctgtcgccgacctgctggcctccttcaatgaccagagcacctccgactaccttgtgggctacctgcggctgctcacctcggggctactttaaggcccgagagcaagttcttcgagcacttcatcgaagggtggacgggactgtccaaaggagttctgccaagcaggagttggagcccatgtgcaaaggagagcgaccaccattcacatcattgcgctggcccagggccttcagcgtgtccatccagggtgggagtacatgggaccgcggncgagggcggcaaccaccaatccgcacatctttccctgagggcttccgagcccaaggtctaccttctctaccggcctggacactacgatatcctctacaaaatagggcttggctcaagcccgttgctgccctgctgcccccctctgccaggcgctagacatgtaacagaggtttttctgtggttgtaaaatggtcctatttcaccccctttttcctgtcacatgaccccccccccatgttttattaaagggggtgctggtggtgagccgtgtgtgcgtgtccctgctctgctgcccgcctggctgctctgtctgctgccccctccccccaggggggtccccctgcttttcacctatctactcctgagcttccccaacaggagcaggtttgaggggccaggcctcttggaggcccctcctcgcttcgttgggttctgcttccttcccttcttagctggctcaggggcttctatgggatcctggaagttccttagggacttgcccagggtcccagggccaccaacaacttcatctgctccctcataggccccacctccacgtcccggctgggccccagaccccagcttcctgccctccaccgggagtctgcatggttgggaagtcctggttggaggggcctttgtgaggcttggacccggctcagggcaggtggaggagctgggcctccccacaagggtgcccgggcaagtgcaatcctggtgggggagggcagcccttcaaacgtgtgggggtctacagtcctcaggtctcaggcagggctgccgggttctccacctccccaatccgccatcaggccccctgctctgtgcctgccttgcaccccctctgcttgggccacggtgtctctgcattgcctgcctttttgccttcacctcttttcttccccgccccctgcacattcggggtcttcagcccccaggctgtgagctccttgggggcaggccctcaataaatgtgaactgctgctgccgcaaaaaaaaaaaaaaaaaaaaaaaaaaaaaaacaaaaaaaaaaagggcggccgctc

SEQ ID NO: 153016 - DNA, 432 bp, Homo sapiens
cacagtgtcaaccgaaagcgtctgaaccggaatgctcgacggaaggcagcgccgcggatcgaatggtgagggggctggggttccgggtggccgtgggcctcggccgggacggtccgcgagatgacggatccgcgatgtctctctttgccggtagctcccacatccgacatgcctgggaccacgctaaatcggtacggcagaacctggccgagatggggttggctgtggaccccaacagggcggtgcccctccgtaagagaaaggtactgacatggcagggtctcggtccttgtcttctttactcttcccccgccatactgacctaggtgtcagaacgtggtactgcccattccttccctcaggcccttccgagttttcgacctccccacagtcagaacgtcaactgacgttgagcaagggtctctttacgac

SEQ ID NO: 153017 - DNA, 1851 bp, Homo sapiens
  misc_feature (1)...(1851): n = a,t,c or g
ttttttttaaatacaagtggatttttagagtttattaagcaggggagtggaggggagatgtggcacaaatagaactatgtaacattcaaacaacagcatctaggatttttgaaaaaactttcggttacagttacacaaagggtcacttcctccccaacgacacatgggcctctcaaaggagaggagggagtaattccccacggtagggccaagtggttgctcccctgggtttttggaaatccatttctgcggagcttttcaagncccaaaaccctgggctttagggtcgagacttcaataagcagtgacagccagaccccagcaaaaatggctgcgaaccgtgaaaacccctgggcggcgaatccgggtgccgcaatcaatgaagctgaaaagcgcctggctgttgcccccggtggaaaggagtaagaggccgtaaggtgaagggcggccgccgtggcccaggcaacctatgggtaccaccgggttctcgcgggtcttgcgaacgaacttttccttgaaactctctggattcctgtaaacagtggggctcagcccctcaatgactggaggcttcgatggttcaaaggggacctccggaattcacagggccgggagtcgccatgtccgggccacagcagcaggagaaaatcgggactccgacctcagcctcccggtgaaggtcatgaaaggggcggggaaacgaataaattgagccttgtacgcaggcgcaaatgctcgttgcatcctgggagtcgtagtgctcagcacggtagtgctacaaaaggactacatttccccaaatgcccgcaaagccttgtgcacgccttccggaaggagtttgttacacgaggtctgagagacagaggcagcgtgtttgagctgctggtgcggtggtcagcgcgatgcccaaggccaagggcaacaacccggtagcatgaagtttggttacagtaccctccgaaagcgtgatgagccggaatgctcgacggaaggcagcgccgcaggactcgaatgctcccacattcgacatgcctgggaccacgctaaatctgtacggcagaacctggcctagatggggttggcttgtggaccccaacagggccggtgccctcccgtaagagaaaggtgaaggccatggaaggtggacatagaggaagaggcctaaaagaacttgtaccggaagccctatgtgctgaatgacctggaggcagaacccagccttccagaaaagaaaggaaatactcttgtctcgggaccttcatttgactatgtaccgctacatggttagagaaccacggggaaggactataaggccattgccccgtgattgagaagaattactatccaagatacccccaaacagatttcggagttaagatcaaacgtctattaaacgcttttacccagcagagtggcaagacttccctcgattctttgcaagaagaggaagatggaggtgaaggtgcctggtttacatcacagctgccccagtgctgaggcgtcccccggacccagtgaagctggancccagggtgtaaggcaaggaggtggagtgactggtttacatcacagctgccccaggctgaggcgtcccccggaccagtgaagctggagccagggtgtaaggcaaggaggtgcctgtgtggctccagaggagctggccaggtcccatggaaatcagaggttacacacaacacgtgcacactccccgctctggggaaggaactgttctcagaggctccaatttattaatcatcttggggttcaccgaaaaagccagaacctgctggttttcagggtgggtgatgtaaatatagtgtgtacataataaagcaaatatattttacttca

SEQ ID NO: 153018 - DNA, 310 bp, Homo sapiens
  misc_feature (1)...(310): n = a,t,c or g
gaaaagaagcccaaaccaaggcccccagagaggtcccccaggcccctttgggtccctgagcctcagctggagatccggcgcaggagaccaacgcctgccatgctgttccggctctcagagcactcctcaccagaggaggaagcctccccccaccagagagcctcaggagaggggcaccatctcaagtcgaagagacccaacccctgtgcctacacaccaccttcgctgaaagttgtncagcgcattgctgagtctcacctgcagtctatcagcaatttgaatgagaaccaggcctcagaggaggaggatg

SEQ ID NO: 153019 - DNA, 1520 bp, Homo sapiens
tcagccttacagagactggaaaagaagcccaaaccaaggcccccagagaggtcccccaggccccgttgggtccctgagcctcagctggaggtggggggtgcctgcagtgcgctggctcagtctccttctgaaaagctggatccagcttgtttgaagcccttgagctgatcttagatccggcgcaggagaccaacgcctgccatgctgttccggctctcagagcactcctcaccagaggaggaagcctccccccaccagagagcctcaggagaggggcaccatctcaagtcgaagagacccaacccctgtgcctacacaccaccttcgctgaaagctgtgcagcgcatttgctgagtcttcacctgcagtcttattcagcaattttgaatgagaaccagggcttcagagggagggaggatgagctgggggagttttggggagctgggttatccaagagaggaagatgaggaggaagaggaggatgatgaagaagaggaagaagaagaggacagccaggctgaagtcctgaaggtcatcaggcagtctgctgggcaaaagacaacctgtggccagggtctggaagggccctgggagcgcccaccccctctggatgagtccgagagagatggaggctctgaggaccaagtggaagacccagcactaagtgagcctggggaggaacctcagcgcccttccccctctgagcctggcacataggcacccagcctgcatctcccaggaggaagtggaggggacatcgctgttccccagaaacccactctatcctcaccctgttttgtgctcttcccctcgcctgctagggctgcggcttctgacttctagaagactaaggctggtctgtgtttgcttgtttgcccacctttggctgatacccagagaacctgggcacttgctgccttgatgcccacccctgccagtcattcctccattcacccagcgggagggtgggatgtgagacagcccacattgggaaaatccagaaaaccgggaacagggatttgcccttcacaattctactccccagatcctctcccctgggacacagggagacccacaggggcagggaccctaagatctggggaaaaggaggtcctgaagaacctttgaggtaaccctaagatccttttctacccactttccctatggaggattcccaagtcaccacttctctcaccggcttctacccagggtcccaggactaagggcgttttttctccatagcctcaacattttgggaatcttccccttaaatcacccttgctcctccctgggtgcctggaaaaatggactggcagagacctctttgttgcgttttgtgctttggatgccaggaatgccgcctagtttatgtacccggtggggcacacagcgggggggcgccaaggttttccttcctccgtgcagctggctctgcccctttccccttcttccctgactccaggcctgaacccctcccgtgctgtaataaatctttgtaaataaaaaaaaaaaaaaagggc

SEQ ID NO: 153020 - DNA, 721 bp, Homo sapiens
aaaaaaagctggaaatttaaacagaaacttgtgactgacgtggatggagcttagtccagactccaaaccctaggtttaaaaacgtcccagggccccccaccccacaggtcatcgctgagtgtgaggagtcacagtgtggggggctgggcaccctcgggggtctttgactctccccagggcctgtggtgaactgactctaggggtccccctatgatgccctcagaagcccaaggtgggggcgctgcctccaaggggcccttggggcctccccaagcagcagggattcaccagggaaccccgctcaggatgggtgaggctctggaaggacaggctgggcaaacagctggacccagggtgcaggatggcctctgactttctttggaagaggagacagggtgctctcacaggtacaccccacgcatgcacacggtgcacgcctccacggcaccgcagatagtccagagcggccccttggtggccactcagtaatcaggcacacacacggctcccacgtgctcagacgcaccccagtttcacccacacacataaagggcaggacaggagactttggggtccaaggcagggaggcttctctgctgtagttgcccaagagcatggggaccaagctagccccctctaacacatgatacttcaccaggcaccgtcacccacgaacacctccagcagccacgctgaagaggctgagtccagatcacactga

SEQ ID NO: 153021 - DNA, 358 bp, Homo sapiens; identical to SEQ ID NO: 136828
  misc_feature (1)...(358): n = a,t,c or g

SEQ ID NO: 153022 - DNA, 386 bp, Homo sapiens; identical to SEQ ID NO: 136829
  misc_feature (1)...(386): n = a,t,c or g

SEQ ID NO: 153023 - DNA, 509 bp, Homo sapiens; identical to SEQ ID NO: 136831

SEQ ID NO: 153024 - DNA, 3386 bp, Homo sapiens; identical to SEQ ID NO: 136832

SEQ ID NO: 153025 - DNA, 4255 bp, Homo sapiens
cactttgttcacatacaccaagagagagcatccgttccagaatccaaacttggactttatttgacacagaatacaataaggctaacagaaacagccaaactgaaaaaaacaaagccagaaaaaaacaccagttcccatcccaatttggtaattaggttaacagccagggaaaagtccattaaatgaataacaaaacaattaagcttgatggaagaagtcttttcctagtgccccatacctgaaagacaaagtaaattactttttggaattccccactctctgttgtccaaatggacacacctgtccgtgttttgagccagcgacgagatgcagtggaagtgaaaaggcatgggttacagacttccccatgcgacagtacactcttctgaagtaggcggacgcctggggttaggcttgacattctatgcaaagatcccataatgtgggtttctgcagatgggcacagttatcaaccacaatatcccaggcccagagggctactggcatttccacttttttaacttcaaagcgcttcttgcccgcgccgctgttggtgccgctcggggtatccacatccatcgctgcgggctcacaaagcggccagacgctcggcggcggcgtgtggcaggagcgcaggggcgcgagccggcgatcagccttcccggcgaccgtgccgcgggagctcgagcaactcggactaggggacccgggccggcccccaagatgccggcgatcgcggtgttggcggcggccgccgcggcgtggtgcttcctccaagtcgagagccggcacctggacgcgctcgccggaggcgcgggccccaaccacgggcaatttccttagacaatgaccaggtggctgagcaccgtctcccagtacgaccgggacaagtacatggaaccgctttcgagacgaagttgaggatgattatttcagaaactgggaatcccaacaagccctttgaccaagccctgggacccatccaaggacccctgcctgaaggtaaaatgcagccctcacaaagttgtgtgtgacccaggactaccagaccgccctggtgtgtcagccgcaagcacctgctccccaggcaaaaagaatggggaacgtgggcccagaaacactggggtttggacctttgaattttggtcaagttgcaagccctgttcccgtgggcacagtcagccatggtctggcggctcaagatgggccactcctaacagcattccaagttgcaaatttggagttccatgcttgttctactgggcaaaagccttcgccaccctctgtgatggggccctgtccctgttcttcccagagcctggagccaccaaagcacaagggcagaaagggagtgccttgcacagacaaggagttgcggaaccttgcctcccggctgaaggattggtttggagctctccacgaggatgcgaacagagtcatcaagcccaccagctccaacacagcccaaggcaggtttgacactagcatcctgcccatctgcaaggactccctgggctggatgttcaacaagttggacatgaactatgacctcctgcttgacccttcagagatcaatgccatctacctggataagtacgagccctgtatcaagcctcttttcaactcgtgtgactccttcaaggatggcaaacctttcctaaacaatgaatggtgcctactgccttcccagaaccctggaggtctccccttgcccagaatgaaatgaacagaattcaagaagctgagtaaggggaaaagcctgttgggggccttcatacctcggtgtaatgaggagggctattacaaagccacacagtgccacggcagcacggggcagtgctggtgtgtggacaaatatgggaatgagttggctggctccaggaaacagggtgctgtgagctgtgaagaggagcaggaaacctcaggggattttggcagtggtgggtccgtggtcctgctggatgacctagaatatgaacgggagctgggaccaaaggacaaagaggggaagctgagggtgcacacccgagccgtgacagaggatgatgaggatgaggatgatgacaaagaggatgaggtcgggtacatatggtagtgcccacaagaaagaggacacaagttttgcacaaaattgcaagtcacttcctattcctgcatttgtatctaagactccaaggcaccaaggtctcttctccattgttgctctctatacccgaccctaaggtttggaagacaactgcctgttccccagaggattctgattttgcatatgtttgtatgggagaaagggtgttgtgttttttttttttgttgttgtttattttttggatagggaagtcattggcttaattagagcctccttcctttctgtgagatttttccaacaagcatgtgatttacgtggaattctgacagtgcagggagcccccaccctcttaaatgtcaaagaccctttttgattacccacactggtggttattacagcatggttcccagccttacagtgtcctaagtgcttctcttgtgtcctgtagatgttgtgaaaaagaaaaaaacaaaaaatacaccacactgtactttttccccctgcccccgttactgccggtgattattattaaaaattagtttttttcacatcattctatctggcttcctataaacaacagccttaattcagtcaagactccctttggggaattcattttattaaaaattggtgtctggatacttccctgtacatgcataaatatgcatgcatgtacagaaagactgtatgtgtgtgccttgcacacacacccatacctctcagaaaaagtgtttgggtatcttaaaaactcgaaaaacaatgataaatttctcagcttgtccagacctggaacaaaatttctggaataagaaatttgtattaaagtccttttttgcactaacagttggctcttgtagcctgcaggctgaggaagtctcttctctgtgcatcagcagagttactgaaagcctctgattgagaaaaaacctccgtctgcctaaatcacttttctcgcagaagccatgcgactcccacacgacacgggcagcttcacaagccatctctttcatttctgcttgaagcccccttggctggcagcaatcctgtctggccataggtttcttccttccttacctacttcaaggggctttttctaagggcatggcacacatatcttcctgtttctctggaggagtaccatggggttccttaaaagaagaaaatttctaattctgaactcaatgttttgcttttactccctttctactgacaaatcatgataagggcacaaaagctgtacagatttttttttttaaccactcaatcccaaatggaggcctacaaagaacatcgtaataacacatggaagcaaaccctgggtttttaagagcaaattctgtccccccctcactcccccaagtgacaagatactaatgaagaaagttcttcaccatagtgtttgttttaactaaactcattggagtctagttccaaatttgggtaggggtcatcatctctacattccttaggatttctctccctatcaagctggcccagatacaagtaccaaacagtagtctctgaagttcccccatttccttcagtaccagtctataagctactgtccgccactgattttcatctatcagggtgtcctaatcagaatcagccacccaagcaagcctctctggcccacatatctatctcttgccttcccccatgaacttcagcctgtccacacaaaagccacataaactcaagcaagaaatatgttcagccaaaacatgattatagtggcagctgaccaatcccccatcccaaattgaccatttagatgtaccaactcaccttaaattagcatgttcctatccagtcgggcattgcctggaatacagtaggcatcatacctatagttgggtcttaggataaggaaatggaacttacttggatataggcaaagtcctttggcttcgtaaataaccctgaggttttgtacttactttccccataggaagacagaccataggcaaactctgttttgggatctcaactccatcacctttgattcaatattttttttctctcttgaacaaaactgagataatttagaaaacaggtgcttaattgcaataaaattactatgaagtatattaaaaatcacgacattgtaaaatctcactttagatcatcaaagaaaaccattgttactatctcctttgagcttaggaa

SEQ ID NO: 153026 - DNA, 904 bp, Homo sapiens
ctacaccaacaggcagctgtggcctggctgcccacctccttccttcccagccaggagcactgctgcagcaccgagtggagagccccacagccagcagcttcgggggtccatggtatttgctttgcgaaccttttgcctcttccactgtctccacagaggtttctggaagtttctgttatctgcctgctcctctgggtatacggctttctgctctgaactgagagacctttggcctggtggtgcttgggaaagtactggcttcaagaacttcttggctgtcatccagtccctctcgccatgctctgagactgtcttgctcttctgaagtcctccctggtcccaatgggctcgcccacccactgcaaggccatagtcactgaggaaccgctccatctccctgaacctgccgctgcagctgcacacacatcgtctcccagttcctcctgccgctgcaagggttgcctcggctgggtgtggcccggagggtctgcaccaggtcctctagggccgctatcttttgatccttggacagtatctcatcagtctgggccttcacctgctgctccaggtcccacaacttcctcgtcatgaaggccatcagctccgagtcatgggatgcagggacttgccgactcacaggggcacctatgccgccatagcaggaagggactgagatcttttcttctgagccacacccatcactcaacatgtccacctcatcttctgcagacagggatgcctaggtcaccgctcatctccatagatgcggattcctcgcctcccaggattcataggctccgagggcaggggcacttttcgggtcttgctaagggaggccaaaggtgagctcatagttctacttctagaatccagctgtcaggaactcccacgcagggccctagcc

SEQ ID NO: 153027 - DNA, 343 bp, Homo sapiens
  misc_feature (1)...(343): n = a,t,c or g
ctgaactgttgtaaccttttggttgtctcttgataaagaaagggcattntttgtagcctgttcggtgaccgtaccatttgcaatgccaaccttgataagcccaggaggaggtttttcataaaaggactccaggcgnttgagtngatgcagctgcancncgtcgtgccgccgccgcttctgctnccgggcccgctgcagttcctgatccagcggtcccgcggccaccacgcgcccccagccntcgcatcctcgcgccccggccaggacgacnatcgntgnacctgcggcgcggcnctgctgcggccaagagggcacttcctccgtgcggcccncgttccgaatn

SEQ ID NO: 153028 - DNA, 268 bp, Homo sapiens
taggcaggaaagtttcttcatcgttgtcctccctgctggtcacatgagtttacgattccttagaagtgtctcccacagggtggcaggactgggagaatctctgaggcgtgtcttccaggccctcccacagcttgtgccctccacagtgtagacttgaacacttggcctcatgtgatccttccaccttggcctcccaaagcatgatttgttgatttgggggctagcggagttcttaaaacaacaataacaaaatcttctgtggctgcac

SEQ ID NO: 153029 - DNA, 589 bp, Homo sapiens
gcggccgcgtgagccgccggagcaggagctgcagcgacgtcgggagcagaagcggcggcgacacgacgcgcagcagctgcagcagctcaagcacctggagtccttttacgaaaaacctccccctgggcctaatcagggaagatgagcttaagccagaagattgcataccagatgtaccaggcaatgaacacgccagggaatttctggctcatgcaccaactaaaggactttggatgccactggggaaagaagtcaaagttatgcagtgttggcgttgcaaacgctatggggcaccgaacgggtgacaaagaatgccctttctttatcaaaggcaaccaaaagttagagcagttcagagtggcacatgaagatcccatgtatgacatcatacgagacaataaacgacatgaaaaggacgtaaggatacagcagttaaaacagttactggaggattctacctcagatgaagataggagcagctccagttcctctgaaggtaaagagaaacacaagaaaaagaagaagaaagaaaagcataagaaaaggaagaaagaaaagaaaaagaagaaaaaacggaagcacaaatctt

SEQ ID NO: 153030 - DNA, 1667 bp, Homo sapiens
  misc_feature (1)...(1667): n = a,t,c or g
gcatctggcggccgaggccgggacttcagggcccctcccgggcgagtcgctgggcggcggcgggaaggggcgccgcacggaggaagtgccctcttggccgcagccagagccgctccgcaggtgccgcgatgtcttcctgtccggggcgcgaggatgcgagggctgggggcgcgtggtggccgcgggagccgctggatcaggaactgcagcgggcccgggagcagaagcggcggcggcacgacgcccagcagctgcagcagctcaagcgcctggagtccttggttcagggtgggcattcagggagccagctgccgtttggcaccacgcggaattcgggccctgacttgggaggccttgcgctcccgtggctccagttcaaggagggtccagatgacccgggagagtgtggtgtaaagaagattcaaagttatgaaaaacctcctcctgggcttatcaagccttacttggctcagtccctcagtccatcctgtgttggtttcttgagtatcagcagctcagagagcagtcaactccgaggagacccgacagctcatccagtccagctccccggtggaggcatccttcctgcagctcctggctacggcaccagggaagatgaggctaagccagaagatagcataccagatataccaggcaatgaatacgccagagaatttctggctcatgcaccaactaaaggactttggttgccactggggaaagaagtcagagttatgcagtgtgaatgttggcgttgcaaacgctaggggcaccgaacggggggcaaagaatggcctttttttttccaaagcaacccaagtttaaagcaggtcagaagggcccaatgaaattccccatggtatcactcaatccaaggcaataaacaacatgaaagggacgtaagggatccagcagttaaaacagtttactggaggatttctacctcaggtgaagataggagcagctccagttcctctgaaggtaaagagaaacacaagaaaaagaagaagaaagaaaagcataagaaaaggaagaaagaaaagaaaaagaagaaaaaacggaagcacaaatcttccaagtcaaatgagggttctgactcagagtgacaaggatgtgacttgttcaacattctcttctcaaacactgacccaaggaacaggaggaagatgccagtcagagaaagcagcaggatagagacgccgagagaggaagtatatgtgggttcacagcagtgagttcccaccccgcnttgccagtgaaagatgtgaccccagggagaggggagtgtctccttccaggtgcttagctcttggacagccagctgattttagggcaaggaaagtttcttcatccgttgtcctcccctgcctggtcacatgagtttacgattccttttgaaagtgtcttcccacagggtggcaaggactgggaagaatctctgaaggccgtgtctttccagggccctcccacatgctggagccctccacagtgtagacttgaacacttggcctcatgtgatccttccaccttggcctcccaaagcattgggattacaggcgagagccactggttggctaaaatatttatatttacctgacatgatttgttgatttgggggctagggagttcttaaaacaacaataaaaaatcttctgtggctgcaaaaa

SEQ ID NO: 153031 - DNA, 520 bp, Homo sapiens
  misc_feature (1)...(520): n = a,t,c or g
gtggccnaggcggccnncctgatnacaactgaacacgtttacgccaagcttnnnnnnnnnnnnnnnnnnnnnnnnnnnnnnnnnnnnnnnnnnnnnnnnnnnnnnnnnnnnnnnnnnnnnnnnnnnnnnnnnnnnnngcatagattggaaaggaagaaataaaacttttattatttccagacaacttgatggaatatacagtaaatttttaaatgtataaaccattagaattaataagttagtttagcaaggtcactgagtatcaggtgaacacagaaaaataaactgtatttatacctaacagctacaaatagaaaatgaaattgccaaaacaatataatttatgatagcatcaaaaagcatcaaatacttagaaataagtctaacaaaatgtaactaaatggagggatatactatgtatatgcattggaagactcagtattataaaggtgttggttcttcccaaactgatgtgtgggggggaaaagatttttaacccaaatccaacagggttttgggg

SEQ ID NO: 153032 - DNA, 483 bp, Homo sapiens; identical to SEQ ID NO: 150809

SEQ ID NO: 153033 - DNA, 1050 bp, Homo sapiens; identical to SEQ ID NO: 144729

SEQ ID NO: 153034 - DNA, 693 bp, Homo sapiens
atggtcttgatctccggacctcgtgatctgcccgcctcagcctcccaaagtgctgggattacagccctgccctctgcatcttctatcatgccatctttgcagtttcttaaatacatcaagcttatccttgctaaccctgtgcttggaaagagctacacggttagatccttctgtatgtttacatctcagttcccatctcctcttccgttgtgcagatactttgctgctgctgttgatgacatgaatctgggcctaagtcgagccccagccaacccctttgacccctcggtgcccctggactgcctggaggctactcatgtgctggacaaacaggccaattgctggagcatgcagcttgctgtgcttggcacagctgctgctggatcgcaattccatgtaagatgtgcctacttccccttcaccttccaccatgattgcatcacagggctggtcccagattggcatcagaatcccagattgggttctccattggaagcagatgccttaaaaggtttcttggctgacagatgcatcccccagaccacacatttttgttctcctctgaccattccagattcagcagctacctcttccaagtgtctatccatgaaaccaggggaaagtaataggtaccgagctgattaccgatcggggttaaatagaggaaatgttaaaggccgagaacggctgtga

SEQ ID NO: 153035 - DNA, 424 bp, Homo sapiens
tgggatagcgcgcgaggccctcggtcggacgggacgctcgggattcagggactgcctcggcacacgggaagttgccctacaggcgcgggagaaagcgcaggcggcggcttggcagggagaggcaggctgcagtgcacattgggtcaggcacacgcgaggggcagcccccgagggccgtcccagagtcccccgcgccgccggggtcctaacggggtgcaccgtcttccgccgcacgtggattcagcgcgatgcccaaatccaagcgcgacaagaaagtctccttaaccaaaactgccaagaaaggcttggaattgaaacaaaacctgatagaagagcttcggaaatgtgtggacacctacaagtaccttttcatcttctctgtggccaacatgaggaacagcaagctgaaggacatccggaacgg

SEQ ID NO: 153036 - DNA, 1268 bp, Homo sapiens
tcaacaagatggtgaattgactagtgggtagatccacaggacgggtgtggtcgccatgatcgcgtagtcgatagtggctccaagtagcgaagcgagcaggactgggcggcggccaaagcggtcggacagtgctccgagaacgggtgcgcatagaaattgcatcaacgcatatagcgctagcagcacgccatagtgactggcgatgctgtcggaatggacgatatcccgcaagaggcccggcagtaccggcataaccaagcctatgcctacagcatccagggtgacggtgccgaggatgacgatgagcgcattgttagatttcatacacggtgcagcagcagaggggaagagcaatccgactaggaagttggaggtccagttggagcagccggccactgccatcgcagctgggcgggggccctggctgaagagttcggccacaataaaccagggaatggggcctggtccaatttcaaaacaggccacaaagaccaagatagccccaatacagacaaagctcatcccattatagtgattagaaagtaaagtgaagatagtattaaccacacccgcgctgatggtggcatagatgggctgttgaacacctgcatccttgaagattcctgttgagtaatagaacaccttgttagccaagatggtctcgatttcctgacctcgtgatctgcccgcctcggcctcccaaagtgctgggattacaggcgtgagccatcgtctgcgcttctatttcgatcaccaagatgtggctccggaatgcggggcttacttcttccatgaattggccaaggagaagcgcaagggtgttgagcgtctcctgaagatgcaaaaccagcgtggtggccctgctgtcttccaggacatcctgaagccaggtcaagatgagtggggtaaaaccctggaagccatggaagccgccatggccccggggaaaaatctcaaccagagtcttttggatcttcatgcactgggttccgcccctacagacccccatctctgtgacttcctggagagtcacttccgagatgaggaagttacctttatgcctcggaagagtgcagacctccatgcagcgggtgaggctgccagcctaggtggggtgtcattgaatgtcatgaagggagccagccttcatgcactctgcctgcgtctcctgaacagctttggaccaggagttgctaccttgtgcggagaacgtgtggtgcataagaacaaccgagcctctgctcttcgaaaatgtatattctggccag

SEQ ID NO: 153037 - DNA, 755 bp, Homo sapiens
tttcgtcaagaaaggggggcgaagggggagtcgggaccctggggggagctccgtgggctggctacccagcctggggggagggcttcggggcggcgggggcgcagattggaacgccaggacatcctcgaggggttccgctgcctcgctgcgagctggaatgggggcttcggggctgtaaaaccgccagaggtggctgacgcccggtcgggtctggggagcggagactcgttttgcctattttcaggtgctcttgcaaggccaactgggtcgggaggcagctcctgaacaccgcccccggctatgcctgctgccgtttcggcccacttttcccaacttcggccctttctcatcttcctgcgctcccgccaccctggctgcctttcccttctttcagcacagtctccttaaccaaaactgccaagaaaggcttggaattgaaacaaaacctgatagaagagcttcggaaatgtgtggacacctacaagtaccttttcatcttctctgtggccaacatgaggaacagcaagctgaaggacatccggaacgcctggaagcacagccggatgttctttggcaaaaacaaggtgatgatggtggccttgggtcggagcccatctgatgaatacaaagacaacctgcatcaggtaagtctctggccctcacggggtggagctaaggcaaagccgccctctcttccactactcccatgtgacagcctcccccagccattggcaggccagaggctcagggagagc

SEQ ID NO: 153038 - DNA, 4037 bp, Homo sapiens
atgatgcgagcgcatgcaccacccaccgccgtcccggcatgcaccgcgccgcgggctccgcctccgcgggaccacagagctgggatagcgcgcgaggccctcggtcggacgggacgctcgggattcagggactgcctcggcacacgggaagttgccctacaggcgcgggagaaagcgcaggcggcggcttggcagggagaggcaggctgcagtgcacattgggtcaggcacacgcgaggggcagcccccgagggccgtcccagagtcccccgcgccgccggggtcctaacggggtgcaccgtcttccgccgcacgtggattcagcgcgatgcccaaatccaagcgcgacaagaaaggtgggcgaagggggagtcgggaccctggggggagctccgtgggctggctacccagcctgcggtgagggcttcggggcggcgggggcgcagattggaacgccaggacatcctcgaggtgttccgctgcctcgctgcgagctggaatgggggcttcggggctgtaaaaccgccagaggtggctgacgcccggtcgggtctggggagcggagactcgttttgcctagtttcagtctccttaaccaaaactgccaagaaaggcttggaattgaaacaaaacctgatagaagagcttcggaaatgtgtggacacctacaagtaccttttcatcttctctgtggccaacatgaggaacagcaagctgaaggacatccggaacgcctggaagcacagccggatgttctttggcaaaaacaaggtgatgatggtggccttgggtcggagccccatctgatgaatacaaagacaacctgcaccaggtcagcaaaaggttgatggggtgaggtgggtctcctgttcaccaaccgcacaaaggaagaggtgaatgagtggttcacgaaatacacagaaatggactacgcccgagctggtaacaaagaaggatttcactgttgagcctgggatccaggggcccctggagcaagttcccccacttccatggagccacagctcaggcagctgggcctgcccacccgccctcaagagaggtgttggtgactctgctgtctgacttacgaggtgtgcaaggagggcgatgttgctgaccccagagcaagggcttcgcgttcctgaaagctttttggggtaatgagatggctgaatttcaaggtgaccattccaaattacatgtgggattcacagtcgggaaggttccagcagattgggaagaccgactttgccagagagcgcattctgagttcccagaagagtcagactcagaagatgatgactgaaagggactcgggactgaaggtctcctgggaagcttctgggtctcactggaccatcaggactgctgccgcccctctggagagagcagctttttatttgtctgtagacagggaacatgatgggcactgacctcctgtaaagaataaaactgtgggccgggcgcggtggctcacgcctggaatcccagcactttgggaagccgaggtgggcagatcataaggtcaggagattaggaccatcctggctaacacggtgaaaccccttctctactaaaaatagaaaaaaaaactagttgggcatagtggcatgtgcctgtagtcccagctactcaggaggctggaggcagggagaatcacttgaaacccgggaggcggaggttgtagtgagccaagatcgcgccagtacactccagcctgggcaacagagcaagactccatctcaaaaaaaaaaaacagtttcctgaaatattgagaagttatttttattttacttggttccaaaactagtgtgaataaggttgcttctgcaactttagtttatatgtgattcttaattttttacggtttgtagactctgagaatttgatgaaagccacagattctcttcctctagtacccatacacatctaattgcatgtaattttgggcttttgttagcctccctggagcccgggtcccagccatgtgtctaaggccaacataatggtaatagttaaaggacttcatgtagcaagccagaactgaactaaatacatggacatctcaaacatgagtgtcatttaggactgaaggcaaattaatgtcatggggtggagatcaataagaaggtaaggagccactggcagtatgagtccaaacagggtataccatggaaatcacctgtggaagaggaaggtggattccagaagaaagaaaacttgtgggagtgagcatttcaaggatggagagatcttgaagatactcacagggaagatagtggtggggcatgccatccacaacgacttcaaagcccttcagtactttcaccccaagtccctcacccgtgacacctcccatatcccccccctcaaccggaaggctgactgcccggagaatgccaccatgtctctgaagcatctcaccaagaagctgctaaaccgggatatccaggttgggaagagcggacattcctctgtggaagatgcccaggccaccatggagctatataagttggttgaagtcgagtgggaagagcacctagcccggaatccccctacagactagtggcagtggggacgctggtgatatgaggaggcagaggcagcacccaggagaaacagggcagtggaccaatggacagctccaccagctccacatctttgggaagctagatttgggggagagagaagctctaccccagacttaatacccattgaaatttcacctcaggtgttgtgtcctgtgtctggttaagtgtcccatggaaggggaacatgccttcacgtcagaacccaaccgtataccttgtacttcttaaatggtgctaaccacaggagtcccagggcgctctgtgccagctaagatttttaactttcacggggcagggcatactgggaaatgtagtttcccagactgccttatcacttgggtggacatatgtctccttttatgccttttggtcttgagtaattaacagcattctcttccacgctcagaagtgttctggttggggccaggcatcgagacgtcacgcctgtagtcccaacacttagggaggccgaggcgggcggatcaccctgagatcaggagttcaagaccagcctggccaacatggcgaattcccgttctctactaaaaatacaaaaaatgtgtggggtgtggtggcaggagcctgtaaatcctagctactcaggaggcttgaggcaggagaatcgcttgagcccaaggaggcggaagattgcagtgaacccgagatcgtgtcactgcactccagcctgggtgacaagagtgagactccgtctccaaaaaaaaaaaaaagaatttattaacctggttggttaataaattgtgtggtccctgccgggcgtggtggctcacgcctgtaatcccagcactttgggaggccgaggcgggcagatcacgaggtcaggagatcgagaccatcctggctaacacggtgaaaccccgtctctactaaaaatacaaaaaattagccaggcgtggttggcgggcacctttagttccagctacttgggaggcttaagcaggagaattgcgtaaccccaggaggcggactttccagttagccgagattgtgccactgcactccagcctgggccacggccacagagcgagactctgtctcaaaaaaaaaaaaaaattaaaattgtgtggtccctttccatgtcacagagtctgcttttggctcagagtctgtatctagcctgtgtcaggatattgcctgttcttcccaccttgacttccagagcagccatcgctggtgagctttagttctccttagggttccaaggcattagaagtaagagtgtagcttggaaaccaacttctgtgatttaggaaagctgtctctttcctaaggtaatagggggtttatttcatttaggccccagttggtaggttttaaaataatttataaagtgttttaataatttggttgtcttttttaccttgctaaaccaagcctctaaaaactcaaattattcccttgataaatttttataatggaaaaaaaaaa

SEQ ID NO: 153039 - DNA, 779 bp, Homo sapiens
acgtgtttttatttttcaaactccgtgtttcctaacgtggagtgtatgggtctaagagagcctgctgtcctccctgccttccaccttggagaggaggctggacgcatcagcagtggccagggcaggtcgcaaaatctcccagcctagagaccacacctgaaacggctgaagccagcttgcacatgggcacaacagggccttgtccttagagcactggggggtcatggctgggaggggcatggcaggggctggcatccctgtagagccagaggggccaccccagggcagtgacattccagatatgttgggctcacctcatccttgctgtgagactggagttccgatggggaccatgaaagtcagtacatccgcagagctgctcagctgctctacctctcgctgacttttttgttgcacatatacattttctttcaattagcatttatttcagcttttatttaagctttttgacagtacatgtaaaatatatgattataaccatttaaaaataccttatgtacctggttttttttggaaactaaatagaaatatatttatcttttacataaaagaagcgtgtagtgggggggtccagggctttgtggtggcttagtggccatcggggacccaggctcttcccacctttctcttttgggtccacctcttggctcctggcttccttcctctggggcctgactgtccaggatggcagctggagctcctgctctgggcacgggtggcatcagaacccactgtttcccattcactctttaatacaa

SEQ ID NO: 153040 - DNA, 805 bp, Homo sapiens
  misc_feature (1)...(805): n = a,t,c or g
tttatttttaaatggttataatcatatattttacatgtactgtcaaaaagcttaaataaaaagctgaaataaatgcttaattgaaagaaaatgtatatgtgcaacaaaaaagtcagcgagaggtagagcagctgagcagctctgcggtgtactgacttcatgtccccatggaactccagtctcacagcaaggatgaggtgagcccaacatatctgggaatgtcactgcccggggtggcccctctgggctctacaggggatgccagcccctgccatgcccctcccaggccatggaccccccagtgctctaagggacaagggccctgttgtgccccatgtgcccatctgccccttnctccctgcccctggtcccatgggtgtctatgactgctctgtgacccctgccccccaccagctctgcctgccgcagagggacagcagcccttgtgcaagctggcttcagccgtttcaggtgtggtctctaggctgggaaattttgcgacctgcccctggccactgctgatgcgtccagcctcctctccaaggtggaaggcagggaggacagcaggctctcttagacccatacactccacgttaggaaacacggagtttgaaaaataaaaacacgttaatctactggcaaaagcagctggcagaagctaaaatcactggcctaggaagcacttcaaaatcaacaacagggcttaggtgaaggagttattgggtatcacagagcaagaaaaaaaatcatgggtacgtggtctcaggacctcttgagattgtgccttaggcaaaaaaaaaaaaaa

SEQ ID NO: 153041 - DNA, 588 bp, Homo sapiens; identical to SEQ ID NO: 120433

SEQ ID NO: 153042 - DNA, 1050 bp, Homo sapiens
atggcagcactgagagccatgggggtctccagcctgtggactgctgctcagagcctggagtggtctgaatggaaccctcaggtgttcgcaggtgtgcaggacagaaagctcaggtgtttgcaggtgtgcaggacagaaagctcaggtgttcgcaggtgtgcaggacagaaagctcaggtgttcgcaggtgtgcaggacagaaagcgcaggtgttcgcagaaagccaaacttggccctgctggcaacaaagtcatcagtccctctgaagacaggaaacaaccttccaacaaccttgaccgagtgaaactcacggacttcaatttcctcatggtgttgggaaaggggagttttggaaaggtgatgcttgccgacaggaagggcacagaagaactgtatgcaatcaaaatcctgaagaaggatgtggtgattcaggatgatgacgtggagtgcaccatggtagaaaagcgagtcttggccctgcttgacaaacccccgttcttgacgcagctgcactcctgcttccagacagtggatcggctgtacttcgtcatggaatatgtcaacggtggggacctcatgtaccacattcagcaagtaggaaaatttaaggaaccacaagcagtggatctgaagttagataacgtcatgttggattcagaaggacatatcaaaattgctgactttgggatgtgcaaggaacacatgatggatggagtcacgaccaggaccttctgtgggactccagattatatcgccccagagggcctcttgccaagatccatccttcctgtgaacaccgccctgctggcgtatgcactcctgtggccagtggaggagtcagtggatggctgttttcaggggcagtgggacgcagttagacatgcaggggctattggacttaccactaatgtaattgatgtgtttgttttcacacagataatcgcttatcagccgtatggaaaatctgtggactggtgggcctatggcgtcctgttgtatgaaatgcttgccgggcagccgagcacagatcagttacataggatatcttag

SEQ ID NO: 153043 - DNA, 1677 bp, Homo sapiens
atgaggagtcagggtgaagttcggaggtacctaaagagacagtcctgccgatttggacttggcagtcgagaaaaagacatggttacaccttctgcctcctctgtgtgtttaatagatgaacaaataccagctgctggggaatcttatgacattatagaccccaggagcaagcacaagttcaaaatccacacttacggaagccccaccttctgcgatcactgtgggtcactgctctatggacttatccatcaagggatgaaatgtgacacctgcgatatgaacgttcacaagcaatgcgtcatcaatgtccccagcctctgcggaatggatcacactgagaagagggggcggatttacctaaaggctgaggttgctgatgaaaagctccatgtcacaggtaaggcttgctcatcccggagcagcatcgtgggcaggcatttggatgaaggttacactgatattaaggcagggccccaactggatgctttcctatgtatttcatcccaaccaccttttgggaaaaatgctatcatcatcaccagcagcagcagcagcatcattacccttttaaaacatggccctagacgattctacagcttcgcctcttgcagctgcatgtcttctactgtgtcagtcacaaatccaaaaattctgggaaagggattcatcgactcagtgtgggtcacatgccaccctggaccaatggactgtgactggagggcagatatggggtgggggcctgtgaggctgtgcatttggtttagtaccaggaatcatcaagaacaagagaaattcatgggcccagtcagagaacccaaaggtccctcccacaacacatggggattaggggaactacaagatgagatttgggtgcagacacagggccaaaccacatcaaggaaccacattcaaaagccacccacacagggacaagttaacaacatgaaagcaaagaggaccaaaatagtgtcttctctcatctttccatacagtctacaaatagactgtaacttccaaaggaaaaagaaaagggctgttgttgtacgagatgcaaaaaatctaatccctatggatccaaacgggctttcagatccttatgtgaagctgaaacttattcctgatcccaagaatgaaagcaagcaaaaaaccaaaaccatccgctccacactaaatccgcagtggaatgagtcctttacattcaaattgaaaccttcagacaaagaccgacgactgtctgtagaaatctgggactgggatcgaacaacaaggaatgacttcatgggatccctttcctttggagtttcggagctgatgaagatgccggccagtggatggtacaagttgcttaaccaagaagaaggtgagtactacaacgtacccattccggaaggggacgaggaaggaaacatggaactcaggcagaaattcgagctgatgatcttggataagttccttaaactctctgacctttgttttccttgtttacgaagtggagatgataatagagactgccgcataggactgctgggaggattcactcagttcacttacgtcaggatcatccatatggctgtccctcacctctgcatcttgtcccactggaaggtcttcaggggcagtaatacacatggagctgtcatcacccctgataacaatgccttctggaatacctcctga

SEQ ID NO: 153044 - DNA, 2090 bp, Homo sapiens
agcggccgcagctccccggcggaggcaagaggtggttgggggggaccatggctgacgttttcccgggcaacgactccacggcgtctcaggacgtggccaaccgcttcgcccgcaaaggggcgctgaggcagaagaacgtgcacgaggtgaaggaccacaaattcatcgcgcgcttcttcaagcagcccaccttctgcagccactgcaccgacttcatctgggggtttgggaaacaaggcttccagtgccaagtttgctgttttgtggtccacaagatggtgccatgaatttgttactttttcttgtccggggtgcggataaggggacccgacacttgatgaccccaggaggcaagccacaaggttccaaaatccacactttacggaagccccaccttcttgcgatcacttgtgggttcactgctctatggacttatccatcaagggatgaaatgtgacacctgcgatatgaacgttcacaagcaatgcgttcatcaatgtccccagcctctgcggaatggttcacactgagaagagggggcggatttacctaaaggctgaggttgctgatgaaaagctccatgtcacagtacgagatgcaaaaaatctaatccctatggatccaaacgggctttcagatccttatgtgaagctgaaacttattcctgatcccaaggaatgaaagcaagcaaaaaaccaaaaccatccgctccacactaaatccgcagtggaatgagtcctttacattcaaattgaaaccttcagacaaagaccgacgactgtctgtagaaatctgggactgggatcgaacaacaaggaatgacttcatgggatccctttcctttggagtttcggagctgatgaagatgccggccagtggatggtacaagttgcttaaccaagaagaaggtgagtactacaacgtacccattccggaaggggacgaggaaggaaacatggaactcaggcagaaattcgagaaagccaaacttggccctgctggcaacaaagtcatcagtccctctgaagacaggaaacaaccttccaacaaccttgaccgagtgaaactcacggacttcaatttcctcatggtgttgggaaaggggagttttggaaaggtgatgcttgccgacaggaagggcacagaagaactgtatgcaatcaaaatcctgaagaaggatgtggtgattcaggatgatgacgtggagtgcaccatggtagaaaagcgagtcttggccctgcttgacaaacccccgttcttgacgcagctgcactcctgcttccagacagtggatcggctgtacttcgtcatggaatatgtcaacggtggggaccctcatgtaccacattcagcaagtaggaaaatttaaggaaccacaagcagtattctatgcggcagagatttccatcggattgttctttcttcataaaagaggaatcatttatagggatctgaagttagataccgtcatgttgggattcagaagggacatatcaaaattgctggactttggggatgtgcaagggaacacatgatgggatgggagtcacggaccagggaccttctgtgggactccagattatatcgccccagagataatcgcttatcagccgtatggaaaatctgtggactggtgggcctatggcgtcctgttgtatgaaatgcttgccgggcagcctccatttgatggtgaagatgaagacgagctatttcagtctatcatggagcacaacgtttcctatccaaaatccttgtccaaggaggctgtttctatctgcaaaggactgatgaccaaacacccagccaagcgaatgggctgtgggcctgagggggagagggacgtgagagagcatgccttcttccggaggatcgactgggaaaaactggagaacagggagatccagccaccattcaagcccaaagtgtgtggcaaaggagcagagaactttgacaagttcttcacacgaggacagcccgtcttaacaccacctgatcagctggttattgctaacatagaccagtctgattttgaagggttctcgtatgtcaacccccagtttgtgcaccccatcttacagagtgcagtatga

SEQ ID NO: 153045 - DNA, 1138 bp, Homo sapiens
atgactcagataagtaacataaagcagccttttgccatgcagcacaggttcttcatttcccttttgcactggaccctgcaaattgtgtatccagcactgttcctaggactttgtgaacggggaagaaatgggaggtgtgatcaagtaccagaaggctctgtgctgtctctgctggtctgggtggttcctggactggcgttccctgaggttgcacctggcacgtgtggcaccagctatgttcctgatgctggactccatggtcctgaagtggaatcaaaactggggcttgaccccggatcgatgactgggactcagcctacgcggacgccagcgcagcctgcggcggccgagccacctgccctcacagggcctggccgggtgcatcaggaacaggcggtcttagcgtgtggatttctgggcatttaccacttgggggcagcatctgcactttgcagacatggcaaaaaacttgtgaaggatgtcaaagccttcgctggggcgtctgcgggatcgttggttgcttctgttctgctaacagcaccagaaaaaatagaggaatgtaaccaatttacctacaagtttgccgaagaaatcagaaggcagtctttcggggcagtaacgcccggttatgacttcatggcccgactaagaagtgggatggagtcgattcttcctcccagcgctcacgagctggcccagaaccgactgcacgtatccatcaccaacgccaaaaccagagaaaatcacttagtctccactttttcctccagggaggacctcattaaggtcctcctagccagcagttttgtgcccatttatgcaggactgaagctagtggaatacaaagggcagaagtgggtggacggaggcctcaccaacgctcttcccattcctgcccgtcggccggacagtaaccatctcccccttcagtggacgactggacatctccccgcaggacaaagggcagctagatctgtatgttaatatcgccaagcaggatatcatgttgtccctggcaaacctggtgagactcaaccaagccctttttcccccaagcaagaggaaaatggaatctttgtatcagtgtggttttgatgacactgttaagtttttacttaaagaaaattggtttgaataa

SEQ ID NO: 153046 - DNA, 2843 bp, Homo sapiens
  misc_feature (1)...(2843): n = a,t,c or g
cattgatgatcattcgtccagtgcggtggaattcggcggtaccaacccctgccgcaagactttcctgggccggctcgcggagagcgtagcgcggccttggtggcggaatggcgttgagtgacggcccggccccgcgcatctcggttaaagggactcgttcaacacggaagtgtcccggggctgcattgtgctacagctagaatgaagcacatcaacctatcatttgcagcgtgtggatttctgggcatttaccacttgggggcagcatctgcactttgcagacatggcaaaaaacttgtgaaggatgtcaaagccttcgctggggcgtctgcgggatcgttggttgcttctgttctgctaacagcacccagaaaaaattagaggaatgtaaccaattttacctacaagttttcccgaagaaatcagaaggcagtctttcggggcagtaacgcccggttatgacttcatggccccgactaagaagtgggatggagtccgattcttcctcccagcgctcacgagctggccccagaaccgactgcacgtatccattcaccaacgccaaaaccagagaaaatcacttagtctcccactttttttcctcccagggaggaccctcaattaaggtccctccttagcccagccagttttgtgcccaatttatgccaggacttgaagcttagtggaatacaaaagggcagaagtgggtggacggaggcctcaccaacgctcttccccatccctgccccgtcggccggacagtaaccatctcccccgttcagtggacgactggacatctccccgcaggacaaagggcagctaagatctgtatgtttaatatccgccaagcaggatatcgatgttgtccctggcaaacctggtgagacttcaaccaagccctttttcccccaagcaagaggaaaatggaatctttgtatcagtgtggtttttgatgacactggttaagtttttactttaaagaaaattggtttggaataaaatgcataaaagttttataatgcaaaacacgttttagatagtttttgatggaagtttctaatcaaatcctttttagaaaatctatcatgactcgattgtattactccttgtaatatttgtgtttatttgtaatatttgaattattacttagcacatggatataagaggcactttattagaatttgccaccgtcattaagaaggatacacttaggtgataaggaatcatttttggtgagctgttgtgtcctttaaaaaatggaggaggataggttctttgggtaaattcaggaacatggaaaatggaggcccgcctcttaggttccatggagaatatgtggcatgatcttgacgtgaagcatgggtgtttccgtgacttaactgtgtccctgtagctctggaactgaaggaactaggtaggagaggaaggatttgagaaataggcaactcatggttaaagacctttgatcaggactggaggaacaaaggtttgtgtattagtccattttcacactgctgagaaagacatacccaagactgggcaatttacaaaagaaaggtttaatgggctcacagttccacatgactgaggaggcctcacaattgtggtggaaggtgaaaggcatgtctcacatggcagcagacaagagaagaaaacttgtgcagggaaactcccctttataaaaccatcggatctcttgagacgcgttcactatcatgagaatagcatgggaaagacctgcctccatgattcagttacctcccactgggtccctcccacaacgtgtggcaattgtgggagctacatacacttcaagatgagatttgggtggggacacagccaaaccataacagtttgctttccacaggtgtgtgcagttgctcccagtgcagttaggggcagatatccagaagcctaggagattttgaagaggcttatcccctctcatcttcctcccctaaaccccaccccagtttaggagattatcaagctggttgtcattcattctctctctctctctctctctctctctctctctctctctctctctctcgccatacctctctgagtatttagctattgttctatatactggatacatctattatgggaacttaaatagataaaatactactaaacacaaagaaccaagtagcctagtaaataagaattaaatccagaataatcattcacttctcatttttaaatcacgttgtactgatcccaggttttttactttctgagtagttgtcgatcactttgaggacttgtgtatgggcttgtaccaatttactgacactgtcttaaatcctaaatctgtttttatgaggttttgccaagcaagaactcttgattactaagaggcagttagagacaaaccaatttaattccatgtcttcaattgtcacgncatttcttcttttacctcctttgaaactattctttgagtccaattttatggttctccagaagcccaaaatacacaacttttagccacataaacaccaacggatgggcctctttttggagggagttatggcataggacccactctagagtaatgatggtccctgtggtatatactttctcctactctagcaaacatgtagtttaatcttaatgtgttgtttccataagtgacatgaagtggatagattctcaattgttatgtccacttattcactaggtaaattttcagttttaatacttttctccttaccccttcctttgatcatttcatgtgaatattctatttgtatgatacactgtatttcaataaattccttgttgatgtacccttaaattgaagaaatttaagctgcaaaaccaaaaaaaaaaaaaaa

SEQ ID NO: 153047 - DNA, 499 bp, Homo sapiens
ggccccttcgccagtgtggggaacgcggcggatgtgcagccggcgactcgggtccctgaggtctggattctttctccgctactgagacacggcggacacacacaaacacagaaccacacagccagtcccaggagcccagtaatggagagccccaaaaagaagaaccagcagctgaaagtcgggatcctacacctgggcagcagacagaagaagatcaggatacagctgagatcccagtgcgcgacatggaaggtgatctgcaagagcttgcatcagtcaaacaccggggataaatcttggatttgggttccaggcgtcaaggtgaagataatacctaaagaggaacactgtaaaatgccagaagcaggtgaagagcaaccacaagtttaaatgaagacaagctgaaatatacgcaagctggttttatattagatatttgacttaaactatctcaataaagttttgcagctttcaaaaaaaaaaaaaaaaaaagtcgacg

SEQ ID NO: 153048 - DNA, 4123 bp, Homo sapiens; identical to SEQ ID NO: 148788

SEQ ID NO: 153049 - DNA, 1236 bp, Homo sapiens
tcaggggagagctacccagtccctttcacggacagtaaattcactgtggtgggaggtgaagatggactgaaaacaaataccttctttgcccatcagcaggcctagcgtcttggcagtcatggtgacaatgacgttgaaggtgggggctccaccgatgctcttcatacaaagatccgtggtcaattccccatcctgcagcagtgagtccaggaccacagtatatttctggccccccagtgtcagcccattcatgacaaagcttgaccagtctttgccaaccaggacaccaacctcagctggcgtgatgttgaggaaggttttccctcccacgtcaagagaaaagccaacatgtttttcctccaatgcataaaaggaacttccgtagggctggcaggagtcaggctgttcaagacaatgcccgctttccagtcgggaaacctgtcgtgccagctgcattaatgaatcggccaacgcgcggggagaggcggtttgcgtattgggcgccagggtggtttttcttttcaccagtgagacgggcaacagctgattgcccttcaccgcctggccctgagagagttgcagcaagcggtccacgctggtttgccccagcaggcgaaaatcctgtttgatggtggttccgaaatcggcaaaatcccttcctctcacttccaggctccatcgggtgcccacattgctaaacctaactagaagtgtgcacacaggggagccagggatgcattctagaagggacaagccccaagtggcgtaagacaggatggaaatgagtggaaagtggatctgcgctgttgtcaggctttgtttgccgtaatgtttaccggaatagtcagtgtagaataaacggatttttccgtcagatgtaaaggttgcagaaccggaccattcttgcgtctgatctttcaggatcggatcgttggcgtcgaacttatcgctgtctttaaagacacggcccgcgtttttccagctgtcgattgagttgtcgccgaccttttgataaaacatgtagattgatgtgtcatcagcgtctttcgggcttcccgcaagagcaaacacaacgtgatagccgttgtattcagctactgttccgtcagcgttttgcagcggccagctgtcccacacatcaagtccttttgcagactcaatatttttaatcgttgattgatcgaattgaggcacttggtatttttcgttttgctgctgtttagggatctgcagcat

SEQ ID NO: 153050 - DNA, 604 bp, Homo sapiens
tcaaactcacatagagcattcagcaagatagaccacatgtgctgagccatcgttagtattttctgtcctttctctttgactcgtgtatagtgtgctcaaactcttaaaattatacactttaatgattatacactttcatgcatctcaattgcatgtaagttatatttcaatatatttgttaaaagtttataattaaaaaaactgtcctagcttgattcaagaaatcttttttatatttaagaaaatgtaatgttatgtattatcagggcaaaagagaaaaaccatatgattaccttgtcatacacagtaaaagcatttggcacaattgaaaacttttttcatgatttataaaaacaaaccccagaaaactctcagcatgataagaagagaaggcaacactttcaaccctattaagggtagatttgaaaaaaactcagaggtaacattatattaaatggcataggattgaatgcttttctattaaatcagagaaaaaagtagaatatctgttgttattctttcaattcagcattatactagagatctaaatcaatgcaataaagtaagaaaaataaataaaagtattgaaaagattgaaaaaaaa

SEQ ID NO: 153051 - DNA, 1987 bp, Homo sapiens
atgaaatataactaaccctttataatacaactgttggaacaacagttgaaaataacaatatcttgactcctggctgagtgctttacactgagctgtcttttccgaatatgagcacagacttggggatattagtgtcacctagcgttattagctagtattctccttttgtttccccataacatcccctcctccttcccacagatccactctccactcatttccatcctgtcttatgccacttggggcttgtcccttctagaatgcatccctggctcccctgtgtgcacacttggagttaggtttagcagtgggggcacccgatggagcctggaagtgagaggaaggtgagggccgtatttcttccctctccctccctgctctggcactgagtatctgggcaatagctgcatctgtctattacttcagtgggccacttcttccacagccccaatttttcagtggggtcccattaggcattattttacctttgttcctttagctcccatcaagggaagacccagaggcattctcctcaccaagggcatttaaggaaatggcatggggtgagggggaacagcgggcgttgcgtgttaaaggtcctgttggcacctctcctctgcaggctgggaggtcatggcgggagatgctgcatggatttgtcctccctgctgtcagaacaacagggttctggaagagtagaggacaggccgtgggacttggctgtctagagacaaggcgggagggatttccttgagaggcagggacatgtggtggttactaatcattcgaatcattgtgaggtgtctgggaatgtaatggatgggaaatctactaagaaatcaacttacgttacacttataaaagctcctagttctgaggacagagacctgttggagtccccatagtgggaatttttgccctggcatccagttcagatccctggagcttcttgactgaggggagattggatcccttggggaagagtgaagccttcaatgctgccacaagtgtgatccgcccgcctcagcctcccaaagtgctgggattacaggcgtgagccaccatgcccggcctcttttttatatttaaaaaatatcattttatatattatcagggcaaaagagaaaaaccgtatgattaccttgtcatacacagtaaaagcatttggcaaaattgaaaacttttttcatgatttataataacaaaccccagaaaatgctctacatgatgagaacagaaggcaacacttccaaccccattaagggcagatttgaagaacccacaggtaacattatattaaatcggcataagattggatgcttttctattaaatcagagaaaaaagtagaatacctgttgttactcttttaattcagcattatactagagctctaagtcaatgcaataaagtaagaaaaattaataaagtattgaaaagaaagaattgaagctgtctttattcacagataatgactgtgtttgttaacaatgctagaaatctacaaaaatctaccagaactaatcagtgagtttggtagtgttgcagaatgtaagctctcaatgtaaggggtcttttgtatttctgtatattagcaatgagcatttggaaaatgaaataagaatacaatttcatttaaagtaacatctaaatacatgttgtgcttataaataaattcaacagactgggcaccatggctcacacttgtaatctcagcactttgggaagccgaggtgggcagatcatgaggtcaggagatggagaccatcatgcctaacacagtgaaaccccgtctctactaaaaatacaaaaaaaaaaaaaaaaagaaaaattagccgggcgtggtggcatgtgcctgtattcccagctacttgggagtctgaggcaggagaatagcgtgaacctgggaggcagagcttgcagtgagcctagatcgcgtcactgcactccagcctgggcgacagagtgagactctgtctcaaaaaaaaa

SEQ ID NO: 153052 - DNA, 1667 bp, Homo sapiens
ggggggtttcccccctaaacccctaaaaaatttttttttcccccaaagccttaaaatttttggggggggggggccccaaaagccccccccccaaaaaaagggttttttcccaaaatcccccgcggggttttaaatcgccccccccaaaaagaaaaaaaattatttttccccccccccgtaaaattgggcccccccaaggattttttaaaaagggccccccccctcttttcatttttttttgtcttttccccgctttcatggaaactacatgtccttttagtaaaagtctgtcaaagaaatttacaaaaacaaaatagacaacaaacaaagcaacttcaagtcataaactctaaatttaaattgccttgttttccttccaactgctcgggccctttccccaccatgtttccgggcactgcgcaggctgagctcaagggaaatttctttgaacgatggctttttctctagccttgtttctgtccagcgtcattacagacctggctgaaatcacagtggatttcagagaaagccagaattaaacacgataaaaatttaaaaaataactacttcataaatatttattatttacattaggggcaatcttttagtctgaagagtttttatacaagttgatgaaatgtacaagcagtgagaagagactccagcagtttaaagaagggcaaaattagaatgcaacgaagatataaaatacattaaacaaaaataatttgcacaaaagcaaacaggacatgatagaaacctttttcttaaaaaatataaggtatttcacaaaagcctgaacattttacatgttagtactaaaaacgggggaaggagggaagcttcatatattcttatcacaaaaatatttaccggtactccaactggagttttcttttatgttattctgattatcttactatagagggaaaggggctgaaaactgtatacagactctatcatccttaaattacagttgaggcagtttgtacattatcttctcatctaatacctcaatgaaaaggccctggagagaataaaggaaatcaaaagggaagatgtccgctctttattaataatacttgtcactggtattagagaagtggaggaggggcagcccccaggccacgcctctgcttgagtttccttctgtcgcactgccacggagccacaggccaaggcggctcgggagtgaacaatccaggtgcgcggtgtgttccagcctcagtcctcctgggttctttatccacaggcatctgggggtggatgtgacggcagacttgcaccagctcccttccagaggcgccagggaagaagcccgggctgaccccgcttggtccagcccctcgggagtcgtcagtgggctcgatgcttcctcttcttgtgctttttgtccttcttcttgttcgcacacttggggcagaaccactgcatctcttctgggggtgcagtcatgattccaacacagggcttgtgtgtagcactattgttgggcatgcggactatgagatcacagatgctccctttacaggccccctgcagagactcatccgttcattcatcctctcagccaggaatagaagtcttccgagccacggctttgtctttatctcacagatatcgtctatcataactgaacaggttgctatcttttttgtatctgacat

SEQ ID NO: 153053 - DNA, 3672 bp, Homo sapiens
atggggtgtacaccttcacacagtgaccttgtaaacagcgttgcaaagagtggcattcagttcttgaaaaagcccaaagcaattcggccaggatgtcagggcggaagtgaaagaggttccatccctttgctggttaaaaactccacctgctatgacgctggggagggcctggcagaggagcagccaagtcccaggaggaaccaaaccacagctaaaggtctttgtcagctcatgggagatcctgcttcaggcaaaaggaaagatatggaaggactgatcccaggaaccaaaacctcttcatcccagctgaacaaatcacaaagccacatggctaaggatattccgttcaagacacagggttcccatggatcacaaggggcagacttttctggagatgagagtgaggaaagtagtacccaagatacttccaaatggaaaaggacagcaaaatgtcacacgtcaagcacacagagccactgctaccaaaccatccaccctgctcatgagcctgaaggcaaagtggacttcccggagcctctggtaaaggcccaccagcaggcttacacctatctacactccagcctctccaaatatgaagcaattctgtgcatcatccatcaggccacccagacccgggagctgctgcagcccatggtcagcttcttgctgctgtgctttgaggagatcagccagctgttgggggagatctccaaggatggagaagtgctcctgcaggaagtcagggaggatctggcttggcctttgaagaaaagagagccccaggagcagccaaatctcctgcaacagctgctacagtacacagtcagcaagctgcaggtgctcaatggcacagtggcctcgctcaccggcagcttcctggagggctccagcagctacctccactccactgcaacccacttggaaaataagctgagcacaaaaaggaatgtggatgaacgcctcctgagggctctgaggcagctagagagcctggcgagtggctgtggcgaccctggggtgcagggtctccccttatgctctgaggacagtggcattggtgctgacaatgagtccgtgcagtcggtggacaagctgggcaagcaaaccagctgggaccttgcaccagagcccgaagaatggaagtcggtgacttcaccccacacagaggccaggcagtcaggacacacctggcagcaaagtccattctgtttgggctcaggcagaccccaggactgcctgctctcaggggctcctatggcaaaggttcagccacgagcacaggacgaagcaaggagcccatgcctctccagtacaagcccagaaaatatcacctccccacctttgaagctggggacaagcaccccatgtgattcctttgggattggggtctctgtggaaccacacctttccaaaacctccaggccgatggacgcttcatctcttagtgacagcgaggacagcagcccagaggaggaggaggaagacaaaatgagcagcatgagtctgtgtgcctggcaggaaaaaactccacattcaaggccacaatcttcacctgctgaccgggaaagcccatttcaggcccgcaccaggaggcttaggagcctccaggcccaggaaatgattctgaagatgaaggagtcaatcagcgaaaggatcaagtttgtccctgtgccctgtgggcaccaggactggtctgaggaggaggaggggaggacagtggtccccccaagacctagcacggtaagtggcagcaggagggcccctgagaggcagacgaggtcccagtcagagtcgtgtctccagagtcacgtggaggaccccacctttcaggagctgcgaagggtccagagggacctcagtcagaagctggaggcattttatgccctgggtgccaaagggcaggggcagagccaggagcaaattctgcagcccagagcagccgccgtgtggcccaatggcacctgcagggtcagtccaagcaacaccaccagcaggctcaaggcatccctcaccaagaacttcagtattttgcctagtcaggacaagagcatcttgcagaaatgcaatccccatcctgaggacgaacaaggcaaagctgggaagcttccaaatgccatcccatcaggagaggtcagtgaggctgccaaggccacagactggaatgtcagaggctgtcccaccagaacatccgtcaagaagcttattgaaactttcagtcccacggagagtctgaggatgctgggggactctaaggacgctggggcaagtccctgcctcaggaattgcatcatgccccccagatttcccaagtacacagggcttgcccctttgtatccgaagccccaaatttctccagcatcaggcagagaatctctcaaaatgggcataggctggaagcccttagcacctatctttccccctctgcctaaagcagaagcagccaagagtgaggagctcagctgtgaaatggaggggaacctcgagcacctccctccaccgcctatggaagttctgatggacaaatcattcgcttctctggagtccccagaaagcagcaagtccacagagaactcccccaaggaaacccaggagccagggccgggagaggctggccccaccaggagaacatgggcttccccaaagctgagggcctctgtgagccccctggacttgctgcccagcaagagcaccgccagcctgaccaagcctcacagcacagggccagggagtggcaggagcagctgccagcccaggaagccagccctggacctgagcagcccaccagccaccagccaaagccccgaggtgaagggtgggacttggagtcaggcagagaaggccaccagcctctacaggcagccccggaaggccatcgcctggcaccactccggccctccatctggacaaaacaggacctcagagtccagcctggccagaccaaggcagagccgagagagaagcccccctgtgggcagaaaggcctctcccacgaggacacactgggtgcctcaagcagacaagaggcgccggagccttccctcctcttacagacctgcccagccaagcccctctgctgtgcagacgccccccagcccacctgtgagccccagggtgctaagcccacccaccacaaagcggcgaacttccccaccgcaccagcccaagttgcccaaccctccccccgagagtgcacctgctcagtgcaaggtccccagccccccaacccagcacccagaagcaagcccccctttctcgattccctccccatcacccccaatgtccccttctcaggagcacaaggaaacaagagactctgaagacagccaagcagtcatagccaaagtgtctgggaacacacattccatattctgcccagctacctcctctctgtttgaagctaaaccgccactctcaacagcccacccactgaccccaccatcgctgccgccagaggctgggggccctctcgggaacccagcagaatgctggaagaacagctcagggccttggctgagagcagactcgcagcggagagcagctctgtgtgccctcaaccctctgcctttcctcaggaggacagcttctgaccgccagccaggtggccgaccgcagcctcccaccttggaccccaccagcacctcttatgaatcccagctcggccagaacaggtaa

SEQ ID NO: 153054 - DNA, 1075 bp, Homo sapiens
  misc_feature (1)...(1075): n = a,t,c or g
cccacgcgtccgcctaatttccactccccccaccccacttcgcctgccgcggtcgggtccgcggccttgcgctgtagcggtcgccgccgttccctggaagtagcaacttccctaccccaccccagtcctggtccccgtccagccgctgacgtgaagatgagcagctcagaggaggtgtcctggatttccctggttctgtgggctccgtggcaatgaattcttctgtgaagtggattgaagactaccatccagggacaaattttaatcttacctgacctcaataagcaggttccctcactatcggacaagctctaaaccatgatccctggaccctgagcctgattgaagaacttggaagacaaccccaacccagagtgaccttgattgagcaggcagccgagatgcttttatgggatttgatccacggcccgttacattcctttaccaacccgtnggcatcgccccagatgtttgggaaaagttcccagcaagggagactttgggttactgttcctcgtgtgtactgtgagaacccagccaattgctttcccattggcctttcagacatccccaggtgaagcccatggtgaaagctcctactgcccccaagtgccatggatgtgtaacacaccccaagtcaatcaagacaaccatcaacacggatgggcgcctaacttcgggcaactggtttcccttcacatggctctttcatggtggcaatccccgagttaccgggcccaaagagacctgcccaacccagttttgttgcccagggtttttacggggtttcaagatccattccgatggcctacccagctggcagcttccaaggccggccagcaactttcaagaagccccagttcaagacggattcgctgattccctcccccacctgtcctgcagtcttttgtcttttcctttcttttttgccaaccctttcaggaaccctgtatggtttttagtttaaattaaaggagtcgttattgtggtgggaaatatgaaataaagtagaagaaaaggcaaaaaaaaaaaaaaaaaaaaaaaggggggggccttttaaaagaaacccattttc

SEQ ID NO: 153055 - DNA, 438 bp, Homo sapiens
ggccctggatccggcgtcagggcgacctggcggacgaggcgcgatgaaggcactgatcttagtggggggctatgggacgcggctacggccgctgacgctgagcaccccgaagccactggtggacttctgcaataagcccatcttgctgcaccaagtggaggcgctagccgcggcaggcgtggaccacgtgatcctggccgtgagctacatgtcgcaggtgctggagaaggaaatgaaggcacaggagcagaggctgggaatccgaatctccatgtcccatgaagaggagcctttggggacagctgggcccctggcgctggcccgtgacctactctctgagactgcagaccctttcttcgtcctcaacagtgacgtgatctgcgaattcccctttcaagccatggtgcagtccacccgcacctatggcaggagggctcc

SEQ ID NO: 153056 - DNA, 309 bp, Homo sapiens
atggaataataatttaatgctcactgtggccctgactgaaagtcaagctcaggcacaattagggccatggctgggctcccaccaatgaggatacaggcaggcaaggaggttggatgtggtggtgtgggatacaggagaagggcaaagggagctcataaatagggcccagcctggctctgggttcaaaggtgtttttgcagaagaagcagtccttgttgttcatcaggtgctggttgatacaggctttgcaggacttgtggccacagggctggaacacagcagagatggggtgggcatagcagatggggc

SEQ ID NO: 153057 - DNA, 2695 bp, Homo sapiens
atgggtcctggatctggacctggagccctgccgaaaactgggggaacaaccagtccaaagcatggcagagcagaacatcaggcagcatcgaaggctgctgccaagccaaagaccatgccgaagaaagggccatctgcccactgtgccaagccgagctcaacgctgggcagcaagagcccagccaactataacacatgcaccacctgcaggctccaggtgtgcaacctgtgtggcttcaacccaacaccccacctggtggagaaaaagcctcctactttccgggtgaccgtagagggcagtttgacaagtctcagccccgggcgatggaagaatttgcccgtgggaccgtcacgaagcaccggtcatctccccgcgcccggctttcgggtcctcaggcctcgctcacaggaggcaaagagtccgaaggtggagctgcacagccactcagaggtccctttccagatgctagatggcaacagtggcttgagttctgagaagatcagccacaacccctggagcctgcgttgtcacaagcagcagctgagccgcatgcgctccgagtccaaggaccgaaagctctacagtatcctcgttgcccctccttcaggagtgtctactgggcgcgatgaaggcactgatcttagtggggggctatgggacgcggctacggtcgtgacgctgagcaccccgaagccactggtggacttctgcaataagcccatcttgctgcaccaagtggaggcgctagccgcggcaggcgtggaccacgtgatcctggccgtgagctacatgtcgcaggtgctggagaaggaaatgaaggcacaggagcagaggctgggaatccgaatctccatgtcccatgaagaggagcctttggggacagctgggcccctggcgctggcccgtgacctactctctgagactgcagaccctttcttcgtcctcaacagtgacgtgatctgcgatttccccttccaagccatggtgcagttccaccggcaccatggccaggagggctccatcctggtgaccaaggtggaggaaccctccaagtacggtgtggtggtgtgtgaggctgacacaggccgcattcaccggttcgtggagaagccacaggtgtttgtgtccaataagatcaacgcaggcatgtacatcctgagccctgcagtgctgcagcgcatccagctgcagcctacgtccattgagaaggaggtcttccccattatggccaaggaggggcagctatatgccatggagttacagggcttctggatggacattgggcagcccaaggacttcctcactggcatgtgcctcttcctgcagtcactgaggcagaagcagcctgagcggctgtgctcaggccctggcattgtgggcaacgtgctggtggacccaagtgcccgcatcggccagaactgcagcattggccccaatgtgagcctgggacctggcgtggtggtcgaagatggtgtgtgtatccggcggtgcacggtgctgcgggatgcccggatccgttcccattcctggcaagagtcctgcattggagggtcaggtgggagctggaagttgctcacaattgaccaggacctcatggtggcacagttttccacacccagcctacctccaaccctgaaagttgggttcctgccttctgcagggaaggagcagtcagtgttgtgggtgtccctggaggaggccgagcccattcccgacatccactggggcatccgggtgctacagccacctcccagagcaagagaatgtgcagaggtacgcatggagaacgtgacagtgctgggtgaggacgtcatagttaatgatgagctctacctcaacggagccagcgtgctgccccacaagtctattggcgagtcagtgccagagcctcgtatcatcatacacgatggtggttttgcagaagaagcagtccttgttgttcatcaggtgctggttgatacaggctctacaacaggggaggggatgaggactgccctgcatgtacctactgctctccccaccaccaagctgtggggcccactacttgcggacttgtgggcacagggctgggacacagcagagatggggggaggcagctgctgcctgggcagatgcagaggtcaggtgcgccaggatctgttccaattgggccagctcatcggcactgatataatccgcatctggggagtggtaggtagtgtcaagtcagaggtagctgaggatgtgatgcctcttgaatattcccagcctacgactttgctgttcttaaggctgctgacccgacccagccccagatttccctgacctgccccaccagcccactcacagctctgcaaggagaagcgcttccggtcaggggctggcagagcagtgccaggtgctgggggctctggctgtcccaggagatagcatattgagcgtagctggaaaccagggatctgccaggagcactgatgtggcttgctctctcctaggtaggggagggtgcaagggcagtcagaaggcttggggcctggctaaaagtctctcttgggattgccaatgaggagtgccatggctcgtacatgatcaccccccctgcatcctttccgtctccctgcttcccaaaccccaagtcctgtattctagtaaggtgccacacagcctgtttttttttttttttctcgagactccatctcaaaaaaaaaataaaaaa

SEQ ID NO: 153058 - DNA, 2621 bp, Homo sapiens
  misc_feature (1)...(2621): n = a,t,c or g
cggacgcgtggggccagcagccgtcttttcggtttcgcgttctgtgttgtggcggccctggatccggcgtcagggcgaccgggcggacgaggtggagccagagtctgtcaggcgggttggtgaagggcgcggggccgggcacggcgttgggagtgcgcggcagggaccggccaggcgggctgcaggcacctcagagcccgggacaccccctcaacgtccgcaggcgcgatgaaggcactgatcttagtggggggctatgggacgcggctacggccgctgacgctgagcaccccgaagccactggtggacttctgcaataagcccatcttgctgcaccaagtggaggcgctagccgcggcaggcgtggaccacgtgatcctggccgtgagctacatgtcgcaggtgctggagaaggaaatgaaggcacaggagcagaggctgtgaatccgaatctccatgtcccatgaagaggagacctttgggaacagttgggcccttgccgctggcccgtgacctactctctgagactgcagaccctttcttcgtcctcaacagtgacgtgatctgcgatttccccttccaagccatggtgcagttccaccggcaccatggccaggagggctccatcctggtgaccaaggtggaggaaccctccaagtacggtgtggtggtgtgtgaggctgacacaggccgcattcaccggttcgtggagaagccacaggtgtttgtgtccaataagatcaacgcaggcatgtacatcctgagccctgcagtgctgcggcgcatccagctgcagcctacgtccattgagaaggaggacttacccattatgggcaaggaggggcagctatatgccatggagttacagggcttctggatggacattgggcagcccaaggacttcctcactggcatgtgcctcttcctgcagtcactgaggcagaagcagcctgagcggctgtgctcaggccctggcattgtgggcaacgtgctggtggacccaagtgcccgcatcggccagaactgcagccattggccccaatgtgagcctgggacctggcgtggtggtcgaagatggtgtgtgtatccggcggtgcacggtgctgcgggatgcccggatccgttcccattcctgggcttgagtcctgcattgtgggctggcgctgccgcgtgggtcagtgggtacgcatggagaacgtgacagtgctgggtgaggacgtcaatagttaatgatgagctcctacctcaacggagccagcgtgctgccccacaagtctattggcgagtcagtgccagagcctcgtatcatcatgtgaggggatgcagtggggctggccgagccccggttttcccatcagcaaggggagtgcctggacctgacacatcagaaagaccgctggacttgtcattatttgtctggggggcactgggtgaagctgaagctgttggacacctgccttctcatgtggacatcatctggcaggatccctgctgggcacacccccacaaaccccactccctcaagaagggccagggccagggctgtatggaataataatttaatgcctcaactgtggcccctgactgaaagtccaagctcaggccacaatttagggccatggctgggctcccaccaatgaggatacaggcaggcaaggaggttggatgtggtggtgtgggatacaggagaagggcaaagggagctcataaataaggccccaacctgggctcctgggttcaaagggtggaggttccagggatgggcacaggctgtgagggctaggcagctgaggaagggtagtactcgtattggcctcccttctcccagtcctctacagacacgaatggtggttttgcaaaaaaaacaaacccttgtttgtttcatcagggtgctgggttgatacaggctttgcaggacttgtgggccacagggctgggaacacagcagagatgggggtggggnatagcagaatgggggcagaggtcctcctcactggtgggcagggaaggcagctgctgcctgggcaaaatgcaaaaggtcaaggtgcgcccagcatctgttcccacttgggccaagctcatcggcactgatataattccgcatagctctgcagggagaagcgcttccggtcaggggctggcagagcagtgcccaggtgctgggggctctggctgtcccaggagatagcatattgagcgtagctggaagcagggatctgcccaggagcactgatgtggcttgctctctcctgtacgcgctggtgggtcggtccctgaggctttactgcaacaccagcgtcccggccatgcgcattgcctgggtttcgccgcagcaggagcttctcagggcgccaggatcccgcgatggcagcatcgcggtgctggccgacggcagcttggccataggcaacgtacaggagcagcatgcgggactcttcgtgtgcctggccactgggccccgcctgttcgccccaccctgccgctgctgccgccgtgcctgccgctgccgccgctggccccaaacacccagcccgctccaagagctgagcgcacagtcctcagtactcagcaccacaccgccagacgcacccagccgcaaggccagcgtccacaagcacgta

SEQ ID NO: 153059 - DNA, 395 bp, Homo sapiens; identical to SEQ ID NO: 134797
  misc_feature (1)...(395): n = a,t,c or g

SEQ ID NO: 153060 - DNA, 510 bp, Homo sapiens
gcacgtcttcattgatctccccacgctgcaggagaggcgggagatttttgagcagcacctgaagagcctgaagctgacccagtccagcaccttttactcccagcgtctggcagagctgacaccaggattcagtggggctgacatcgccaacatgtgcaatgaggctgcgctgcacgcggcgcgggagggacacacttccgtgcacactctcaacttcgagtacgccgtggagcgcgtcctcgcaggtacagggggcgcgccctgggtgaaggccctccttagcagggcttgaaccccagaaatacccaggcaggtattgagaggtgaggtggatggaaccatcacacaggaaggaacacacgttgcgtttcagttctgcgtaactcatgtctttatgataccttgtacttttccttagtttaaaatatcacagatttacctaagagtagacgctcgtccaacagaaataaaaaatgccttgccaaagaaagtgaaaaaaaaaaaaaaaaa

SEQ ID NO: 153061 - DNA, 2982 bp, Homo sapiens
tttcgtcttgtggcctggggggccagcacggcctcggcgctgcccgtgtgcggagcctctttaaggaagcccgagcccgggccccctgcatcgtctacatcgatgagatcgacgcggcgggcaagaagcgctccaccaccatgttcggcttctccaacacggaggaggagcagacgctcaaccagcttctggtagaaatggatgtgttctacgcaaaaatagaagagctgaaactggtaaatagaagagctgaaactggtgtatccttatcacggtgttctacgcagaaatagaagagctgaaactggtgtatccttatcacggtgttctacgcagcaatagaagagctgaaactgatgtatccttatcatggtgttctatgcagcagtagaaggaaactttcttcctgcagcaacaaggaaatgacgcaaagtgagaagagccaggcttagtatcgtatgactccacttggaatgggtaccacagaccatgtcatcgtcctggcgtccacgaaccgagctgacattttggacggtgctctgatgaggccaggccgactggaccggcacgtcttcattgatctccccacgctgcagagaaagggtgttgcgctgtcacccaggctggagtgcagtgctgcgatcaccactcactgcggcctcaaccttcagggctcaagctgaggagctaggactactatgggcgtgcgccgccgtgctggttaatttttaacagagtctcgctgtgttgccaaggctggagtgcaggccgcgatctcggctcactgcaaccaccatctcccaggagaggcgggaagatttttgagcagcacctgaagagcctgaagctgacccagtccagcaccttttactcccaacgtctggcagagctgacaccaggattcagtggggctgacatcgccaacatctgcaatgaggctgcgctgcacgcggcgcgggagggacacacttccgtgcacactctcaacttcgagtacgccgtggagcgcgtcctcgcaggtccccayggctttcagctttgggaaagcagtgggttcctgccagaggagtgggggcagctgctgtgccagacactgcaaaacacacctggcttctctccgacagccctgcggggtcgagaggactggcgctgcctgtgtcttactgaaaatttattttcgtgtaaccatttacttttatgtggaaatcgaaaagctttttataatagtagcaaagcaggaaggactgagtgggaaccacaagccagttgaaagaaaatacatgacgtacttgagtgctcaggaccacgagctgattcaagttgtacagaatggacacttacagatgtgtggaaaatctgagacaggaaatgaagcctcaccaggactgccaaaaagagcaagatcctgtccaaggaagaacagaaagtggttgcgtttcatgagtcgggccacgccttggmgggctggatgctggagcacacgaggccgtgatgaaggtctccataaccccctcggacaaaacgccgccctgggctttggtcagattgctccccaaagaccagcacctcttcacccaaggagcagctttgagcggaggttcattgccctgggaggacgggcctcgggaacacttttccctcaacgaggtcacttcctggggcacaggacgacctgaggaaggtcacccccatcgcctactccatggtgaagcaggttgggatggcacctggcatcgggcccatctccttccctgaggcgcaggagggcctcatgggcatcgggcggcgccccttcaaccaaggcctgcagcagatgatggaccatgaagcaagactgctggtggcccaaggcctacagacacaccgagaaggtgctgcaggacaacctggacaagttgcaggcgctggcaaacgcccttctggaaaaggaagtgataaactatgaggacattgaggctctcattggcccgccgccccatgggccgaagaaaatgatcgcaccgcagaggtggatcgacgcccaggaggagaaacaggacttgggcgaggaggagaccgaagagacccagcagcctccacttggaggcgaagagccgacttggcccaagtagttgggaggtgttggctgcacgtgcgggtggtccgggaagtgagggctcactcagccaccctgagttgcttttcagctgaggtttgcacttcctctcgcggccctcagtagtccctgcacagtgacttctgagatctgttgattgatgacccttttcatgattttaagtttctctgcagaaactactgacggagtcctgtgtttgtgagtcgtttcccctatggggaaggttatcagtgcttccccgaggtgagcatggaacacttcggagttcccaggggttatagacagtcgttccccaagtttggctgaggcccaccccagaggccagccagagccattcagactccaaaacagaccccctgttccatgcccgaacgcttgcacggaccgcccccaagttccttgtggctccctcgggaatgcttaaggggatcggacatgaaaggaccctgggagcacgattgtcctatctcccagcggccctgtcatcccagctcactcatcaatggggccacacagtcaggcccaggcactgggctccggaggactcaccactgccccctgctgccaatgtggactggtgcaagttgaggacttcttgcctggtctaatcaccgcatgcagtgttggggatgcctttggtttttactgctctgagaattgttgagatactttactaataaactgtgtagttggaaaatctaagaaacaaaaaacaattaataatgaaagggggggggccctttttaaagattccttgggggggccaaatttaacgggggttggaaagatttaatttttttctttaaagggggcccaataaaaaccaacctgggaatttttgggaagaaccttttttttgggggggg

SEQ ID NO: 153062 - DNA, 3146 bp, Homo sapiens
ctttcaggccaacatggccgtgctgctgctgctgctccgtgccctccgccggggtccaggcccgggtcctcggccgctgtggggcccaggcccggcctggagtccagggttccccgccaggcccgggagggggcggccgtacatggccagcaggcctccgggggacctcgccgaggctggaggccgagctctgcagagcttacaattgagactgctaacccctacctttgaagggatcaacggattgttgttgaaacaacatttagttcagaatccagtcagactctggcaacttttaggtggtactttctattttaacacctcaaggttgaagcagaagaataaggagaaggataagtcgaaggggaaggcgcctgaagaggacgaagaggagaggagacgccgtgagcgggacgaccagatgtaccgagagcggctgcgcaccttgctggtcaatcgcggtggtcatgagcctcctgaatgctcttcagcaccagcggaggcagcatttcctggaacgactttgtccacgagatgctggccaagggcgaggtgcagcgcgtccaggtggtgcctgagagcgacgtggtggaagtctacctgcaccctggagccgtggtgtttgggcggcctcggctagccttgatgtaccgaatgcaggttgcaaatattgacaagtttgaagagaagcttcgagcagctgaagatgagctgaatatcgaggccaaggacaggatcccagtttcctacaagcgaacaggattctttggaaatgccctgtactctgtggggatgaccgcagtgggcctggccatcctgtggtatgttttccgtctggccgggatgactggaagggaaggtggattcagtgcttttaatcagcttaaaatggctcgtttcaccattgtggatgggaagatggggaaaggagtcagcttcaaagacgtggcaggaatgcacgaagccaaactggaagtccgcgagtttgtggattatctgaagagcccagaacgcttcctccagcttggcgccaaggtcccaaagggcgcactgctgctcggcccccccggctgtgggaagacgctgctggccaaggcggtggccacggaggctcaggtgcccttcctggcgatggccggcccagagttcgtggaggtcattggaggcctcggcgctgcccgtgtgcggagcctctttaaggaagcccgagcccgggccccctgcatcgtctacatcgatgagatcgacgcggtgggcaagaagcgctccaccaccatgtccggcttctccaacacggaggaggagcagacgctcaaccagcttctggtagaaatggatggaatgggtaccacagaccatgtcatcgtcctggcgtccacgaaccgagctgacattttggacggtgctctgatgaggccaggccgactggaccggcacgtcttcattgatctccccacgctgcaggagaggcgggagatttttgagcagcacctgaagagcctgaagctgacccagtccagcaccttttacttcccaacgtctggctgagctgacaccaagattcagtgtggctgacatcgccaacatctggcaatgaggctgcgctgcacgcggcgcgggagggacacacttctcgtgcacactctcaacttcgagtacgccgtggagcgcgtcctcgcagggactgccaaaaagagcaagaatcttgtccaaggaagaacaagaaagtggttgcgtttcatgagtccggcccaccccttggtgggctggatgctggagcacacggaggccgtgatgaaggtctccataacccctcggacaaacgccgccctgggctttgctcagatgctccccagagaccagcacctcttcaccaaggagcagctgtttgagcggatgtgcatggccttgggaggacgggcctcggaagcactgtccttcaacgaggtcacttctggggcacaggacgacctgaggaaggtcacccgcatcgcctactccatggtgaagcagtttgggatggcacctggcatcgggcccatctccttccctgaggcgcaggagggcctcatgggcatcgggcggcgccccttcagccaaggcctgcagcagatgatggaccatgaagcaagactgctggtggccaaggcctacagacacaccgagaaggtgctgcaggacaacctgggacaagttgcaggcgctggcaaacgcccttctggaaaaggaagtgataaactattgagggacattgaggctctcattggcccgccgccccatgggccgaaggaaaatgatccgcaccgcagaggtgggatccgacgcccagagggagaaacagtacttggggcgaggaggagaccgaagagacccagcagccttcacttggaggcgaagagccgacttggcccaagtagttgggaggtgttggctgcacgtgcgggtggtccgggaagtgagggctcactcagccaccctgagttgcttttcagctgaggtttgcacttcctctcgcggccctcagtagtccctgcacagtgacttctgagatctgttgattgatgacccttttcatgattttaagtttctctgcagaaactactgacggagttctgtgtttgtgagtccgtttcccctatggggaaggttatcagtgcttcccgagtgagcatggaacacttcgagttccccaggggttattagacagtccgttccccagtttggcttgaaggccacccaagaggcagcagagcattcaagcctcccaaacagaccccctgtttcatgccgacggtttgcacgaaccgccccagttcctgtggctccctcggaatgctaaggggatcggacatgaaaaggaccctgtgaagccgattgtcctatctccaagccggccctgtcatccagctcactcatcaatggggccacacagtcagcgccaaggcacttgggttccggaagacttcaccacttgccccctgctggccaatgttgggacttggtgcaaagtttgaggacttctttgctggtctaagtcacgcatgcagtgtttggggatgccttagtttttactgctctgagaattgttgagatactttacttaataaactgtgtagttggaaaatctaaaaaaaaaaaaaaaaaaa

SEQ ID NO: 153063 - DNA, 395 bp, Homo sapiens
tgcgaaggcaactccacgtgctcagagaacgaggtgtgcgtgaggcctggcgagtgccgctgccgccacggctacttcggtgccaactgcgacaccaagtgcccgcgccagttctggggccccgactgcaaggagctgtgtagctgccacccacacgggcagtgcgaggacgtgacaggccagtgtacttgtcacgcgcggcgctggggcgcgcgctgcgagcatgcgtgccagtgccagcacggcacgtgccacccgcggagcggcgcgtgccgctgtgagcccggctggtggggcgcgcagtgcgccagcgcgtgctactgcagcgccacgtcgcgctgcgacccacagaccggcgcctgcctgtgccacgcaggctggtggggccgcagctg

SEQ ID NO: 153064 - DNA, 3658 bp, Homo sapiens
atggagggcgcagggccccggggggccgggccggcgcggcgccggggagccggggggccgccgtcaccgctgctgccgtcgctgctgctgctgctgctgctctggatgctgccggacaccgtggcgcctcaggaactgaaccctcgcggccgcaacgtgtgccgtgctcccggctcccaggtgcccacgtgctgcgctggctggaggcagcaaggggacgagtgtgggattgcggtgtgcgaaggcaactccacgtgctcagagaacgaggtgtgcgtgaggcctggcgagtgccgctgccgccacggctacttcggtgccaactgcgacaccagtgagcgtggggtcgggccggtattggtcggtggggcggaatcctggagagatggggcggggtccaaggtggggcggggtcggatccgccttcggggcgggtccccagaggtggcggctggagtgcgggacgcgggcaggttccggctggctgggggcacctactcaagcaccggggccttccaccccctccgctcctcccctgcagagtgcccgcgccagttctggggccccgactgcaaggagctgtgtagctgccacccacacgggcagtgcgaggacgtgacaggccagtgtacttgtcacgcgcggcgctggggcgcgcgctgcgagcatgcgtgccagtgccagcacggcacgtgccacccccggagcggcgcgtgccgctgtgagtccggctggtggggcgcgcagtgcgccagcgcgtgctactgcagcgccacgtcgcgctgcgacccacagaccggcgcctgcctgtgccacgcaggctggtggggccgcagctgcaacaaccagtgcgcctgcaactcgtctccctgcgagcagcagagcggccgctgtcagtgccgcgagcgtacgttcggcgcgcgctgcgatcgctactgccagtgcttccgcggccgctgccaccctgtggacggcacgtgtgcctgcgagccgggctaccgcggcaagtactgtcgcgagccgtgccccgccggcttctacggcttgggctgtcgccgccggtgtggccagtgcaagggccagcagccgtgcacggtggccgagggccgctgcttgacgtgcgagcccggctggaacggaaccaagtgcgaccagccttgcgccaccggtttctatggcgagggctgcagccaccgctgtccgccatgccgcgacgggcatgcctgtaaccatgtcaccggcaagtgtacgcgctgcaacgcgggctggatcggcgaccggtgcgagaccaagtgtagcaatggcacttacggcgaggactgcgccttcgtgtgcgccgactgcggcagcggacactgcgacttccagtcggggcgctgcctgtgcagccctggcgtccacgggccccactgtaacgtgacgtgcccgcccggactccacggcgcggactgtgctcaggcctgcagctgccacgaggacacgtgcgacccggtcactggtgcctgccacctagaaaccaaccagcgcaagggcgtgatgggcgcgggcgcgctgctcgtcctgctcgtctgcctgctgctctcgctgctcggctgctgctgcgcttgccgcggcaaggaccctacgcgccgaccccgccccgcagggagtttcgcttgggaggaagaaggcgccgcaccgactatgcgggcgcttcagtcgcatcagcatgaagctgccccggatcccgctccggaggcagaaactacccaaagtcgtagtggcccaccacgacctggataacacactcaactgcagcttcctggagccaccctcagggctggagcagccctcaccatcctggtcctctcgggcctccttctcctcgtttgacaccactgatgaaggccctgtgtactgtgtaccccatgaggaggcaccagcggagagccgggaccccgaagtccccactgtccctgccgaggcgccggcgccgtcccctgtgcccttgaccacgccagcctccgccgaggaggcgatacccctccccgcgtcctccgacagcgagcggtcggcgtccagcgtggaggggcccggaggggctctgtacgcgcgcgtggcccgacgcgaggcccggccggcccgggcccggggcgagattgggggcctgtcgctgtcgccatcgcccgagcgcaggaaaccgccgccacctgaccccgccaccaagcctaaggtgtcctggatccacggcaagcacagcgccgctgcagctggccgtgcgccctcaccaccgccgccaggctccgaggccgcgcccagccccagcaagaggaaacggacgcccagcgacaaatcggcgcatacggtcgaacacggcagcccccggacccgcgacccaacgccgcgccccccggggctgcccgaggaggcgacagccctcgctgcgccctcgccgcccagggcccgagcgcgcgccgcgccccggcctcttggagcccacggacgccggcggtcccccgcgaagcgcgccgaggctgcctccatgttggccgctgacgtgcgcggcaagactcgcagcctgggccgcgccgaggtggccctgggcgcgcagggccccagggaaaagccggcgcccccacagaaagccaagcgctccgtgccgccagcctcgcccgcccgcgcgcccccagcgaccgaaaccccggggcctgagaaggcggcgaccgacttgcccgcgcctgagaccccccggaagaagacccccatccagaagccgccgcgcaagaagagccgggacgactggtgcgagctgggcagggcgggcgcacccaccctgtagcaggctgtggctcgtccgcgcgcagtccctcagcttcgcagcgccgcccgccaccccacacctcccacgctaccgggcacggcggcctcctattggccgggcaccgcgcggctagcggaggttgcgtctcattggctcaggtcctgcagccgctcctggattggagcagtgtgctctcggcgggaagggcccatcccgttggtcgaggcctgacaggcgcttagcgggcgactccctccccattggccgagttatggagcgctccgaccagacagcgtctcattggccaaagatgggagggttccgcttaaagaccgcctcttactggccaggagtggacttggttagggctaccttctcattggttgcagccagaggcacttctgcccgggctgcctctcccccgctagggcctggtgcctctggctggaggctccctcccttggccgtcccaattagagcccggggctacttccactggccaggctcccgggcatctggttgacccccagcctggggaggagggcttggtctccgctcctcaggggcttagtccgtccccacccccttcccttgccctggcgccccggggcccaggcccctcaagctgtcagctggttttgatggcctcccactgccccacacgccgcgggacctccaggggcgactctagtggcctgaggagatgtatttataggcccccagcagggctgctcccccctcggccggtgccccaggatgggctcctcccggcgggggcttggccaaagctttcttaataaaatgcctttcccctcaaaaaaaaaaaaaaaaaaaaaaaaaaaagaaaaaagggcggcc

SEQ ID NO: 153065 - DNA, 1343 bp, Homo sapiens
tttccggcagaatggccttgcttgaggtttttgcaaatctctcgggtgtctggcttagagggaggcagctgggccctcatacctgcctccgcacttcagctgtttgacataaacccagcttcgtgtgagtgaaagggaagggcctggggaccctcagaggttctcggaccacacacttgagaacttctcgtctggaagacaggcctggggatgccatgtggggtgagggcttacgggcttggtgtcgctttgtggagaaccgctggtgtctgaagcgggtgtcagccccactgcaccttggtgcttctgggctgtcctgatgccgaggcccacttcccagccatgctgactttgcctctttcccctcccagcaagaaaaatggctacaaacttcctagcacatgagaagaatttggtcgacaagttcaaatatgacgacgcagaaaggagattctacgagcagatgaacgggcctgttgcaggttgccttcccgccaggagaacggcgccagctgtgatcctccgtgacattgcgagagccagagagaacatccataaatccctggctggaagctcaggccccggggcctccagcggcaccagcggagaccacggggagctcgtcgtccggattgccagtctggaagtggagaaccagagtctgcgtgggcgtggtacaggagctgcagcaggccatctcaagcctggaggcccgggctgaacgtgcttgaaaaagacttggcctggcccaccgggccacgggcccacaggacccagcacgtatctcccatgcgccaaagtggagccccccagcccaagaagcccacccacaccagcagagggaatgcgagggatgatgacattgccctgttttggcagtgacaatgaaggaggaggacaaaggaggcggcacaagcttgcgggaggaagcgggtttcgggagttcccgggggaaaaaaggcccaaaaaaccgcgcttggtgggcccagctctccttcttgttgggttgaaacccttgggaatagataaaaggacatggctcagctggaggcctgtgtgcgctctatccagccggaacgggtcgttcttggggggcttccaagcttggtgccccgtgggctacgggtatccggaaagctacagattcagtgtgtggtggaggacgacaaggtggggacagacttgctggaggaggagatcaccaagtttgaggagcacgtgcagagtgtcgatatcgcagctttcaacaagatttgaagcctgagtgtgtgtacgttgcgcacgtgcgtgaaggccctgccacgattaaagacttgagaccggcaaaaaaaaaaaaaaaaaaa

SEQ ID NO: 153066 - DNA, 477 bp, Homo sapiens
ggaaaaaccttcgacaccttctgccctctgggccctgccttggtgaccaaggacagtgtagcagatccacacaccttaaagatctgctgccgagtgaatgggaaagtggtccagagcggcaacaccaaccagatggtattcaagacagaggacctgatagcctgggtctcccagggatgtcatcctaactgggacccccccaggtgtcggtgtattcaggaaacctcctgtctttctcaagaagggggatgaagtccagtgtgagattgaagaactaggtgtcatcatcaacaaggtggtgtgatggctcctgcacaggccctgcacataggatgagggcatctgctcccactcagcctagcccagggaaaggcccagtgacaggtgtggacaggtgccagccctgcaagccgcctcttctcggtagaagggagaaggacagagctctcttcaataaattcgtcaggtcaaagcaaa

SEQ ID NO: 153067 - DNA, 930 bp, Homo sapiens
atggctctgggatcctccgtctcctggatcctgcatttttctctgcaggctctgatggtggtgtctggtagaaggttactcacagctctgctgcaggctcagaagtggccctttcaaccctccagagacatgagactagtgcagttctgggcaccccacctggtggggcctcacttgggcctggagacagggaatggtagagggattatcaacctcaatgcctttgaccccacactcccaaagacaatgacgcagttcctagagcagggagaggccaccctctcagtggcaagaagagccttggctgcccagttgccagtcctaccacggtcggaggtaaccttcctggctccagtcacatggccagataaggtggtgtgtgtgggcatgaattatgtggaccactgcaaagaacagaacgtgcccgtgcccaaggagcccatcatcttcagcaagtttgccagctccatcgtggggccctatgatgaggtggtcctcccaccacagagccaggaggtagattgggaagtggagctggccgtggtcattggaaagaaaggcaagcacatcaaggccacagatgccatggcccacgtggccggcttcactgtggctcatgacgtgagtgctcgtgactggctaacaagatgcaatgggaaacagtggctgctgggaaaaaccttcgacaccttctgccctctgggccctgccttggtgaccaaggacagtgtagcagatccacacaacttaaagatctgctgtcgagtgaatggggaagtggtccagagcagcaacaccaaccagatggtattcaagacagaggacctgatagcctgggtgtcccagaaacctcctgtctttctcaagaagggggatgaagtccagtgtgagattgaagaactaggtgtcatcatcaacaaggtggtgtga

SEQ ID NO: 153068 - DNA, 847 bp, Homo sapiens
caccgagcggcagtgacttcgccgctgctgtagttccccggctggatgcggtgactggtgccagtgctcaggcgcccgctgcccttgacctcccgccccgcgagccctaactcagcgcaggaggaccggttgccgccgccgccgccgccagagccttggctgcccagttgccagtcctaccacggtcggaggtaaccttcctggctccagtcacatggccagataaggtggtgtgtgtgggcatgaattatgtggaccactgcaaagaacagaacgtgcccgtgcccaaggagcccatcatcttcagcaagtttgccagctccatcgtggggccctatgatgaggtggtcctcccaccacagagccaggaggtagattgggaagtggagctggccgtggtcatttggaaaagaaaggcaagcacatcaaggtgaagtggaaagggtgggctcccagtccagagtgcagcagaggccccagctcctgcctctcctagttctgacctcactcaccaacacacggtgccagctgtccctgacactaggaagcagtcagcctccttgctccctgacactgcctttcccttcacccacctttggctggctctggctactaacatgggataacagcttagagatcccttgccataggtgttggtgtcacccatgatctaacctcctgtatggccaaatcccctgcccccataggccacagatgctatggcccacgtggccggcttcactgtggctcatgacgtgagtgctcgtgactggcaaatgagacgtaatgggaaacaatggctgctgtgaaaaaccttcgacaccttctgccctctgggccctgcctt

SEQ ID NO: 153069 - DNA, 758 bp, Homo sapiens
gataactccaaggttccatctttgcatttcagatccacacaacttaaagatctgctgccgagtgaatggggaagtcgtccagagcagcaacaccaaccagatggtattcaagacagaggacctgatagcctgggtctcccagtgagtgactagggctgtcctgtcagccccgctccacctgccacacatgtggaggctgacctgagccctccacctttggctgtggccactcagccagcccctggtctcactgggtccttttgctttgctccaggtttgttaccttttacccaggggatgtcatcctaactgggacccccccaggtgtcggtgtattcaggaaacctcctgtctttcctcaaggtaggtttagcgaaaagcaaagagagcaagggcccccaaagcccctggcaggcttgccctcagacttgagaagtacaggcttgtgtatgtgtgtctgacggaaagggctgacactgtcatggcctgctctgttgcagaagggggatgaagtccagtgtgagattgaagaactaggtgtcatcatcaacaaggtggtgtgatggctcctgcacaggccctgcacataggatgagggcatctgctcccactcagcctatcccagggaaaggcccagtgacaggtgtggacaggtgccagccctgcaagccgcctcttctcggtagaagggagaaggacagagctctcttcaataaattcgtcaggtcaaagcagcagctttgcttctgctgtttgtc

SEQ ID NO: 153070 - DNA, 1824 bp, Homo sapiens
  misc_feature (1)...(1824): n = a,t,c or g
tcaaatagaagtcgggccatggcacgccactgaggaccttccagcggtctcctgtgcacttaaacgaggtccagactcctttgtgggacaagtaaagctcttgatgatctggtccttgagtaatgtgggggccacttgtacagagcccctcacactgttcaaagtcggcagctgaagagctgagcagtagctgtctgtggagttcagctgccactccctacacgcctgccctctgcaggggatggagtcccgtttccccacttccccacctgcgcccagcagtgcaggtgaaggcctggctgcggagagtggctgggaaacgctgcgctaagggatcaggaatgccagctccactactcaccgcctgtgtcaccctgggaaaacagctctggccccaggttctccataagtaaaacagggtcactcatccctcccctccttaacgacatatgtcagaatcagaagccacaaatcattctctcccacccagcacgctgccttggtctcctagaccactttccccaacaatgggaaaggcgccaggcccagaacaaggccgagaccggatgaggccagcgaagcgcccagggacaaactttcaggcagcgcccactctcggtctcgggcaattgcaaggtacctccgagagcgaccgtctccagaaaacgcggccggcgcctgcctatgccctgagcctgaagagcccccggcgccgcccgccccgcactgggcccgcccctccgggattggtgccctgctaggggtggttgcctgtgacgtcaccggacgcgcccgcttctcgctggagtgcgcaccgagcggcagtgacttcgccgctgctgtagttccccggctggatgcggtgactggtgccagtgctcaggcgcccgctgcccttgacctcccgccccgcgagccctaactcagcgcaggaggaccggctgccgccgccgccgccgccaggaggtaaattgggaaggggagctggccggggtcattggaaaaaaaggcaagcccatcaaggccacagatgctatgtgcccacgtgggcgggcttcactgtggctcatgacgtgagtgctcgtgactggcaaatgagacgtaatgggaaacaatggctgctgggaaaaaccttcgacacgttctgccctctgggccctgccttgtgtgaccaagtgacaggtgtagcagatccacacaacttaaaagatctgctgcccgaatgaaatggggaaatggtcccagagcggcaaacacccaaccagatggtaatttcaagacagaggacctgaatagccctgggtctccccagtttggttacccttttacccccaggggatgtcattcctaacttgggacccccccacctccacccaggtgtcggtgtattcaggaaacctcctgtctttcttcaagaagggggatgaagtccagtgtgagattgaagaactaggtgtcatcatcaacaaggtggtgtgatggctcctgcacaggccctgcacatacgatgagggcatctgctcccactcagcctaccccacggaaaggcccaccgacaggtgtggacaggagccagccctgcaagccgcctcttcttggtagaagggagaaggacagagctctcttctataaattcgtcaggtcaaagcngcnnnnnnnnnnnnnnnnnnnnnnnnnnnnnnnnnnnnnnnnnnnnnnnngnnnnnnnnnnnnngggggccgcggnnnnnnnnnnnnnnggggggggttattttttgggggggcggggggggttttaaaaaannnnnnnnnnnaaaaaccccgggggccccccaaatataattg

SEQ ID NO: 153071 - DNA, 1044 bp, Homo sapiens
  misc_feature (1)...(1044): n = a,t,c or g
cgcttaacctgagctgtgctgacgtggtctggcaccagatggatgagaacctgctggccacagagccaccaatggcgtggtggtcacgtggaacctgggccggccatcccgcaacaagcaggaccagctgttcacagaacacaagcgcacggtaaacaaagtctgcttccaccccaccgaagcccacgtgctgctcagtggctcccaggatggcttcatgaagtgctttgacctccgcagaaaggactctgtcagcaccttcttcgggccagtcggagagcgtgcgggacgtgcagttcagtatccgggactacttcaccttcgcctccaccttttgagaacgggcaatgttgcagctctgggacatccggcgtcccgaccggtgcgagaggatgttcacagcccacaacggacccgtcttctgctgcgactggcaccccgaggacaggggctggttggccactggagggcgcgacaagatggtgaaggtctgggacatgaccacgcaccgtgccaaggagatgcactgtgtgcagaccatcgcctcggtggcccgtgtggagtggggccagagtgccgccaccacctggccacgtgctccatgatggtggacacaacatctatgtttggacgtgcgccgcccttcgtgccagctgcatgtttgagacaccggacgtcacacgggattgctggngcaccccacgaccctcttctgtgtttggtcagacagtcgtggccagcctgttcggagcagcagccgggcgcgcacctgggccttgtacgccttgggactgctcgcgcaagaaccctggtcgatggggaagctacttggacgggccccctttttaagaaatggccgcaggcttaactccctccgcctagttttaaaacaagaggggaccgtttgtgcaaaaaattctcttgccgcgtgcgttgtacacagaaggggattccaagggaaggcatgtgttttccctctcccgcaccacagaggggtgtgcttctatatcatatcgtgtggagtgccagagtcaatcttctccg

SEQ ID NO: 153072 - DNA, 2806 bp, Homo sapiens
agccccgccgccctcagggctgacagtgtggacggcgggagtctcctcgctcccctgctgggattgactgaccgagcgtttagtgactgcccagatctggctgatggggccatggagaagatgtcccgtgtgaccacagccctgggtggcagcgtgctgacaggccgcaccatgcactgccacctggatgctcccgccaatgccatcagtgtgtgccgcgacgcagcccaggtgggtcgtggcagggccgtagcatcttcaagatctatgccatcgaggaggaacagttcgtggaaaagctgaacctgcgtgtggggcgcaagccttcgcttaacctgagctgtgctgacgtggtctggcaccagatggatgagaacctgctggccacagcagccaccaatggcgtggtggtcacgtggaacctgggccggccatcccgcaacaagcaggaccagctgttcacagaacacaagcgcacggtaaacaaagtctgcttccaccccaccgaagcccacgtgctgctcagtggctcccaggatggcttcatgaagtgctttgacctccgcagaaaggactctgtcagcaccttctcgggtgaggccacagaggcagggccacgggagtgggcgatggctgggtgcgttcctattctcccagtgctcagctgccgcatcctgaggctgcaccacagctttgctcatggaccgatgcaggatgcagaatctacggcaaatgacgcccgggaatcttggggatgtccactctaccctctgggcctctgttctgggccacaggcaggccagtcggagagcgtgcgggacgtgcagttcagtatccgggactacttcaccttcgcctccacctttgagaacggcaatgtgcagctctgggacatccggcgtcccgaccggtgcgagaggatgttcacagcccacaacggacccgtcttctgctgcgactggcaccccgaggacaggggctggttggccactggagggcgcgacaagatggtgaaggtctgggacatgaccacgcaccgcgccaaggagatgcactgtgtgcagaccatcgcctcggtggcccgtgtgaagtggcggccaaagtgccgccaccacctggccacgtgctccatgatgggggaccacaacatctatgtttgggacgtgcgccggcccttcgcgccagctgccatgtttgaggaacaccgatacgtcaccacgggaattgcctggcgccacccccacgacccctccttcctgctggctggctccaaggacagctttctgtttcagcacctgttccgcgacgcccggcaggccgtcaagcgcgccaaccctgagggcctctgctacggcctcttcggggacctggccttcgccgccaaggagagcctcgtggctgccgagtcggggcgcaagccctacactggcgaccggcgccaccccatcttctttaagcgcaagctggaccctgccgagcccttcgcaggcctcgcctccagtgccctcagtgtctttgagacggagccaggtggcggcggcatgcgctggtttgtggacacagctgagcgttatgcgctggctggccggccactggccgagctctgtgaccacaacgcaaaggtggctcgagagcttggccgcaaccaggtggcgcaaacgtggaccatgctgcggatcatctactgcagccctggcctagtgcccactgcaaacctcaaccacagtgtgggcaagggtggctcctgtggcctcccgctcatgaacagtttcaacctgaaggatatggccccagggttgggcagtgagacgcggctggaccgcagcaaaggagatgcacggagcgacacagttctgctcgactcctcggccacactcatcaccaatgaggataacgaggaaaccgagggcagcgacgtacctgccgactacctgctgggtgacgtggaaggtgaggaggacgagctgtacctgctggatccggaacacgcgcaccccgaggaccctgagtgcgtgctgccgcaggaggcctttccgctgcgccacgagatcgtggacacgcctcccgggcccgagcacctgcaggacaaggccgactccccgcacgtgagcggcagcgaggcggatgtggcctccctggcccccgaggactcctccttctcgctcctgtctgtctcacacgcgctctacgacagccgcctgccgcccgacttcttcggcgtgctggtgcgcgacatgctgcacttctacgctgagcagggcaccgtgcagatggctgtgtctgtgctcatcgtcctgggtgaacgggtgcgcaaggacatcgacgagcagacccaggagcactggtacacttcctacatcgacctgctgcagcgcttccgcctctggaacgtgtccaacgaggtggtcaagctgagcaccagccgcgccgtcagctgcctcaaccaggcctccaccaccctgcacgtcaactgcagccactgcaagcggcccatgagcagccggggctgggttctgcgacaggtggccacacgtgcgccagcatgtgtgccgtctgccaccacgtagtcaagggtctcttcgtgtggtgccagggctgcagccacggcggccacctgcagcacatcatgaagtggctggaaggcagcttcccactgttcccgcaggctgcggcccacctctgcgagtactcctgacggggcatctgctgggcttgcccgggcggccgcgtgcagaaccccgcctggtcttgtcccgagacgggcggaggctggaacttgagacctcaataaaggaagtagagccgc

SEQ ID NO: 153073 - DNA, 225 bp, Homo sapiens; identical to SEQ ID NO: 136291

SEQ ID NO: 153074 - DNA, 1380 bp, Homo sapiens; identical to SEQ ID NO: 136294

SEQ ID NO: 153075 - DNA, 2581 bp, Homo sapiens; identical to SEQ ID NO: 136295

SEQ ID NO: 153076 - DNA, 7046 bp, Homo sapiens
  misc_feature (1)...(7046): n = a,t,c or g
gtggagtgcgggcgccagagggtaggggtgaatggaatggaaacacagagggaactgtgaccagcacgtgcgatggtctctccacggcagacagagccctgcgtgggtgagaagcagactgcggaacaggatttggcttgatggccaccagctcttccacaaaaagggcgggtcatgaggaggctgtagccaaggacgaggtgtgtgcggctgttgcctggacgtttgtccaatccacgttgacatttgagggatcacagcgtgtgaaaatgaactcagaggagaattggtgaattcctatccagtgggcatcttcaaaccctggtcgacggcggaagaatatcaggtcctgagatcacccacccggcgcggcaacagtgcagagtggccacattctggtggaagaagaaaaaaatgtagtgtattgaattcaatcaagtgtttgcatctttcaagctatcaacaaaattccatcaagaaaggttccagttggtctcacagacgtatggatatccgaggagccacctaaagatggagaaatcaaggcatagagagattaagtgactttgccacagtcacaagctggagaggaccaggagtagagcttagagcgagcccctgactctgggcctgcgtcctgccaggagtcacgctgcctccgttcctaggagagaagacttcctgtaagatggaggtggacaccgaggagaagcggcatcgcacgcggtccaaaggggttcgagttcccgtggaaccagccatacaagagctgttcagctgtcccacccctggctgtgacggcagtggtcatgtcagtggcaaatatgcaagacacagaagtgtatatggttgtcccttggcgaaaaaaagaaaaacacaagataaacagccccaggaacctgctcctaaacgaaagccatttgccgtgaaagcagacagctcctcagtggatgagtgtgacgacagtgatgggactgaggacatggatgagaaggaggaggatgagggggaggagtactccgaggacaatgacgagccaggggatgaggacgaggaggacgaggagggggaccgggaggaggaggaggagatcgaggaggaggatgaggacgatgacgaggatggagaagatgtggaggatgaagaagaggaagaggaggaggaggaggaggaggaagaggaagaagaaaacgaagaccatcaaatgaattgtcacaatactcgaataatgcaagacacagattttggatgataacaataatgacgaatatgacaattacgatgaactggtggccaagtcattgttaaacctcggcaaaatcgctgaggatgcagcctaccgagccaggactgagtcagaaatgaacagcaatacctccaatagtctggaagacgatagtgacaaaaacgaaaacctgggtcggaaaggtgagttgagtttagacttagacagtgatgttgttagagaaacagtggactcccttaaactattagcccaaggacacggtgttgtgctctcagaaaacatgaatgacagaaattatgcagacagcatgtcgcagcaagacagtagaaatatgaattacgtcatgttggggaagcccatgaacaacggactcatggaatttatggtgtaggagagcgatgaggaggtgtgtcggagcagtctggagtgtttgaggaatcactgcttctacctggccaggaagctcagtgagaccaacccgcaggagaggaatccgcagcagaacatgaacatccgtcagcatgtccggccagaagaggacttcccaggaaggacgccggacagaaactactcggacatgctgaacctcatgcggctggaggagcagttgagcccccggtcgagagtgtttgccagctgtgcgaaggaggatgggtgtcatgagcgggacgacgataccacctctgtgaactcggacaggtctgaagaggtgttcgacatgaccaaggggaacctgaccctgctggagaaagccatcgctttggaaacggaaagagcaaaggccatgagggagaagatggccatggaagctgggaggagggacaatatgaggtcatatgaggaccagtctccgagacaacttcccggggaggacagaaagcctaaatccagtgacagccatgtcaaaaagccatactatggtaaagatccctcaagaacagaaaagaaagagagcaagtgtccaacccccgggtgtgatggaaccggccacgtaactgggctgtacccacatcaccgcagcctgtccggatgcccgcacaaagatagggtccctccagaaatccttgccatgcatgaaagtgtcctcaagtgccccactccgggctgcacggggcgcgggcatgtcaacagcaacaggaactcccaccgaagcctctccggatgcccgatcgctgcagcagagaaactggccaaggcacaggaaaagcaccagagctgcgacgtgtccaagtccagccaggcctcggaccgcgtgctcaggccaatgtgctttgtgaagcagctggagattcctcagtatggctacagaaacaatgtccccacaactacgccgcgttccaacctggccaaggagctcgagaaatattccaagacctcgtttgaatacaacagttacgacaaccatacttatggcaagcgagccatagctcccaaggtgcaaaccagggatatatcccccaaaggatatgatgatgcgaagcggtactgcaaggaccccagccccagcagcagcagcaccagcagctacgcgcccagcagcagcagcaacctgagctgcggcgggggcagcagcgccagcagcacgtgcagcaagagcagcttcgactacacgcacgacatggaggcggcccacatggcggccaccgccatcctcaacctgtccacgcgctgccgcgagatgccgcagaacctgagcaccaagccgcaggacctgtgcgccacgcggaaccctgacatggaggtggatgagaacgggaccctggacctcagcatgaacaagcagaggccgcgggacagctgctgccccatcctgacccctctggagcccatgtccccccagcaacaggcagtgatgaacaaccggtgtttccagctgggcgagggcgactgctgggacttgcccgtagactacaccaaaatgaaaccccggaggatagacgaggacgagtccaaagacattactccagaagacttggacccattccaggaggctctagaagaaagacggtatcccggggaggtgaccatcccaagtcccaaacccaagtaccctcagtgcaaggagagcaaaaaggacttaataactctgtctggnctgccccctggcggacaaaagcattcgaagtatgctggccaccagctcccaagaactcaagtgccccacgcctggctgtgatggttctggacatatcaccggcaattatgcttctcatcggagcctttcaggttgcccaagagcaaagaaaagtggtatcaggatagcacagagcaaagaagataaagaagatcaagaacccatcaggtgtccggtccccgggtgcgacggccagggccacatcactgggaagtacgcgtcccatcgcagcgcctccgggtgccccttggcggccaagaggcagaaagacgggtacctgaatggctcccagttctcctggaagtcggtcaagacggaaggcatgtcctgccccacgccagggtgcgacggctcaggccacgtcagcggcagcttcctcacacaccgcagcttgtcaggatgcccgagagccacgtcagcgatgaagaaggcaaagctttctggagagcagatgctgaccatcaaacagcgggccagcaacggtatagaaaatgatgaagaaatcaaacagttagatgaagaaatcaaggagctaaatgaatccaattcccagatggaagccgatatgattaaactcagaactcagattaccacgatggagagcaacctgaagaccatcgaagaggagaacaaagtgattgagcagcagaacgagtctctcctccacgagctggcgaacctgagccagtctctgatccacagcctggctaacatccagctgccgcacatggatccaatcaatgaacaaaattttgatgcttacgtgactactttgacggaaatgtatacaaatcaagatcgttatcagagtccagaaaataaagccctactggaaaatataaagcaggctgtgagaggaattcaattcaggtctgaacagctgctgtagtgatgaaactcttgcttaaaaaggatgcctcttgttttttgctgctgtaacttaccagaaagtgttctatatttatttctgtttgaatttgaaacagtgttatgcttacaagacttcataatgattttatgtcttgctttaaagatagtacctgcagaatagtttttgaatacacccacattttgtacgtttccatgtaagctgacatagtgttctgccatgtaatgtttatagctgctgatgtatgcacatttgggggtatatctatttctgaagaggtaagctgatcaaaataaatagagtgtaaattctttttaatgctttagtgattaaatgttttagtattttgaactgaaatggacacacaaacacacacacgcacacacagacccacagctttgaatgatcatgttgtggctgagcagccgctttttagacgttatcattttgcctcatgttggaggactttatggaatttaagaaatacattttgtgtgcatattgtttcatagcaagaattcgttgcaaaaatgctttatttttgaacaatgcttggaaatattatgtgacttttttgtttgtttgttttaggaggatggtgtatggtgggggcaataaatgaggttttttgcattccaaggaaatggcatatggattaactgtaagaaatgaaataagtaatttattgtaagacaacatcaagccatggaaacttggcagaagattcaaagcagcttaaacagcacttttaaattaactcctaagcgttacatggttgtgactatggaaactccagttaagacaggatcttatcagaggtggacaacgtgaagatttccttttccattttcaataaactttggaacaaccttctcgtatctcccctagagtttcgtgcccctctgaactgtctgttattgcaatgtagtttatcaacagaatttgtgtgttttcgatttaagctaaaagataatttaagaacatttatttccccttttcactttaaaaaattatgattattcctattattgttatgaaccttcttattttacatttgagggataaaggcaaatgattttgtgagtcttctagttactggaccgagttttctgctggatctggtgggaaggcagctcggtaaagtttccctcctgctccccccgcccgactttgactctgaatcagcatttggtcctattcagaggactcttaccacgacgtttctgttctacacttgggtggagaccagttgaccatagagcatttgcagagcctcattgtttgatttcttgtgactattctaagaatgaatgcaatcagattttaaaagtaactaaatatacttcagcacttttttgctttaaactagatcatcttagacttgtttataccttccagatttgattgttttactcccaatgactgcactatatgtatgcataagaccacttttgagcgctgtgttcccccttctgagtagtcctttgacgacgtgttgtgttttctgatgttgacttgagttccatttagtagcatctcttccttccatgtcttgatgttatgcaggaagtacagacgtactttaaatttttgttatgaaataaaaaaaaagatgggttttgtaaaaataaaaaaaaaaatatttttagcagaacaggacttacagggtcattgtccccacaatgtgccagtcgactatttgcacttaccttgtcctatatatccgtacggaggtgtgcaattcctcgtgtcagtagccttgtgacactgaacctgggatggattatagaggagccctcacggctgatcaatgaatgttggcaaagggagactacagggatctcacgacggaatattctgatacaatacttcaacctcggtattatatatatgtgtataaatatatggtatatcccggcggcactttatactgtttcactgtacaaaagcttacagttttccacaaggactttaataactagctgggaaaagacgatgtaattatttcggggctctgcggaaccttctctgtacagcgccccctttctgttgtgctattggttgcagctgccatgctcagaatgcgttttgagagctgaagcaaggtgcttgcagtcacctgaggccgtccgtgtggcccagggccccagctgcctttagggcccccattgttcataacagcatatgcatttccccaccgcgttgtgtctgcagcttctttgccaatatagtaatgcttttagtagagtactagatagtatcagttttggattcttattgttatcaccctatgtaccaatggaaagggattttaagccacaaacctgctgctcatctaacgttggtacataatctcaaatcaaaagttatcctgtgactattatatagggatcacaaaagtgtccaccatattagaatgccgacccttccatatggattaattgtgaagtccatccagagtttaattaataacttattgttccatattcatttcctaagttaatttaagtaatcatttattaagacagaattttgtataaactatttattgtgccccactgtggaactgaagtttgatttatttttgtacctacacggcatgggtttgttgacactttaattttgctataaatgtgtggaatcacaagttgctgtgatacttcatttttaaattgtgaactttgtacaaattttgtcatgctggatgttaacacatcttactctaaataaacaaggtgttgccacatttgtagcacgaaggatctctaaaaaaaaaa

SEQ ID NO: 153077 - DNA, 568 bp, Homo sapiens; identical to SEQ ID NO: 119585

SEQ ID NO: 153078 - DNA, 700 bp, Homo sapiens
ggaattattcaggaccctgcactccgttctcggaagtgccaccgagaagcgccggcctcggggctggtctacagcggcccgggagaggctgtggtggccccgagcgcgagtgtgtaggtgacaggacagcggccaggcccgcccctcccctcgtgatggtcattgtcctccagagcagtgatggaggaaataccagcccaggaagcagcagggtcaccaagggtccagtttcagtctttggagacccagtctgagtgtctgtccccagagcctcagtttgtgcaggacaccgacatggaacagggactcactggggctccacctgttcctcaggtgcctgctcttccccgtgagggaagcccaggagaccaggcagctgcgctcttgacagccaggtaccaggagtttgtgacattcgaggatgtggctgtgcaccttactcgagaggaatggggataccttgaccctgttcagagggacctctacagagaagtgatgttagagaattatgggaacgtggtctcactgggcatacttctccgccttcccaccacccggattcatagtgtgaattcctgcccggccctgagtcatacccaggcaagtgctttctctggagaaacacttgccgtccttacagcaggaatctccaagagatggcccaagtatcggcttccccatcgatattgctcgtccctgg

SEQ ID NO: 153079 - DNA, 2925 bp, Homo sapiens
atggagggcagtgggaccggaaaaagacgtggaaaagctgcgaaaacgagccttcgaatcatggacgcgcgggcccagctcctcctccgagttcctcatccggggccgtcactcacatccggggccctcactcacatccgggaccctcatccggggctctcacccacatccgggaccctcatgcctgggcggaggagggggggccctcattcgggaccctgcactccgtcgccggaagtgccaccgagaagcgccggcctcggggctgtctacagcggcccgggagaggctgtggtggccccgagcgcgagtgtagcagtgatggaggaaataccagcccaggaagcagcagggtcaccaagggtccagtttcagtctttggagacccagtctgagtgtctgtccccagagcctcagtttgtgcaggacaccgacatggaacagggactcactggggctccacctgttcctcaggtgcctgctcttccccgtgagggaagcccaggagaccaggcagctgcgctcttgacagccaggtaccagagcagccaggatgtgttatttcaggagtttgtgacattcgaggatgtggctgtgcaccttactcgagaggaatggggatacctggaccctgttcagagggacctctacagagaagtgatgttagagaattatgggaacgtggtctcactgggatttccaatttccaagcctgatgggatctcccagctggaacaggatctacaggtctttgatctggaaactaagactagagaagtcttaagagatgactgctcagatggagagaccagagaagagaacaagctgttgattcctaagcagaaaatttcggaagaagtgcattcatacaaagtgagagtaggaagactcaaacacgatattacccaagttcctgagactagagaagtgtataagtctgaggacagattagaaagacttcaggaaattctaaggaaatttctgtacctggagagagagtttaggcaaataacaatcagcaaggaaaccttcaccagtgagaagaacaatgaatgtcatgaacccgaaaaaagcttcagtctggactctactattgatgcagatcagagagttcttagaatacagaataccgatgacaatgataagtatgacatgagcttcaaccagaattcagcctctggtaaacatgaacacttaaatctaacagaggattttcagagtagtgaatgtaaggaaagcttaatggatctctcccaccttaataaatgggagagcatccctaacactgagaaatcctataaatgtgatgtatgtgggaaaattttccatcagagctcagcccttactagacatcagagaatccatactagagagaagccctacaaatgtaaagaatgtgaaaagtctttcagtcagagctcaagtcttagtcgacataaaagaatacacactagagaaaaaccttacaaatgtgaagcatctgataaatcctgtgaagcgtctgataaatcctgtagtccaagctcaggcataattcagcataagaaaattcacaccagagccaaatcttacaaatgtagcagttgtgaaagagtcttcagtcgtagtgtccaccttactcaacatcagaaaattcacaaagagatgccctgtaagtgtactgtatgtggcagtgacttctgccatacttcatacctacttgaacatcagagggtccatcatgaagagaaagcctatgagtatgatgaatatgggttggcctatattaaacaacaaggaattcatttcagagaaaagccctatacgtgtagtgaatgtggaaaagacttcagattgaattcacatcttattcagcatcaaagaattcacacaggagagaaagcacatgaatgtaatgaatgtggaaaagctttcagtcaaacctcatgccttattcagcatcacaaaatgcataggaaagagaaatcgtatgaatgtaatgagtatgagggcagtttcagtcatagctcagatcttatcctgcaacaagaagtcctcaccagacagaaagcctttgattgtgatgtatgggaaaagaactccagtcagagagcacatctagttcaacatcagagcattcataccaaagagaactcatgaatgtaatgaagatgggaagatatttatcaaattcaggcttcattcagcatctgagagttcacaccagggagaaatcatgtatgtactgcatgtggtaaagccttcagtcatagctcagccattgctcagcatcagataattcacaccagagagaaaccctctgaatgtgacgaatgaagaaaaggtattagtgttaaactcttaatcgactcctgcaaatctataccagtgagaaatcttacaaatgtattgaatgtggcaaatttttcatgctattagtattttcataccttagtcacatttggagaattcacatgggaataaaattccattgctgcaatgaatgtgaaaaagccatcagtcaaagaaactaccttggttagcatcagattcacgccatgcataaagattataaatgcactaagcatgcatgtgtgtgaggagattcagtcataacccaacgctcattcaacatcaaagaatttatacctaagagaacttatttgggtgtagtaaatggcagatctttcaataggagtttaactagtctttgtcatatcagaatatccatagtagacaagaatttgatgtaacgcaaatggaaaaactcgacaccacatttcaggctttacccaacatcgaaataatggagagaaaattgttgattatttgtttatgaaattgttaatacatagtcccaatcttttttcattgcacaaaaaactaagggtgatttgtggaaagcaagggacatttttccagggagtcctttaattaataaggaac

SEQ ID NO: 153080 - DNA, 435 bp, Homo sapiens
  misc_feature (1)...(435): n = a,t,c or g
ggctttccctgatcgacccacgcgcncgtccgtgtgtgggttgggaatgccgggtgtaggctctgtttcagagctgacggggttgcgagcggcgtggggtgtgcctgggacggtgaccggatgtgtcttcctgaatcgttgtattcgagctccagttctctctgtttctacagctgggcctcagtcctcacagggctctagtgggcgttcagccacaccaggagaaggcgcccaggggattaacaggacccttccctctcctgctcttccctcgccccccatggctccccctccctcctatttagtaggtacttctccagcaccccacagcgatgatggatgctggccctaaagccaggcactggcgccctgcactgtagcagatgcctaaataaagtgtggagcctgaagccgaaagtttgggagatgcttgcg

SEQ ID NO: 153081 - DNA, 3378 bp, Homo sapiens
  misc_feature (1)...(3378): n = a,t,c or g
gagctccagttctctctgtttctacagctgggcctcagtcctcacagggctctagtgggcgttcagcacaccaggagaaggcgcccaggggattaacaggacccttccctctcctgctcttccctcgccccccatggctccccctccctcctatttagtaggtacttctccagcaccccacagcgatgatggatgctggccctaaagccaggtgggaaaccaggctgattcagcacctgtcttttcctgttaggggggttgccaggcctctcagatgtggggcagcgtaatcagtgggtgaccgtggttcccagcacccactctccactgcatccttgtcttaggcactgccgccctgcactgtagcagatgcctaaataaagtgtggagcctgaagcagaagttttgggagatgcttgccttcctttagaccacattcctcgcctttctcaagatttctccgtggtacccaccccgtttttgtgttgtcttccttccttgcccttgtttcattccttttgaaagcgaccactcccctgaagtcctaggacccccttcgtgggctctccctgccgtagacagtctctgcttgcccctggtaaactacgttccaaaaaccttgctttaggagtagcacttgacgtttttcatagtttcttctcatgtaattcattactcggagttgataacttctgtcccatctggattattgaggagaaagggaagggaaaaattatctggttaatatcagagttgggaaggcttcagatgttttctttgaatccgtctggcatggatgataatcctgtgtggtttaggttaagttacctaagttctctgagtctgtgtaagatgggatggcactgtctaccttagctaggagtaaggcttgagtgacatgatgtgtataaactttaacaatgtctggaatctatagatgatcaataaatatttcttttttccaccctcctcctgtgctgactccgctttgtaagggagacaggtaaaggacacaacaatttgtaggctggcataaaaaatcctatgagagaaagcagtaaatagatgttatatttgggaacgtgaagctataggtttcaaattcaaacttctgaaataggaaatttcttaagtttttacttaagaccagagactgtttagggcccatgtgctgtgatttctgattgataaatgtagctgaagttgcccatatttagagatttaaaggttcagtgtggttgggttgaactggaaaacagacttactaaaatgcttctctcaacttctgttttgtcatgtttttcttctagacccaacatgagtgaagtgtcctgcaacaaacggtacgactatttggaatggccagagtattttatggctgtggccttcttatcagcacagagaagcaaagatccttattcccaggtcggcgcctgcatcgtgaattcagaaaacaagattgtcgggattgggtacaatgggaagccaaatggggtccataattactttgtttccttgaagaagaacacccaaagaataagctggacaccaaatacccgtacgtgtgccatgcggagctgaatgcccatcctgaacaaaaaattccgacccgatgtgaaaaggcctgaagtatgtatgttcgccctggtcccccctggtaaatgaaatggcggcctaagcctcatcatccccaggcaggtattaaaaggaagttgatttttcatgtcttgattaattaccctggttagttgacgggggccactgctggcgaggctcctgttttaatatgggcccggggtgacattcccggaaattcatacccgaagtgcagcaagattgtcattgactttgattcaattaacagcagaccgagtcggaagcttcagtgagttacatctcattcaatctccagaagattgggattatcgtcttctaagaggtgtgctaatgcctttcatcttgaagttacacataacttcttactagccagtatggcaaaaagtaggcatcctcaagaatataaagcctcaaatcttccttactgtctctcttgtcacatggaatctacatgtgtttgaactattgctttagggatttaaaataggggagcctgtgggtgggcctgggtgcacaggggctaagaaccgagagtgcctccccttcttgtggtcctgggctgggctggggatgctgggtggctctttcagagggagccatcagcatgtctgtcatcctgcnggcgatccggcagcctctctttcactgctacatgtgctgggaaggacaaattaaataattgtgggttgtgttctttaatggggggacgagcagacacactgatcttgaacatctgggcccaagtgaagcatggcatatagtgcccttgggaagaaatttagggcctcaaatgacagttagcattgaagtgttttgctgcagagttgaggggaaacccccaagccaccctcccgggaatccgagatagggtggcacatctgtcctgacagacgaggagtgtaactgaaccatggaatatttcctccattcctgctctccccactgcacacagggtgggtngcaacattatccctcctgggggggtgggggaccgcctggtttggttttgggctccaatttgggtttgttggtcacatggagctcttcccatttcgtttagctgaataaatgaagttgttccctaggagggagccagcctgttcttcttccttgttgcccccaaaagcccatggcccttgccgtgggtgggcagctgggggctgttgggatggggaggggttccccaacatggaatgtgttgcccctctctccggcatagccaacgcacggttcatagtacaaaggcccctgctgcaacatggtagagcaaaaattaattcctatccccggtgaagtggattgtgaagaaatttccccaccccacgtggaagaacagcttactgcaagcactgttgggtgttcggagcctccttcctgtgcccctggctcccatgctttcacctaacacaaagcatcacccttccctaatacaacccggggcggggagccgtgtggctgtgcccccttctctttaatcctcatttaattttgtattaacaatgcctcagtacctgtgttgagaaaaggctttctttatctctacagcttattacctttttaaagtgctcttatattttcatgagtttttattttgtctctgaggattttgtattccacattctagggggattctgtaaatttggctcccttacccatattatttaaaaatcttatttaaaatctaccctaccaaagcatgtccatttttatgttattataattatatgatataaaaaaaaaaaaaaaaaataaaaaagctgt

SEQ ID NO: 153082 - DNA, 570 bp, Homo sapiens
  misc_feature (1)...(570): n = a,t,c or g
cgccctcgacnccntnnntttagaacnactatccagagggtggaattcgattgggatcctggttttcagaaatgattggagtgatttatgtaagttgggaggggttttttgatggggttggtaaggtcttacgttaaaggaaaggtatacagagataaatattggtacttgagtcattagctttcaaagaagcctggggtaatggaggaaaggtaagaattgattctgacagaatcttgagatgggcagaattaacatctggaagaggtcacagtgtcctgatttaccttacctgtgtccaggatggccaggccatgttatgggatctcaacgaaggcaaacacctttacacgctagatggtggggacatcatcaacgccctgtgcttcagccctaaccgctactggctgtgtgctgccacaggccccagcatcaagatctgggatttagagggaaagatcattgtagatgaactgaagcaagaagtatcagtacagcagcaggcagaccaccccaggcacctcctgcctgtctgtgatgccaaactctgttgtgctacacgacacctgn

SEQ ID NO: 153083 - DNA, 1177 bp, Homo sapiens
ctgcaaggcggcggcaggagaggttgtggtgctagtttctctaagccatccagtgccatcctcgtcgctgcagcgacaccgctctcgccgccgccatgactgagcagatgacccttcgtggcaccctcaagggccacaacggctgggtaacccagatcgctactaccccgcagttcccggaaaataatctccccgcctcccggagaaaaggccatcatccttaggaaacctgcccgggggtggagccaacctatgaatttccaaaggcgttctcggcggattcactcccacttgttgaggatggtggttatttcctaagatggccagttttgccctctcaggcctcctgggaatggaaccctgcgccctcggggatctcacaaacgggcacccacacgagggcgattttgtgggccaataccaaaggatgtgctgagtgtggccttctcctctgacaaccgccaaagattgtctctgggatctcgaagattaaaccatcaaagcttatggaaataccctggggtgtgtgcaaataccactgtcccaggatgagagcccactcagagttgggttctttgtgtcccgcttcctcgccccaacaaccagcaaacccctatcaatcggtctccctgtggcttgggacaaagctggtccaagttatggaaacctgggctaaactgcaaagctgacgcaccaaacccacattgggccacacagggctatctgaaccacggtgactgttctctccagaatggatccctctgtgcttctggaggtcaaggatggccaggcccatgttatgggatctccaacgaaggccaaccccctttacaacgctagaatggtggggacatcaatcaacgcccctgtgcttcagccctaacccgctacttggctgtgtggctgccacaggccccaggcatcaagatttgggatttagaggggaaagatccattgtagatgaactgaagcaagaagttatcagtaccagcagcaaagcagaaccaaccccagtgcacctccctggcctggtctgctgatggccagactctgtttgctggctacacggacaacctggtgcgagtgtggcaggtgaccattggcacacgctagaagtttatggcagagctttaccaattaaaaaaaaaactggcttttctgaagaagagaaagggaa

SEQ ID NO: 153084 - DNA, 2301 bp, Homo sapiens
tttttttttttttttttaagggtataataaaattatttttattgcattttgtgcaagaccgggagctaaaaaagtaatacagtaaaagccataaagcattaaatgggagcattcaacaataaaggaaagaaccaaccctctccttttcatattggcacaaagaacacaagatcaatactgaggcaggatgcggtcatactgaacacttacactggaaaattaaagggcagggcctaataataataggcagtaatagtaattaaagtactcttgatttgggtttgcaacctctcctattttacaaggggtttttcaacttcattggcattgccctgcacataggatccatcttaaaacaaaaggcaacactaggtttattcacttacaagggcttattggaaatattgcactcagaaataaaagtcacttgaatggacatgaaacatctaactacagtgattataaagataacttgatgaatgacttgtgataacattcataacaaatattgcacatgtagcacagaaaacttgggtttttgttgtgggatgtctgtttcatcaacggaaactttgctcttgccaaccatacaaactgggcccagatagtgcaactttggttcgctaattgatgttgatacagcccccttctgcacagcccatcacatcagctctggaatagtccaggctgatagaaggcaggacctggctgtggtgttccagagggaggtctactgaaggatgcagggggctggtgtctaacacctccagcttcctgattgagtacctgaaagaatctatccaatcccctgaatcgaaatctcaaaagggaacttggccgttaactggcaagacctccaaaacctacccccagccacacctgacgctgtctgggtggcgcccagctccagctctagctctgccttgggctcaaaggaaaagaggtggtgaggtccggattactcagtggcgccagctctgggaggtgcgtgagatgtcaagctaggtgcgcaggtcagggcccctgggggctggaggtacttgtacccagtcccagatggtgctggaacgagcatgcagtgcctgacccccttagtaatgtgccctaggggaagggaactccggccaccgcgccttctctaaggacagagcacgcctcagaccaggctggtggagcggaagggccaaggatgagctggggaaaccaaagcccctgggtcctagttagaggagagcagacaggcgctaaggacaaagcgcgtgcgactccagccctccctcaggcccaggtccccgggagacggagctagaggccgctgctaagcagcgaggcccggccccagagcacggagaaggcggctgggtccctcaggcgaagacaggagctgccagatggggacgggggaggaacatcacgggcggctctggggcctctcagtgggtccggcccctaaaccagaatcggccccctcctccctcacttgtcccagggaggaaactccggggagggggcgccctccagctccacaatttcagtctttggcgaggagccatgggatacggggagcaggcgacaagccgactgaagaaaaaagcctgctcccccaacaaaggcaccggggcggggcttcctcggtggggcgcgggcctctcggtttcttccctcttgaagaagcacccctcccctatccctggcccccaaacttgcaataagagcccgatgaagaagaggttgctcgcgtcctctgcagccgcagtggaagctcacgtccgctgggaggcgaatcccaggaaaagttggacccttgtctcacctcatctcggaaaaggactggagaggagggtgggaagccaagggcgcgcggaaagggcgaagaggcgagagcaggacggaggtgtcgagggaacgaggcccacgaaccccgcctgggcctaaagcactttcgctctcaaactcttggacgttcaaggaaaattcagccttccccgaggcctcgcctccccgcagtgcccccagcgggagagctcgactatggcgaagaagtctgttgcgcttctagtcacataaatcatggggacgttaaaaatgcgcacgatgtctcctgtacactatgtataggctcggccggccgcgcccctcggctcgacgagaaggggcggcggagacggcaagagcgtccttcccacccctcgggcctccgggccgccgggagccagggagcagctccgggcttagatgtattcccagtcacacccttgtgcccctcggccaggctggccgtaatcatggtcagagcttgta

SEQ ID NO: 153085 - DNA, 903 bp, Homo sapiens
atggataaatttctggacacatacacccttccaagactaaaccaggaagaagttgaatctctgaatagaccaacaacaggctctgaaattgaggcaataattaatagcctaacaaccaaaaaaagtccaggaccagatggattcacagccaaattctaccagagaaccaatgacaaaaactgcacaattatctcaatagatgtagaaaaggcctttgacaaaattcagcagcccttcatgctgaaaactctcaataaacaaggaactgatggaacgtatctcaaaataataagagctatttatgataaacccacacccaatatcatactgaatgggcaaaaactggaagaatttcctttgaaaactggcacaagaaagggatgccctctctcaccactcctattcaacatagtgttggaagttctggccagggtaatcaggcaagagaaagaaataaaggccccggccccagacgctacagccgccgaaatgttgatgcctaagaagaaccggattgccatttatgaactcctttttaaggagggagccatggtggccaagaaggatgtctacacgcctaagcagccagagttggcagacaagaatgtgcccaaccttcatgtcatgaaggccatgcagtctctcaagtcccgaggctacatgaaggaacagtttgcctggagacatttctactggtaccttaccaatgagggtatccaccatctccgtgattaccttcatctgcccccggagattgtgcctgccaccctatgccacagccgtccagagactggcaggcctcggcctaaaggtctggagggaagtgaggagcatctctgcgcggccgcccatcgtctgagatgtggggagcacctctgccccaccgccctgtctgggatgtga

SEQ ID NO: 153086 - DNA, 2497 bp, Homo sapiens
caggttgacacagttctggattttatccacagtcatacaatcacaactgatatatatatatatttgtatttatatacctttaaattacacaatcatgtacaaaacaggtgcattgctgagaccacagcacttctcggagtttcacaagtgtcggaactaatggagtcaggaagcctagggcggcagacggcgggcggtggggcagccctggttccttgcagaaccaggccgcagaatggtggttaactggggacaaaacacattactcgccgagccccaccagggcgggcccgtgcagcatcgtgggtgcaggcaggggctacaggaggaggccgtgggcatggcaaggggcgtggcccccacactcggtgttgagtgccctgacaccagcactggcagtggctccgcccctgggaaggcagagtcctccctgtgccctctgcattacaccctgtcccctgtgaacgtcctcttcctgctcttgccatcctccaccgaatgcctgctgccgaggaacatcgagtgtcctctctcagaaggccgggcaggcacctcatttaccagggccaacgggaaagcccctaagaagctcaggctctctcagggctgtcagggcacccggccctatcggtggcggtcaggctccgtggtcagatccgccagttcttcaggcaccgccgaggccaccccaggctccccgcgggtcctggcggggggcgggtccacgccagcccggaagagacgcagcaccgcgcatgctccttcctttccagccccggtaccggaccctgcagccgcagagactgttgatgcctaagaagaaccggattgccatttatgaaactcctttttaagggagggagtcatggtgcccaagaaggaatgtccccatccctaagcacccggagctggcagaccaaaaatgcgcccaacttacgtgtcatgaagcccatgcaagtctctcaaggtcgcggaggctacgtgaaaggacagttttgcctgggagacatttcctactggtaccttaccaaatgaggaagcaaatgccagctgcatacggaggctgcgcggctggggcagccagcattattcccacttgacggacaagggcgctgtgacctgctacggggcacctgtccatgcgtgcccgcagcctggaggtacagaggcccaccgcagccccaagtggaccatcgtggctgagtttactccaaaaggggatgtggactggaaagaacgaagacctccacttcaggaggtgcaggtgacaccctgccctgttccctccataggagagaccctgggatccaacctgagcctgatcagatctctgtgtccagctgccaattcaccagaaatgcagagaacagaggaacatgctgaattgcaccgggagtgtacaattagcaaaatccagactataggaaactctacaggttatacagcccagggccagacctcctacctgggggcaggagctccggggaccatcggcggcgactcggggcgaagcgggacgtctggggcccggcctcaagcccggccgacttcccgggggaggagggggctggcgctgccgccgccaccgcgtcgctatgggatctcgcctgtacagcgtgctgtacacacgtctcatttacctcgccgcgacgggtaccgagctcgaattcgtaatcagggggacttcccagacagagagacaggcttggaagatcaacacccggatgatgatgagcagaatggtcatgaggatgtccacaatcagggctcagatgttcaggcacttggcggtggaggcatacgcctgggccccagtcaggaggaaccagaaccaagaattcctgccccacccacttccccccggcccccgcacccgccaccaccccccaacgcccaggagaccggctggcaaatccaactcctacacagccttcaagggctcagccccaaccctgctctgagatcagaggaggtgctgagagaggagagaggccaggcagtggaagcagcagacaccttcgagcctgcagggacagggcaagtggcagtgctgcacagaaaccgagatgtgggccctgagttccacccggtgctctccacgcttgcctctggtgggccagtggccagagaggaccaatgtggggaggaagctcaggccaactgctccagaaattgctggtgccgacaagaaagccgaggctggggctgggtcagcaaccgaattccagtttccctcgtcaccaccggacacggcatccacagcacggcattcatcacgttgcgtgtcctccttcccacaggaatgtcacttagtccagtcagcggtgtttatctgtctggttatctgccgtatttccagcatccagtgcagtgccggcaacatagggtactgcagcacgcaggcggcatcaacaacacaaccatttttgagcgcctactgtgtgccattgtgagcgcctcctcacatgctttatctccaaacctcacagcccactga

SEQ ID NO: 153087 - DNA, 565 bp, Homo sapiens; identical to SEQ ID NO: 145645
  misc_feature (1)...(565): n = a,t,c or g

SEQ ID NO: 153088 - DNA, 534 bp, Homo sapiens
cggcagagcagggggccgaggacaccaggtctgttctcagagcgatgggccgcggagactgatctgccgccatgattggaggcttaagcggtccaacatttggctggcagcagtcaccaagcagaatgtcaacgctgccatggtcttcgaattcctctataagatgtgtgacgtgatggctgcctactttggcaagatcagcgaggaaaacatcaagaacaattttgtgctcatatatgagctgctggatgagattctagactttggctacccacagaattccgagacaggcgcgctgaaaaccttcatcacgcagcagggcatcaagagtcagcatcagacaaaagaagagcagtcacagatcaccagccaggtaactgggcagattggctggcggcgagagggtatcaagtatcgtcggaatgagctcttcctggatgtgctggagaaggtgaacctgctcatgtccccacaaggcaggtgctgagtgccctgtgtcggcccggtggggagaaaactacctgagtgcatgcc

SEQ ID NO: 153089 - DNA, 2033 bp, Homo sapiens
  misc_feature (1)...(2033): n = a,t,c or g
tttcgtggacatcttgggatccggagagtggccgggccggcagagcagggggccgaggacaccaggtctgttctcagagcgatgggccgcggagactgatctgccgccatgattggaggcttattcatctataatcacaagggggaggtgctcatctcccgagtctaccgagatgacatcgggaggaacgcagtggatgcctttcgggtcaatgttatccatgcccggcagcaaggtgcgcagccccgtcaccaacattgctcgcaccagcttcttccacgttaagcgggccaacatttggctggcagcagtcaccaagcagaatgtcaacgctgccatggtcttcgaattcctctataagatgagtgacgagatggctgcctactttggcaagatcagctgaggaaaacattcaagaacaattttgtggttcattatatggagctgctggatgagattctagaatttggctacccacaagaattccgagacagggcgcgctgaaaaccttcatcaccccagcagggcattcaaggagttcaggcttcagacaaaaggagggcagttcacagttcaccagccaggtaactgggcagattggctggcggcgagagggtatcaagtatcgtcggaatgagctcttcctggatgtgctggagagtgtgaacctgctcatgtccccacaagggcaggtgctgagtgcccatgtgtcgggcccgggtgggtgatgaaaaactacctgagtggcatgcctgaatgcaagtttgggatgaatgacaagattgttattgaaaagcagggcaaaggcacagctgatgaaaccaagcaagagccgggaagcaatcaattgctcattgatgactgcacctttccacccagtgtgtgcgactcagccaagtttgactctgaacgcagcatcagctttatcccgccagatggagagtttgagcttatgaggtatcgcacaaccaaggacatcatccttcccttccgggtgatcccgctagtgcgagaagtgggacgcaccaaactggaggtcaaggtggtcatcaagtccaactttaaaccctcactggctgggctcagaagatcgaggtgaggatccaacccccactgaacacaaggcggggtgcaggtgatctgcatgaaggggaaggccaagtacaagggccggcgaaaattcctttgtgtggaagatcaagtcgcatggcaggcatgaaggaatcgcagattcagcgcagaggatttgagcttctgcttaccaacgacaagaagaaatggggctgccccccccatttcccatgaactttgaggtgccatttcgcgccctctggcctcaaggtgggctaacttgaagggtgttgaacccgaagctgaactacagcgaccatgatgtcatcaaatgggtgcgctaaaattggccgcaagtggcatttatgaaaactcggcttgtaaggccactaggcagctagcccaacttccccagccacccttccttcaacaggtccaggtgccgctccttccccaaaccacacatcaagtgtctccttccctccctgctttgctgccttcccctttgcaccaagcccgaagtcttaggtctgggccaaagcaacattacaaagtgggaccggtggaaccagccctggggctccctgggcaaggggagttctgaggctcctgctctcccatccaccgtgtctgttcctggcctaatgccaggctctgagttctgtgaccaaagccaggtgggttccctttccttccccacccctgtggccacagctctggagtgggagggttggttgcccctcacctcagagctcccccaaaggccagtaatggatccccggcctcagtccctactctgctttgggatagtgtgagcttcattttgtacacgtgtgacttcgtccagttacaaacccaataaactctgtagagtggnnnnnnnnnnnnnnnnngnnnnnnnnnnnnnnnnnnnnnnnngaggggggcgccctttaaaaaaacacaatttcaccccccccgcg

SEQ ID NO: 153090 - DNA, 398 bp, Homo sapiens
caccccaacagagatgggtttcgtgccccacgagagtgcctgtgccttgtgacgagaatttcaaccatgtttttgtctctgcaggcagagaacagcagttacttcgtcagcagggagctgtgtgcgcattccatcaggaagctgcaggaatctccgggagggggccctggcatgaggctccaagttctctgcgtgtcgaccacatcgctaagactcaagatcttttttgggaagcccccctggcagcagggtcatggaaggaggaaggtcagaggaggggagggctcaggcagcaggggatgggccggggctgtcccatgcctttccacaggtgtcagcgggggcatgcccaggtaaggctccataaccagtgagcccagtctcgactcactgcaacc

SEQ ID NO: 153091 - DNA, 777 bp, Homo sapiens
atgggggcggggacggctggagttgcggggactgctggagttgcggggcttgcctggggtctgatctcagagctgaagctggctgtgccctggggccacatcgcagccaaagcctggggctccctgcagggccctccagttctctgcctgcacggctggctggacaatgccagctccttcgacagactcatccctcttctcccgcaagacttttattacgttgccatggatttcggaggtcatgggctctcgtcccattacagcccaggtgtcccatattacctccagacttttgtgagtgagatccgaagagttgtggcaggtggcgtcgtgggcggaatggaaatggagaacttgctgacctacaagcggagagccatagagcacgtgctgcaggtagaggcctcccaggagccctcgcacgtgttcagcctgaagcagctgctgcagaggtgggtgcccggtgtggacggggagctggcagagaacagcattgacttcgtcagcagggagctgtgtgcgcattccatcaggaagctgcaggcccatgtcctgttgatcaaagcagtccacggatattttgatccaagagagaattactctgacaaggagtccctgtcgttcatgatagacacaatgaaatccaccctcaaagagcggttccagtttgtggaagtcccaggcaatcactgtgtccacatgagcgaaccccagcacgtggccagtatcatcagctccttcttacagtgcacacacacgctcccagcccagctgtag

SEQ ID NO: 153092 - DNA, 1175 bp, Homo sapiens
tttaattgctggatttatttatttatttatttatttaatttatttatttattttgagacagagtctccctctgttgctcaggctggagcacagcgttcacaactcactggttatggaagccttacctgggcatgccccccgctgacaactgtgaaaagccatggaacagccccgccccatcccctgctgcatgagccctcacctacctctgaccttcctccttccatgaccctgctgccaggggggcttcccaaaaaagatcttgagtcttagcgatgtggtcgacacgcagagaacttggagcctcatgccagggccccctcccagagattcctggcgcccatgtctcctttgggggtgactgaaggggatgggtccagacttacttgatcaacaggacatgggcctgcagcttcctgatggaatgcgcacacagctccctgctgatgaagtcaatgctgttctctgcctgcagagacaaaaacatggtgaattctcgtcacaaggcacaggcactctcgtgggcacgaaacccatctctgttggggtggctaagccctggcaagggcaccttagccacccaccctgggtctgagcccaggaccccacatcactgcctcatcgaaggctctttagcccctggtggccagagactcctgccctctccaagtctgttctcccctcttcctgggctcgtggctacccagcctgactccatttccaatacttcctttgccaaccaaggtatggctgtggtgaattaaagttcagagaagtgaagttgggggcaccttttgggcctggattttaggacttaggtgtggcccttccacaccccctttcccagtccataggctgcaccctcacgctgtcccctgctcagcctgggacaggcttcttgcccaggagaaagaaacttgctgggacccacagtgcaggatgggaactccgtgatggccccagccagcctcctcgcgcggccctgcctgccctgtcttgtgactgttttacgtctggatggcggggatgtggccagcttgagtgaaatgtgctgtaggtgtgacacgaagctggatttggaaaacttagcatgcaaaataatgcaatcaagctttatgttgattacatcttgaatcacattgtggatgttaaaatatgagaacaattgttagagc

SEQ ID NO: 153093 - DNA, 398 bp, Homo sapiens
ccaaaccctctctctacacagatggggacctcagggggcaaaggacaccaagagcttctggaatattcaccaggagggggtcccccgcctggcccgaggaaacagttccactgctccccacccccgcccaaccctgcctcgggaaagaaaggtcattccctcctcctttgctccacacagcttttcaaaggttaaattcaaccagcctgctccaccacccccacacgcccacccccaaacaagagaggaaaagttaattgaaaatgctgtttaatttttcagctccagtggatcctaccccagcacagatggctcccccaggactgtttgtcccgagcccatctccaccactccatcgcctcccgccacaagcatgggggcagaggcacagccagcag

SEQ ID NO: 153094 - DNA, 496 bp, Homo sapiens
  misc_feature (1)...(496): n = a,t,c or g
cgcccccgcnnnattgaaacctgatggccgtgcnaccggcccggaatcccggtcgacccacgcgtccgaacgcgatggactctcgtgttgcctctgtagacgtcctgcttggttttaaaccggcgcggtgtcgttccagatgcctgaggaaacccagacccaagaccaaccgatggaggaggaggaggttgagacgttcgcctttcaggcagaaattgcccagttgatgtcattgatcatcaatactttctactcgaacaaagagatctttctgagagagctcatttcaaattcatcagatgtgaacctatgggtcgtggaacaaaagttatcctacacctgaaagaagaccaaactgagtacttggaggaacgaagaataaaggagattgtgaagaaacattctcagtttattggatatcccattactctttttgtggagaaggaacgtgataaagaagtaagcgatgatgaggctgaagaaaaggaagacaacg

SEQ ID NO: 153095 - DNA, 544 bp, Homo sapiens
  misc_feature (1)...(544): n = a,t,c or g
gtagactcggaggatctccctctaaacatatcccgtgagatgttgcaacaaagcacaattctgaaagttatcaggaagaatttggtcaaaaaatgcttagaactctttactgaactggcggaagataaagagaactacaagaaattctatgagcagttctctaaaaacataaagcttggaatacacgaagactctcaaaatcggaagaagctttctgagctgtatcttgatgtttagaaaagtattcgttacatcttgtaggatctactttttgaacttttcattccctgtagttgacaattctgcatgtactagtcctctagaaataggttaaactgaagcaacttgatggaaggatctctccacagggcttgttttccaaagaaaagtattgtttggaggagcaaagttaaaagcctacctaagcatatcgtaaagctgttcaaaaataactcagacccagtctttgtggatggaaagtgtagtgctcgacgtcacattctgccttaaaggttgtacccagatacagatgtngatctaagat

SEQ ID NO: 153096 - DNA, 3427 bp, Homo sapiens
  misc_feature (1)...(3427): n = a,t,c or g
cggaaggttcgggaggcttctggaaaaagcgccgcgcgctgggcgggcccgtcgctatataaggcaggcgcgggggtggcgcgtcagttgcttcagcgtcccggggtggctgtgccgttggtcctgtgcggtcacttagccaagatgcctgaggaaacccagacccaagaccaaccgatggaggaggaggaggttgagacgttcgcctttcaggcagaaattgcccagtggatttcattgatcatcaatactttctaactcgaaacaaagagatctttcctgagagagctcatttcaaattcatcagatgcattggacaaaatcccagtattgaacgcttgacacgatccccattcaattagacctctgggaaaagagctgccatattacccttttacccgaccaaaccaagatccgaactcctcactattgtggatacctggaatttggaatgacccaaggctgactttgatcaataacccttggtactatcgcccaagtctggggaccaaagcgttcatggaagctttgcaggctgggtgcagatatctctatgattggcccagttcggtgttgggttttaatccggcctaatttggttgctgagaaagtaactgtgatcaccaaacataacgatgatgagcagtacgcttggggagtcctcagcaggggggatcattcacagtgaggacagacacagggtgaacctatgggtccgttggaacaaaagttatcctacacctgaaagaagaccaaactgagtacttggaggaacgaagaataaaggagattgtgaagaaacattctcagtttattggatatcccattactcttttttgtggagaaggaacgtgaataaagaagtaaccgatgatgcgcctcaagaaaaggaagacaaagaagaagaaaaacgaaaaagaagagaaagagtcggaagacaaacctgaaattgaagatgttggttctgatgaggaagaagaaaagaaggatggtgacaagaagaagaagaagaagattaaggaaaagtacatcgatcaagaagagctcaacaaaaccaaagcccatcctggaccaggaatcccgacgatcttactaattgaggagtacggagaattctataagagcttgaccaatgactgggaagatcacttggcagtgaagcctttttccagtttgaaggacagttggaattcagagcccttctatttgtcccaccgaccgtgctcccttttgattctgtttgaaaacaaaaagaaaaagaacaaatatcaaattgtatgtacgcagagttttcatccatggataactgtgaggagctcattcctgaatatctgaacttcaatacgaggggtgggtgactcggaggatctccctctaaaacatatcccgtgagatgttgcaacaaaagccaaaattttgaaagttttcaaggaagaattttgggncaaaaaaatgcttagaactctttacttgaactggcggaagataaagagaactacaacgaaattctattgagcagttctctaaaaacataaagcttggaatacaccgaagactctcaaaatcgaaagaagctttcagagctgttaaggtactacacatctggcctctggtgatgagatggtttctctcaaggacttctgccccagaaatgaaggagaaccagaaacatatctattatatcacaggtgagaccaaggaccaggtagctaactcagcctttgtggaacgtcttcggaaacatggcttagaagtgatctatatgattgagcccattgatgagtactgtgtcccacagctggaaggaattttgaggggaagactttagttgtcagtcaccaaagaaggcctggaacttccagaggatgaagaagagaaaaaggaagcaggaagagaaaaaaacaaagtttgagaacctctgcaaaatcatgaaagacataaaaggagaaaaaagttgaaaaggtggttgtgtcaaaccgattggttgacatctccatgctgtatttgtcacaagcacatatggctggacagcaaacatggagagaatcatgaaagctcaagccctaagagacaactcaacaatgggttacatggcagccaaagaaacacctggagataaaccctgaccattccattattgagcccctagggccaaaggccggaggctgataagaacgacaagtctgtggaagggatcttggtcatctggcttaaagaaactgcgcccccgtccttctgccttcagtctgggagaatcccaggacacatgctaccagggatctacaggatgatcaaaccctggtctggggtattgatgaagatgaccctactgctgatgattaccagtggttgctggtaactgaagaaaatccacccccttgaaaggagatgacgacacatcacgcatggaagaagtagactaatctctgggctgaggggatgacttacctgttcaagtactcacccattcctctgataatatattttcaagggtgtttttctttaattttggtaaatattaaaaagtctgtatggccatgacaactactttaaggggaaagataagatttctgtctactaaagtgatgctgtgatacccttaggccactaaagccagagctagtaatgctttttggagtttccatgttggtttaattttccacgagattggggtaaccgtgcactgtaagaccgtatgtaaccatgatgttaacttttgtgtggtctaaaagtgtttagctgtcaaagccggatgcctaagtagacccaaatcttggtaattaaagtgttctgagctgtaatcttgatgtttagaaaagtattcggttacatcttgtaggatctactttttgaacttttcattccctgtagttgacaattctgcatgtactagtcctctagaaataggttaaactgaagcaacttgatggaaggatctctccacagggcttgttttccaaaagaaaagtattgtttggaggagccaaagttaaaagcctacctaagcatatcgtaaagctgttcaaaaaataactcagacccagtcctggtggatggaaatgtagtgctcgagtcacattctgcttaaagttgtaacaaatacagatgagttaaaagatattgtgtgacagtgtcttatttagggggaaaggggagtatctggatgacagttagtgccaaaatgtaaaacatgaggcgctagcaggagatggttaaacactagctgctccaagggttgacatggtcttcccagcatgtactcagcaggtgtggggtggagcacatgtaggcacagaaaacaggaatgcagacaacatgcatcccctgcgtccatgagttacatgtgttctcttagtgtccacgttgttttgatgttattcatggaataccttctgtgctaaatacagtcacttaattccttggcctt

SEQ ID NO: 153097 - DNA, 861 bp, Homo sapiens
ctgaaaaactccaatttaccgactgtatttagcacatatataaatataatttgcacttgtcagcagactgggggaatcctttcacttgctacacttggcacccccccgcccccaccacaaccctgcctctccatcatgaacctgcctttcctcctccctcgctcctcccacaacctaagcccacccagccgggatcctctgaggaaagtcttggggcactagaggccactgtctccacctggcctccaactccaaaattggagccctccaaacattacaagaggaacatcagagagccaaaaagcctgacttcttagaaggagccctggactggggagccgggaggctcaggttttcaaatctgctccatgacagcacggcccaatgaccttgagcaagtcccttgtgccctgagtctcagttttctgggtggggtgagtgaggagaactgggagatctttagggtcccttagacttcaagtatgratgtgacacagatcccgggggcaaaccactgggctgagctgtctcaccttctgagggggagcaagaaagaggggagaaaagggcaggggcatggtggctcacgcctgtaatcccagcactttgtgaggccaaggtgggcagatcacttgagatcaggagtttgagaccagcctggccaacatggtgaaacccctgtctctactaaaaatacaaaaattagctgggcgtggtggtaggcgtctgtaatcccagctactcgggaggctgaggcaggagaatggcttgaacccaggagacggaggttgcagtgagctgggagcgtgcaccactgcactctagcctgggtgataagaacaaaactcagtccaaaaaaaa

SEQ ID NO: 153098 - DNA, 325 bp, Homo sapiens
  misc_feature (1)...(325): n = a,t,c or g
nnnnnnnnnnnnnnnnnnnnnngaagggggaaaaatttattcaaattttttcataattccccccaaaagctccaaccacgttgccagtccttgggtgtaaaatgactggaaggagcagggaaggaaaatgggtgtcaactgtcccggccagtggctgcgtgcatgtgtgtgtgaacagggaaaaggccaccctttcccatgtttttcccgtctccttggttttccttgggaaacccgaagggctgcccgaggtagctccgagttgccctgggtcggtggggcttggtccgcatcctcctccgttagtccgctcccgcgttccaca

SEQ ID NO: 153099 - DNA, 804 bp, Homo sapiens
tttttttttttttttttaacatgaagggtgagaaatttattcagatttcttcataattccccccaaaagctccaaccacgttgccagtccttgggtgctgcagttggtcggggagaggggctgtgtggaggtcaccttctggtagacggagacccgcttttcagactctgtggcgcagcaggcgggcccaggaacatttgggccactattgctcttagccctgccgcgcctgactttctctcctctactttcctttccgaccgtagggacaaagtgtgggaatccgctttgggctccaaagccctgccccgcactggcagcaccaagcgggtgtagaatgacttggaaggagcagggaaggaagatgggtgtcaactgtcccggccagtggctgcgtgcatgtgtgtgtgaacagggaaaaggccaccctctcccatgtttctcccgtctcctcggttctcctcggagacccgcagggctgcccgaggtagctccgagttgccctgggtcgctggggcttggtccgcatcctcctccgatagtccgctcccgcgttccacagcgccccgccgctcggtgtgcacgcactgcggcttaacccagccgacaaggcacgcttgccaaaaaggcgcgggtgtgtgtgtgcggggtccgcgttcggaggccaaaggagggtggcgtggtagagcccttctcctcctggccgcgacgccttgcccactctcctgccctaatctcggcctgccagcaaaagtgacacctgagcagggactggtccgtagaggcggcaggcccgctggtccg

SEQ ID NO: 153100 - DNA, 1861 bp, Homo sapiens
  misc_feature (1)...(1861): n = a,t,c or g
ctgaactcccgggttgaaccacgcgtccgatcgaggacaatggagaccaaacctgtgataacctgtctcaaaaccctcctcatcatctactccttcgtcttctggatcactggggcgatcctgctggctgttggagtctggggcaaacttactctgggcacctatatctcccttattgccgagaactccacaaatgctccctatgtgctcatcggaactggcaccactattgttgtctttggcctgtttggatgctttgctacatgtcgtggtagcccatggatgctgaaactgtatgccatgtttctgtccctggtgttcctggctgagctcgtagctggcatttcaggggttgtgcttcgtcatgagatcaaggacaccttcctgaggacttacacggacgctatgcagactttacaatggcaatgatgagaaggagccgggcagtggaccatgtgcagcgcagccttgagcttgctgtggtgtgcaagacctacacccaactggagcaccagcccctacttcctggagcatggcatcccccccagctgctgcatgaacgaaaactgaattgtaatccccaggatctacacaatctgactgtggccgccaccaaagtttaaccagaagggttgttatgatctggtaacttagttttcatgggagactaacatggggaatcatcgctgggagtgggcgtttgggaattcgcattctcccagttaattgggcatgctggctgggcctgctgttctgtcccggtttcatcacgggccaattcagtattgagatgggtgtaaggagaagtctttcaagaatgacggaataagagacctgttttaaaaagggacctgcagcaatctttgaaagacttcccaaaggatgttaagagcacagtacattattacacttggccctgctccctctacccctttaccccacaacgtggcaattgacatttcccacccagtctctgctccacctttcagcccacgtcacgtgtagtgtccattttgtgaagccctgttgtgccacagagtgtaagccaggtccccctgcagctagtcctaagtgaacctcaccccgaggccctgcatgggccagcccctccatcttgtacttggtccaacttgcaactcatcatcggtgactggttatcacaaccatcgctggcccctttgggccctgcatgtagtgtggggaggctcctgttagctcctcactgtgggtaaattgccacacacctcttaagtaggttaggcagacgatagttattttgttctttttgaattaatctcatttggtttgattttcccctctactagggctttcctacctttcttcaggctgccctaaggaccatgtaacggaaccaccttccaataattgtcccatggggggaaaaaaagccatggtgtcatgcatggaagggaaactgaacttggaggtgggcctcccttgctttgttaacatacccggggtatggtgtaggccagttttagtgccatcctttgccctcctcagttgaaacctgtaataacccctgtttacaaagcctgtgttgttggcctccttgtgaaaggcccatgatattttgtttttccccaaattaaattgccagtggtgttattttacctacttcctctctgtattttttccttgcattgacattatagacattgaggacctcatccaaacgaatttaaaaatgantgagtgtgaagggggaacaagtcaaaatatttttaaaagatcttcaaaaataatgcctctgtctagcatgccaacaagaatgcatttgatattgtgaacatttgtgatatatgtattaataaatagagcaattacaagcaaaaaaaaa

SEQ ID NO: 153101 - DNA, 721 bp, Homo sapiens
  misc_feature (1)...(721): n = a,t,c or g
tataaagtgctcatctttactttccttgcagtgtgaccagctgtgctctgctctctgctcatgcttcaggcccaaagacactgagcggtccgaggcgcccagaaggcttctccagaactgacttgcacctggcctggttccagtgctgacagcattaatctcttaccataactacctggacaaaaccaaacagcgcgagatggtctactgnctggagcagggcctcatccaccgctgtccagccagtgcgtcgtggccttgtccatctgcagcgtggagatgcctgacatcatcatcaaggcgctgcctgttctggtggtgaagctcacgcacatctcagccacagccagcatggccgtcccactgctggagttcctgtccactctggccaggctgccgcacctctacaggaactttgccgcggagcagtatgccagtgtgttcgccatctccctgccgtacaccaacccctccaagtttaatcagtacatcgtgtgtctggcccatcacgtcatagcaaagcccctgcacagactccagccgagcccacacctggctatgaggtgggccagcggaagcgcctcatctcctcggtggaggacttcaccgagtttgtgtgaggccggggccctccctcctgcactggccttggacggtattgcctgtcagtgaaataaataaagtcctgaccccagtgcacagacatagaggcacagattgc

SEQ ID NO: 153102 - DNA, 445 bp, Homo sapiens
ctctcccacatccccgaggataaagaccaccaggtccgaaagctggccacccagttgctggtggacctggcagagggctgccacacacaccacttcaacagcctgctggacatcatcgagaaggtgagagccgttgtacccggggccgggtgctagcgtgccagagctccgtgggcagcaatggcctctgggccctctgtcctcctcttcgagtgaccggatggctgtgtccgtaggtgaggctcccctccctgcagggtgggtgtcccgaggcctgtgcagggcctgccactgctggatttgtgtcctgactgaaagtcctggacatgggtgtcctgtcacactctgggacagctgggctgggcctcctggaccgacgctggagcccagacctggggctggggctttggcctgccgtcctccctgcccagccaacagctttgct

SEQ ID NO: 153103 - DNA, 438 bp, Homo sapiens
gggttgggccctgagtgtacggcatacacacttctgctgccgcctcggcacagaccctctgtgcagccccaggggcggtagatcctagtgtccgtgcgtagccggcctgccctgggctcccctgagcctcttcgggcccagtgcgtggtctgtctgttgctgccgggggactgatgatggggtttctggcagtgacgggtttggacacactgtcctgcggcgggagggggaggtgagtgggagatgtagattcggcgtcctcgcaaactgccgccgcttctcccccagctgactttgtcctgcagtggatggatgttggcttgtcctcggaattccttctggtgctggtgaacttggtcaaattcaatagctgttacctcgacgagtacatcgcaaaaatggttcagtaagaaaagaattgagatcctgttcacgaaa

SEQ ID NO: 153104 - DNA, 414 bp, Homo sapiens
aactacctggacaaaaccaaacagcgcgagatggtctactgcctggagcagggcctcatccaccgctgtgccagccagtgcgtcgtggccttgtccatctgcagcgtggagatgcctgacatcatcatcaaggcgctgcctgttctggtggtgaagctcacgcacatctcagccacagccagcatggccgtcccactgctggagttcctgtccagtgagtccccgccctgcctgcgcatgcacccgagaggttcgggctgtgtaacctgtgcgggcttctctggtgccctctctcaggactccttggggaacctgggtgtctcgccttctgctgcctcaaggcctgggcgtctctgcccggctgccatgagtgctctccttcctggctttgaggggcggctcctctcacccctc

SEQ ID NO: 153105 - DNA, 6373 bp, Homo sapiens
atgccggactcctgcggactacacatcccggcggcccatgcggccccgtcacgtgatgcaaggatcgccggcctttccgccagagggcggcacagaactacaactcccagcaagctcccaaggcggccctccgcgcaatgccgctaccggaagtgcgggtcgcgcttccggcggcgtcccggggccaggggggtgcgcctttctccgcgtcggggcggcccggagcgcggtggcgcggcgcgggaggggttttctggtgcgtcctggtccaccatggccaaaccaacaagcaaagattcaggcttgaaggagaagtttaagattctgttgggactgggaacaccgaggccaaatcccaggtctgcagagggtaaacagacggagtttatcatcaccgcggaaatactgagagaactgagcatggaatgtggcctcaacaatcgcatccggatgatagggcagatttgtgaagtcgcaaaaaccaagaaatttgaagagcacgcagtggaagcactctggaaggcggtcgcggatctgttgcagccggagcggccgctggaggcccggcacgcggtgctggctctgctgaaggccatcgtgcaggggcagggcgagcgtttgggggtcctcagagccctcttctttaaggtcatcaaggattacccttccaacgaagaccttcacgaaaggctggaggttttcaaggccctcacagacaatgggagacacatcacctacttggaggaagagctggctgactttgtcctgcagtggatggatgttggcttgtcctcggaattccttctggtgctggtgaacttggtcaaattcaatagctgttacctcgacgagtacatcgcaaggatggttcagatgatctgtctgctgtgcgtccggaccgcgtcctctgtggacatagaggtctccctgcaggtgctggacgccgtggtctgctacaactgcctgccggctgagagcctcccgctgttcatcgttaccctctgtcgcaccatcaacgtcaaggagctctgcgagccttgctggaagctgatgcggaacctccttggcacccacctgggccacagcgccatctacaacatgtgccacctcatggaggacagagcctacatggaggacgcgcccctgctgagaggagccgtgttttttgtgggcatggctctctggggagcccaccggctctattctctcaggaactcgccgacatctgtgttgccatcattttaccaggggcggtggggggatgttgtctttgtgcacagcttgcagccgaactcagggcagctttcagttgctgctgggctggcccaccgggtgcccaggattcagttgctggccatggcatgtccgaacgaggtggtgtcctatgagatcgtcctgtccatcaccaggctcatcaagaagtataggaaggagctccaggtggtggcgtgggacattctgctgaacatcatcgaacggctccttcagcagctccagaccttggacagcccggagctcaggaccatcgtccatgacctgttgaccacggtggaggagctgtgtgaccagaacgagttccacgggtctcaggagagatactttgaactggtggagagatgtgcggaccagaggcctgagtcctccctcctgaacctgatctcctatagagcgcagtccatccacccggccaaggacggctggattcagaacctgcaggcgctgatggagagattcttcaggagcgagtcccgaggcgccgtgcgcatcaaggtgctggacgtgctgtcctttgtgctgctcatcaacaggcagttctatgaggaggagctgattaactcagtggtcatctcgcagctctcccacatccccgaggataaagaccaccaggtccgaaagctggccacccagttgctggtggacctggcagagggctgccacacacaccacttcaacagcctgctggacatcatcgagaaggtgatggcccgctccctctccccacccccggagctggaagaaagggatgtggccgcatactcggcctccttggaggatgtgaagacagccgtcctggggcttctggtcatccttcagaccaagctgtacaccctgcctgcaagccacgccacgcgtgtgtatgagatgctggtcagccacattcagctccactacaagcacagctacaccctgccaatcgcgagcagcatccggctgcaggcctttgacttcctgttgctgctgcgggccgactcactgcaccgcctgggcctgcccaacaaggatggagtcgtgcggttcagcccctactgcgtctgcgactacatgtacgcgggacctcgcccacggcccatgaggctcagggcgtcagaggcgctggggctgtgggagccagagagaggctctgagaagaagaccagcggccccctttctcctcccacagggcctcctggcccggcgcctgcaggccccgccgtgcggctggggtccgtgccctactccctgctcttccgcgtcctgctgcagtgcttgaagcaggagtctgactggaaggtgctgaagctggttctgggcaggctgcctgagtccctgcgctataaagtgctcatctttacttccccttgcagtgtggaccagctgtgctctgctctctgctccatgggcctccccagcccctctggctaccccgtgacctggccgctggggagaggtttcatgcctggatttggtcatcagctttcaggcccaaagacactggagcggctccgaggcgccccagaaggcttctccagaactgacttgcacctggccgtggttccagtgctgacagcattaatctcttaccataactacctggacaaaaccaaacagcgcgagatggtctactgcctggagcagggcctcatccaccgctgtgccagccagtgcgtcgtggccttgtccatctgcagcgtggagatgcctgacatcatcatcaaggcgctgcctgttctggtggtgaagctcacgcacatctcagccacagccagcatggccgtcccactgctggagttcctgtccactctggccaggctgccgcacctctacaggaactttgccgcggagcagtatgccagtgtgttcgccatctccctgccgtacaccaacccctccaagtttaatcagtacatcgtgtgtctggcccatcacgtcatagccatgtggttcatcaggtgccgcctgcccttccggaaggattttgtccctttcatcactaaggcgcctgcggtccaatgtcctcttgtcttttgatgacacccccgagaaggacagcttcagggcccggagtactagtctcaacgagagacccaagaggtacggcctgcggggatgggaatacggcattttccagcgtgacctcaactcggaagctgttgtctccagcccctgggggccgggggccaagctcggccattacggccagagactactttctggggtcttggtctcttttcctagtgaccttcagggcctggccactgaggcctcagtgccgcctcgtctgaggatagccagaccccccaaacaaggcttgaataactctccacccgtgaaagaattcaaggagagctctgcagccgaggccttccggtgccgcagcatcagtgtgtctgaacatgtggtccgcagcaggatacagacgtccctcaccagtgccagcttggggtctgcagatgagaactccgtggcccaggctgacgatagcctgaaaaacctccacctggagctcacggaaacctgtctggacatgatggctcgatacgtcttctccaacttcacggctgtcccgaagaggtctcctgtgggcgagttcctcctagcgggtggcaggaccaaaacctggctggttgggaacaagcttgtcactgtgacgacaagcgtgggaaccgggacccggtcgttactaggcctggactcgggggagctgcagtccggcccggagtcgagctccagccccggggtgcatgtgagacagaccaaggaggcgccggccaagctggagtcccaggctgggcagcaggtgtcccgtggggcccgggatcgggtccgttccatgtcggggggccatggtcttcgagttggcgccctggacgtgccggcctcccagttcctgggcagtgccacttctccaggaccacggactgcaccagccgcgaaacctgagaaggcctcagctggcacccgggttcctgtgcaggagaagacgaacctggcggcctatgtgcccctgctgacccagggctgggcggagatcctggtccggaggcccacagggaacaccagctggctgatgagcctggagaacccgctcagccctttctcctcggacatcaacaacatgcccctgcaggagctgtctaacgccctcatggcggctgagcgcttcaaggagcaccgggacacagccctgtacaagtcactgtcggtgccggcagccagcacggccaaaccccctcctctgcctcgctccaacacagtggcctctttctcctccctgtaccagtccagctgccaaggacagctgcacaggagcgtttcctgggcagactccgccgtggtcatggaggagggaagtccgggcgaggttcctgtgctggtggagcccccagggttggaggacgttgaggcagcgctaggcatggacaggcgcacggatgcctacagcaggtgtggggcacagctggtggcagtgctgctgcgtcaacgggcgggggccgtagcctggtgctcgggctggtctgtggccctgggatggaggacagatagggcctcaccacctccaggtcaaccccagtcgtcctcagtctccagccaggaggagaagtcgctccacgcggaggagctggttggcaggggcatccccatcgagcgagtcgtctcctcggagggtggccggccctctgtggacctctccttccagccctcgcagcccctgagcaagtccagctcctctcccgagctgcagactctgcaggacatcctcggggaccctggggacaaggccgacgtgggccggctgagccctgaggttaaggcccggtcacagtcagggaccctggacggggaaagtgctgcctggtcggcctcgggcgaagacagtcggggccagcccgagggtcccttgccttccagctccccccgctcgcccagtggcctccggccccgaggttacaccatctccgactcggccccatcacgcaggggcaagagagtagagagggacgccttaaagagcagagccacagcctccaatgcagagaaagtgccaggcatcaaccccagtttcgtgttcctgcagctctaccattcccccttctttggcgacgagtcaaacaagccaatcctgctgcccaatgagtcacagtcctttgagcggtcggtgcagctcctcgaccagatcccatcatacgacacccacaagatcgccgtcctgtatgttggagaaggccagagcaacagcgagctcgccatcctgtccaatgagcatggctcctacaggtacacggagttcctgacgggcctgggccggctcatcgagctgaaggactgccagccggacaaggtgtacctgggaggcctggacgtgtgtggtgaggacggccagttcacctactgctggcacgatgacatcatgcaagccgtcttccacatcgccaccctgatgcccaccaaggacgtggacaagcaccgctgcgacaagaagcgccacctgggcaacgactttgtgtccattgtctacaatgactccggtgaggacttcaagcttggcaccatcaaggcagcaaccagcgtcaccctcttcctggaggtgggctgggtcggccagtgtcacagcacggtccggggccagttcaactttgtccacgtgatcgtcaccccgctggactacgagtgcaacctggtgtccctgcagtgcaggaaagacatggagggccttgtggacaccagcgtggccaagatcgtgtctgaccgcaacctgcccttcgtggcccgccagatggccctgcacgcaaatatggcctcacaggtgcatcatagccgctccaaccccaccgatatctacccctccaagtggattgcccggctccgccacatcaagcggctccgccagcgggtagggaatatggggctccctcagcggggtgtgctggctgcccaagctgtggggcggatctgcgaggaagccgcctactccaaccccagcctacctctggtgcaccctccgtcccatagcaaagcccctgcacagactccagccgagcccacacctggctatgaggtgggccagcggaagcgcctcatctcctcggtggaggacttcaccgagtttgtgtga

SEQ ID NO: 153106 - DNA, 5407 bp, Homo sapiens
atggccaaaccaacaagcaaagattcaggcttgaaggagaagtttaagattctgttgggactgggaacaccgaggccaaatcccaggtctgcagagggtaaacagacggagtttatcatcaccgcggaaatactgagagaactgagcatggaatgtggcctcaacaatcgcatccggatgatagggcagatttgtgaagtcgcaaaaaccaagaaatttgaagagcacgcagtggaagcactctggaaggcggtcgcggatctgttgcagccggagcggacgctggaggcccggcacgcggtgctggctctgctgaaggccatcgtgcaggggcagggcgagcgtttgggggtcctcagagccctcttctttaaggtcatccaaggaattacccttccaacgaaagaccttcacgaaaaggctggaggttttcaaggccctcacagacaatgggagacacatcacctacttggaggaagagctggctgactttgtcctgcagtggatggatgttggcttgtcctcggaattccttctggtgctggtgaactttggtcaaattcaataagcttgttaccctcgacgaagtacaatcgcaaaggaatgggttcaagatgatctgtctgcttgtgcgtccggaccgcgtcctcttgtggacatagaaggtctcccttgcaaggttgctggacgccgtgggtcttgctaacaactgcctggccggctgagagcctcccgctgttcatcgttaccctctgtcgcaccatcaacgtcaaggagctctgcgagccttgctggaagctgatgcggaacctccttggcacccacctgggccacagcgccatctacaacatgtgccacctcatggaggacagagcctacatggaggacgcgcccctgctgagaggagccgtgttttttgtgggcatggctctctggggagcccaccggctctattctctcaggaagtcgccgacatctgtgtttccatcattttaccaggccatggcatgtccgaacgaggtggtgtcctatgagatcgtcctgtccatcaccaggctcatcaagaagtataggaaggagctccaggtggtggcgtgggacattctgctgaacatcatcgaacggctccttcaacagctccagaccttggacagcccggagctcaggaccatcgtccatgacctgttgaccacggtggaggagctgtgtgaccagaacgagttccacgggtctcaggagagatactttgaactggtggagagatgtgcggaccagaggcctgagtcctccctcctgaacctgatctcctatagagcgcagtccatccacccggccaaggacggctggattcagaacctgcaggcgctgatggagagattcttcaggagcgagtcccgaggcgccgtgcgcatcaaggtgctggacgtgctgtcctttgtgctgctcatcaacaggcagttctatgaggaggagctgattaactcagtggtcatctcgcagctctcccacatccccgaggataaagaccaccaggtccgaaagctggccacccagttgctggtggacctggcagagggctgccacacacaccacttcaacagcctgctggacatcatcgagaaggtgatggcccgctccctctccccacccccggagctggaagaaagggatgtggccgcatactcggcctccttggaggatgtgaagacagccgtcctggggcttctggtcatccttcagaccaagctgtacaccctgcctgcaagccacgccacgcgtgtgtatgagatgctggtcagccacattcagctccactacaagcacagctacaccctgccaatcgcgagcagcatccggctgcaggcctttgacttcctgtttctgctgcgggccgactcactgcaccgcctgggcctgcccaacaaggatggagtcgtgcggttcagcccctactgcgtctgcgactacatggagccagagagaggctctgagaagaagaccagcggccccctttctcctcccacagggcctcctggcccggcgcctgcaggccccgccgtgcggctggggtccgtgccctactccctgctcttccgcgtcctgctgcagtgcttgaagcaggagtctgactggaaggtgctgaagctggttctgggcaggctgcctgagtccctgcgctataaagtgctcatctttacttccccttgcagtgtggaccagctgtgctctgctctctgctccatgctttcaggcccaaagacactggagcggctccgaggcgccccagaaggcttctccagaactgacttgcacctggccgtggttccagtgctgacagcattaatctcttaccataactacctggacaaaaccaaacagcgcgagatggtctactgcctggagcagggcctcatccaccgctgtgccagacagtgcgtcgtggccttgtccatctgcagcgtggagatgcctgacatcatcatcaaggcgctgcctgttctggtggtgaagctcacgcacatctcagccacagccagcatggccgtcccactgctggagttcctgtccactctggccaggctgccgcacctctacaggaactttgccgcggagcagtatgccagtgtgttcgccatctccctgccgtacaccaacccctccaagtttaatcagtacatcgtgtgtctggcccatcacgtcatagccatgtggttcatcaggtgccgcctgcccttccggaaggattttgtccctttcatcactaagggcctgcggtccaatgtcctcttgtcttttgatgacacccccgagaaggacagcttcagggcccggagtactagtctcaacgagagacccaagagtctgaggatagccagaccccccaaacaaggcttgaataactctccacccgtgaaagaattcaaggagagctctgcagccgaggccttccggtgccgcagcatcagtgtgtctgaacatgtggtccgcagcaggatacagacgtccctcaccagtgccagcttggggtctgcagatgagaactccgtggcccaggctgacgatagcctgaaaaacctccacctggagctcacggaaacctgtctggacatgatggctcgatacgtcttctccaacttcacggctgtcccgaagaggtctcctgtgggcgagttcctcctagcgggtggcaggaccaaaacctggctggttgggaacaagcttgtcactgtgacgacaagcgtgggaaccgggacccggtcgttactaggcctggactcgggggagctgcagtccggcccggagtcgagctccagccccggggtgcatgtgagacagaccaaggaggcgccggccaagctggagtcccaggctgggcagcaggtgtcccgtggggcccgggatcgggtccgttccatgtcggggggccatggtcttcgagttggcgccctggacgtgccggcctcccagttcctgggcagtgccacttctccaggaccacggactgcaccagccgcgaaacctgagaaggcctcagctggcacccgggttcctgtgcaggagaagacgaacctggcggcctatgtgcccctgctgacccagggctgggcggagatcctggtccggaggcccacagggaacaccagctggctgatgagcctggagaacccgctcagccctttctcctcggacatcaacaacatgcccctgcaggagctgtctaacgccctcatggcggctgagcgcttcaaggagcaccgggacacagccctgtacaagtcactgtcggtgccggcagccagcacggccaaaccccctcctctgcctcgctccaacacagactccgccgtggtcatggaggagggaagtccgggcgaggttcctgtgctggtggagcccccagggttggaggacgttgaggcagcgctaggcatggacaggcgcacggatgcctacagcaggtcgtcctcagtctccagccaggaggagaagtcgctccacgcggaggagctggttggcaggggcatccccatcgagcgagtcgtctcctcggagggtggccggccctctgtggacctctccttccagccctcgcagcccctgagcaagtccagctcctctccccgagctgcagactctgcaggacatcctcgggggaccctggggacaaggccgacgtgggccggctgagccctgaggttaaggcccggtcacagtcagggaccctggacggggaaagtgctgcctggtcggcctcgggcgaagacagtcggggccagcccgagggtcccttgccttccagctccccccgctcgcccagtggcctccggccccgaggttacaccatctccgactcggccccatcacgcaggggcaagagagtagagagggacgccttaaagagcagagccacagcctccaatgcagagaaagtgccaggcatcaaccccagtttcgtgttcctgcagctctaccattcccccttctttggcgacgagtcaaacaagccaatcctgctgcccaatgagtcacagtcctttgagcggtcggtgcagctcctcgaccagatcccatcatatcgacacccacaagatcgccgtcctgtatgttggagaaggccagagcaacagcgaggctcgccatcctgtccaatgagcatggctcctacaggtacacggagttcctgacgggcctgggccggcttcatcgagctgaaaggactgccagccggacaaggtgttacctggggaggcctgggacgtgttgtgggtgaggacgggccagtttcaccttacttgcttgggcacgattgacattcatggcaagccgtcttccacatcgccaccctgatgcccaccaaggacgtggacaagcaccgctgcgacaagaaagcgccacctgggcaacgactttgtgtccattgtctacaatgactccggtgaggacttcaagcttggcaccatcaagggccagttcaattttgttccacgtgattcgtcaccccgctggaattacggagtgcaacctgggtgttccctggcagtgcaggaaagacatggagggccttgtggacaccagcgtggccaagatcgtgtctgaccgcaacctgccctttgtggcccgccagatggccctgcacgcaaatatggcctcacaggtgcatcatagccgctccaaccccaccgatatctacccctccaagtggattgcccggctccgccacatcaagcggctccgccagcggatctgcgaggaagccgcctactccaaccccagcctacctctggtgcaccctccgtcccatagcaaagcccctgcacagactccagccgagcccacacctggctatgaggtgggccagcggaagcgcctcatctcctcggtggaggacttcaccgagtttgtgtga

SEQ ID NO: 153107 - DNA, 5646 bp, Homo sapiens
ggtgcgtcctggtccaccatggccaaaccaacaagcaaagattcaggcttgaaggagaagtttaagattctgttgggactgggaacaccgaggccaaatcccaggtctgcagagggtaaacagacggagtttatcatcaccgcggaaatactgagagaactgagcatggaatgtggcctcaacaatcgcatccggatgatagggcagatttgtgaagtcgcaaaaaccaagaaatttgaagagcacgcagtggaagcactctggaaggcggtcgcggatctgttgcagccggagcggacgctggaggcccggcacgcggtgctggctctgctgaaggccatcgtgcaggggcagggcgagcgtttgggggtcctcagagccctcttctttaaggtcatcaaggattacccttccaacgaagaccttcacgaaaggctggaggttttcaaggccctcacagacaatgggagacacatcacctacttggaggaagagctggctgactttgtcctgcagtggatggatgttggcttgtcctcggaattccttctggtgctggtgaacttggtcaaattcaatagctgttacctcgacgagtacatcgcaaggatggttcagatgatctgtctgctgtgcgtccggaccgcgtcctctgtggacatagaggtctccctgcaggtgctggacgccgtggtctgctacaactgcctgccggctgagagcctcccgctgttcatcgttaccctctgtcgcaccatcaacgtcaaggagctctgcgagccttgctggaagctgatgcggaacctccttggcacccacctgggccacagcgccatctacaacatgtgccacctcatggaggacagagcctacatggaggacgcgcccctgctgagaggagccgtgttttttgtgggcatggctctctggggagcccaccggctctattctctcaggaactcgccgacatctgtgtttccatcattttaccaggccatggcatgtccgaacgaggtggtgtcctatgagatcgtcctgtccatcaccaggctcatcaagaagtataggaaggagctccaggtggtggcgtgggacattctgctgaacatcatcgaacggctccttcaacagctccagaccttggacagcccggagctcaggaccatcgtccatgacctgttgaccacggtggaggagctgtgtgaccagaacgagttccacgggtctcaggagagatactttgaactggtggagagatgtgcggaccagaggcctgagtcctccctcctgaacctgatctcctatagagcgcagtccatccacccggccaaggacggctggattcagaacctgcaggcgctgatggagagattcttcaggagcgagtcccgaggcgccgtgcgcatcaaggtgctggacgtgctgtcctttgtgctgctcatcaacaggcagttctatgaggaggagctgattaactcagtggtcatctcgcagctctcccacatccccgaggataaagaccaccaggtccgaaagctggccacccagttgctggtggacctggcagagggctgccacacacaccacttcaacagcctgctggacatcatcgagaaggtgatggcccgctccctctccccacccccggagctggaagaaagggatgtggccgcatactcggcctccttggaggatgtgaagacagccgtcctggggcttctggtcatccttcagaccaagctgtacaccctgcctgcaagccacgccacgcgtgtgtatgagatgctggtcagccacattcagctccactacaagcacagctacaccctgccaatcgcgagcagcatccggctgcaggcctttgacttcctgtttctgctgcgggccgactcactgcaccgcctgggcctgcccaacaaggatggagtcgtgcggttcagcccctactgcgtctgcgactacatggagccagagagaggctctgagaagaagaccagcggccccctttctcctcccacagggcctcctggcccggcgcctgcaggccccgccgtgcggctggggtccgtgccctactccctgctcttccgcgtcctgctgcagtgcttgaagcaggagtctgactggaaggtgctgaagctggttctgggcaggctgcctgagtccctgcgctataaagtgctcatctttacttccccttgcagtgtggaccagctgtgctctgctctctgctccatgctttcaggcccaaagacactggagcggctccgaggcgccccagaaggcttctccagaactgacttgcacctggccgtggttccagtgctgacagcattaatctcttaccataactacctggacaaaaccaaacagcgcgagatggtctactgcctggagcagggcctcatccaccgctgtgccagacagtgcgtcgtggccttgtccatctgcagcgtggagatgcctgacatcatcatcaaggcgctgcctgttctggtggtgaagctcacgcacatctcagccacagccagcatggccgtcccactgctggagttcctgtccactctggccaggctgccgcacctctacaggaactttgccgcggagcagtatgccagtgtgttcgccatctccctgccgtacaccaacccctccaagtttaatcagtacatcgtgtgtctggcccatcacgtcatagccatgtggttcatcaggtgccgcctgcccttccggaaggattttgtccctttcatcactaagggcctgcggtccaatgtcctcttgtcttttgatgacacccccgagaaggacagcttcagggcccggagtactagtctcaacgagagacccaagagtctgaggatagccagaccccccaaacaaggcttgaataactctccacccgtgaaagaattcaaggagagctctgcagccgaggccttccggtgccgcagcatcagtgtgtctgaacatgtggtccgcagcaggatacagacgtccctcaccagtgccagcttggggtctgcagatgagaactccgtggcccaggctgacgatagcctgaaaaacctccacctggagctcacggaaacctgtctggacatgatggctcgatacgtcttctccaacttcacggctgtcccgaagaggtctcctgtgggcgagttcctcctagcgggtggcaggaccaaaacctggctggttgggaacaagcttgtcactgtgacgacaagcgtgggaaccgggacccggtcgttactaggcctggactcgggggagctgcagtccggcccggagtcgagctccagccccggggtgcatgtgagacagaccaaggaggcgccggccaagctggagtcccaggctgggcagcaggtgtcccgtggggcccgggatcgggtccgttccatgtcggggggccatggtcttcgagttggcgccctggacgtgccggcctcccagttcctgggcagtgccacttctccaggaccacggactgcaccagccgcgaaacctgagaaggcctcagctggcacccgggttcctgtgcaggagaagacgaacctggcggcctatgtgcccctgctgacccagggctgggcggagatcctggtccggaggcccacagggaacaccagctggctgatgagcctggagaacccgctcagccctttctcctcggacatcaacaacatgcccctgcaggagctgtctaacgccctcatggcggctgagcgcttcaaggagcaccgggacacagccctgtacaagtcactgtcggtgccggcagccagcacggccaaaccccctcctctgcctcgctccaacacagtggcctctttctcctccctgtaccagtccagctgccaaggacagctgcacaggagcgtttcctgggcagactccgccgtggtcatggaggagggaagtccgggcgaggttcctgtgctggtggagcccccagggttggaggacgttgaggcagcgctaggcatggacaggcgcacggatgcctacagcaggtcgtcctcagtctccagccaggaggagaagtcgctccacgcggaggagctggttggcaggggcatccccatcgagcgagtcgtctcctcggagggtggccggccctctgtggacctctccttccagccctcgcagcccctgagcaagtccagctcctctcccgagctgcagactctgcaggacatcctcggggaccctggggacaaggccgacgtgggccggctgagccctgaggttaaggcccggtcacagtcagggaccctggacggggaaagtgctgcctggtcggcctcgggcgaagacagtcggggccagcccgagggtcccttgccttccagctccccccgctcgcccagtggcctccggccccgaggttacaccatctccgactcggccccatcacgcaggggcaagagagtagagagggacgccttaaagagcagagccacagcctccaatgcagagaaagtgccaggcatcaaccccagtttcgtgttcctgcagctctaccattcccccttctttggcgacgagtcaaacaagccaatcctgctgcccaatgagtcacagtcctttgagcggtcggtgcagctcctcgaccagatcccatcatacgacacccacaagatcgccgtcctgtatgttggagaaggccagagcaacagcgagctcgccatcctgtccaatgagcatggctcctacaggtacacggagttcctgacgggcctgggccggctcatcgagctgaaggactgccagccggacaaggtgtacctgggaggcctggacgtgtgtggtgaggacggccagttcacctactgctggcacgatgacatcatgcaagccgtcttccacatcgccaccttgatgccccaccaaggacgtggacaagcaccgctgcgacaagaagcgccacctgggcaacgacttgtggtccattgtctacaattaactccggtgaggactttcaagcttggcaccaatcagggcccagttaacctttggtcaacgtgatcgtcaaccccgctgggactacgagtgcaaacctggtgcccctgccagtgcaggaaaagacatggaaggccttgtggaaaaccaagcgtggcccaaaaatcgtgtctgaccggcaaccttgcccttcgtggccccgccagatgcctcctgcacgcaaatatggcctcacaggtgcatcattagccgctccaaaccccaaccgatatctaccccttccaagtggattgcccggctccgcccaatccaaacggctccgccagcggattctggcgaggaagccgccctactcccaaccccagccttaccttttgtggcaccctccgtcccatagcaaagcccctgcacagactccagccgagcccacacctggctatgaggtgggccagcggaacgccctcaatctcctcggtggaggacttcaccgagtttgtgtgaggccggggccctccctcctgcactggccttggacggtattgcctgtcagtgaaataaataaagtcctgaccccagtgcacagacatagaggcgcatccaaaaaaaactacaaaaaagatcaaaaaaacactgtttaaagaaaaatcctgaattaccgggcggcgtttgtgaatg

SEQ ID NO: 153108 - DNA, 474 bp, Homo sapiens
ccaccgtgtctcattcatcactgctgtctgctagagcccttcctctcagcccccatgttgggagaggggagtggattcttgctgctggtatgagactccctgggacctagaggctggcaaatgtttaaaatcaccacgtgtaagaggcagccaagtcagctctgccaactgctaggggagttgggaaagagtgggtgtgtgtccgcatcccctctgtaggaaaaagaacttagtagcttgctgctccctcaccaccccccaccaggttcaagaccctttttctgggagacctacaggatgttggctgcttgcagactggtcaatgggggatgacggtggggaggttgccagatgtgagacttgagtagcatttgtacacatggccctgtattgtccttgaagaacatcaataaaatatatggttttaaattgcaaaaaaaaaaaaaaaaaaaaaaaaaaaggtcgtatcgatgt

SEQ ID NO: 153109 - DNA, 529 bp, Homo sapiens
ttttttttttaaaaccatatattttattgatgttcttcaaggacaatacagggccatgtgtacaaatgctactcaagtctcacatctggcaacctccccaccgtcatcccccattgagcagtctgcaagcagccaacatcctgtaggtctccctgttgcccttccccaggatgtcaggcctcaccgtgctgagccttcaggaggctggaaatagcagggctggcttctaagcttgagctctggggccaggaaagagtcaagggcaaaattgcccacgatcttcccctcctccctctccctcccattgcttaagtatggccagaattgtgggtgaaaatgcccccagcgactcctccattgaggcagcctaggcttcccctcttcagccatctctatcacattctttatttccaaatgacctgccccaccaaccaccaagatggcagagtgaccattttgcagggagtgtgaatcagtgcacagacggcagtgacaaggtgcccctgatggcatgaatcttgtcatcctg

SEQ ID NO: 153110 - DNA, 678 bp, Homo sapiens
ccaaacacttggccatatgtctgacaattcatcctgacattttaaaaaacaatagtaataataataataataataataataataatgaaaaaagacaaagataccacagttctgaagccaaagaccagaatgctgccattctcaggcacagcccttagtgcatagagagttggaggcaaaaaattttttttaggaaaggggaatgaaaaaaaaatcccagttgtttaaaccatgcagggttctttaaataaaccactccccagcccctaacctagggcagcaactaagatcccaaatcctttccctctcccccaccccaacctgctcctcagaccacaccacactccatcctgtccacaaaggcaatgaccccagtcaccatccaggccctgttttccaggatagtgaggtatttatgtgactgcagaagggactctttgacccaaagtttttgaagagaagaaaagagtcagacccccagaacaggacatatttcatacaggcctatctcataaccctggccccagccagaggccctgcctaagtgagctccgcaacccacccctttggggacaaggtaagcattggccaatgagatcctctctagcatgcggtgggtaaacaagtgaacttttgcagaaaaggacagcaggagaaaccccgatcactaggctccat

SEQ ID NO: 153111 - DNA, 373 bp, Homo sapiens
gagaagttccgccacaacatcgcctacttcccacagatcgtctcagtggctgcccgcatgctcaaggacccccgttcttatccggggttggccctgacctctctctacccacagaacacgaccctggacctcctagaccgggggctgcaggtccatgtggtggtggacgcctgctcctcacgcagccaggtggaccggctggtggctctggcccgcatgagacagagtggtgccttcctctccaccagcgaagggctcattctgcagcttgtgggcgatgccgtccacccccagttcaaggagatccagaaactcatcaaggagcccgccccagacagcggactgctgggcctcttccaaggccagaactccc

SEQ ID NO: 153112 - DNA, 1168 bp, Homo sapiens
gtggtggaattcccagccctgggaagcccgcaagaggcctcagcggtggccgtccgagcgccgagaggtgagggtgcccccgccttatcctgcttaggggccgttccgggctcgaacccggcaccttccggaaaatggcggctgccaggcccagcctgggccgagtcctcccaggattcctctgtcctgttcctgtgtgacatgcaggagaagttccgccacaacatcgcctacttcccacagatcgtctcagtgggctgcccgcatgctcaaggtggcccggctgcttgaggtgccagtcatgctgacggagcaagtacccacaaggcctgggccccacggtgcccgaagctggggactgagggccttcggccgcttggcaaaagacctgcttcagcatggttgcctgcccttgcagcaggagctggacagtcggccccagctgcgctctgtgctgctctgtggcattgaggcacaggcctgcatcttggacccccgttcttatccggggttggccctgacctctctctacccacagaacacgaccctgggacctcctagaccgggggctgcaggtccatgtggtggtggacgcctgctcctcacgcagccaggtggaccggctggtggctctggcccgcatgagacagagtggtgccttcctctccaccagcgaagggctcattctcaagcttgtgggcgatgccgtccaccccccagttcaaggagatcccagaaactcatcaaggagcccgccccagacagcggactgctgggcctcttccaaggccagaactccctccctccactgaactccaaccctgccttgagggaagaccaccctcctgttcacccgggacctcagtgggaagcccgtttccccccatccctgggattcccaagagtgggtgcgattccaccagggagttgccgcccccttgtggggggggggcagtggtgctgccttcccattggacagctgctcccggaaatgcaaatgagactcctggaaactgggtgggaaatgggctgagccaagatggaggcggggctcggccccgggccacttacacggagcgggaaggggaggggaagaagagtctcagactgtgggacacgaactcgcagaataaacatatatgtggctgtgaaaaaaaaaaaaaaaaaa

SEQ ID NO: 153113 - DNA, 792 bp, Homo sapiens
atgggggtgctgccatcctatttctgggatgaggaagcagaagctcaggaaggtatttgcttaagtctgaagcagcggatgcctgtgggcagggctggacattcaggccatttcctggctgatgccacttccagggctctggccaggaggagggaagagtgggggaaacaagaagagcgtggtgtgaaggaatcctcagagagcaccaacaccacctcgaggatgaagacaccaaaggaagatgtgcgacccggcatgacagccttcgaacctgaggccctggggaacctggttgagggccggacttccatcgattctattttgaaaaccgtgagcaattccttctctcttggtgcctgttgtctgctctcgttccatgtcctgctggatggcacagcaggccgggggtcagatagggatgaacaaaacgcacacagtgtggtcccggaacagcaagcccgtgcacaccaccatcctgaatcccacatccacctgatgggcgacgagtcagcctgcatcgcctacatccgcacacgcagtacctggacgctggcggcatcccacgcaccgcccagtcggagagacccgtgtctggcaccgccgggatggcaaatggcagatcgtccacttcacagatctggggcgccctccgtcctgccccactcccaagacactgacactgagatgaatcaagaaagatacatgaatgcttccatctccttcccgaagcccccacactctaccagtcagcaagtcctgttcattcaacctggtgaagaacgagagatctga

SEQ ID NO: 153114 - DNA, 126 bp, Homo sapiens
tccgactacatgacagcattcagaggagggacaccactacctgatcttcgaccttcactgtatccagcagatcctggaggctgtgctgcactgccaccagagggggtggtgcaccgggacctgaag

SEQ ID NO: 153115 - DNA, 370 bp, Homo sapiens
tcactgtatccagcagatcctggaggctgtgctgcactgccaccagagggggtggtgcaccgggacctgaaggccaggggagaagaaaaaccagactctaggccgtgcagttctcctttcttttacctgaaggagattgcagagtctaggactgcaccagctgcacagccttgctccttcagcagggacttcatggatctccctgctgatcctcatggtatcagtggctgggtttgcagggactccggatatctctccccagaagtgctgcggaaggacccgtacgggaagcctgggacctgtgggcttgtgggggttgaaggttctctggtcctcttccaggggtcatcctgtacatcctgctggttgg

SEQ ID NO: 153116 - DNA, 1596 bp, Homo sapiens
atggctaccatcacctgcacccgcttcacggaagagtaccagctcttcgaggaattgggcaagggagccttctcggtggtgcgaaggtgtgtgaaggtgctggctggccaggagtatgctgccaagatcatcaacacaaagaagctgtcagccagagaccatcagaagctggagcgtgaagcccgcatctgccgcctgctgaagcaccccaacatcgtccgactacatgacagcatctcagaggagggacaccactacctgatcttcgacctggtcactggtggggaactgtttgaagatatcgtggcccgggagtattacagtgaggcggatgccagtcactgtatccagcagatcctggaggctgtgctgcactgccaccagatgggggtggtgcaccgggacctgaagcctgagaatctgttgctggcctccaagctcaagggtgccgcagtgaagctggcagactttggcctggccatagaggtggagggggagcagcaggcatggtttgggtttgcagggactcctggatatctctccccagaagtgctgcggaaggacccgtacgggaagcctgtggacctgtgggcttgtggggtcatcctgtacatcctgctggttgggtaccccccgttctgggatgaggaccagcaccgcctgtaccagcagatcaaagccggcgcctatgatttcccatcgccggaatgggacactgtcaccccggaagccaaggatctgatcaataagatgctgaccattaacccatccaaacgcatcacagctgccgaagcccttaagcacccctggatctcgcaccgctccaccgtggcatcctgcatgcacagacaggagaccgtggactgcctgaagaagttcaatgccaggaggaaactgaagggagccattctcaccacgatgctggccaccaggaacttctccggagggaagagtgggggaaacaagaagagcgatggtgtgaagaaaagaaagtccagttccagcgttcagttaatggaatcctcagagagcaccaacaccaccatcgaggatgaagacaccaaagtgcggaaacaggaaattataaaagtgacagagcagctgattgaagccataagcaatggaggttttgagtcctacacgaagatgtgcgaccctggcatgacagccttcgaacctgaggccctggggaacctggttgagggcctggacttccatcgattctattttgaaaacctgtggtcccggaacagcaagcccgtgcacaccaccatcctgaatccccacatccacctgatgggcgacgagtcagcctgcatcgcctacatccgcatcacgcagtacctggacgctggcggcatcccacgcaccgcccagtcggaggagacccgtgtctggcaccgccgggacggcaaatggcagatcgtccacttccacagatctggggcgccctccgtcctgccccactcccaagacactgacactgagatgaatcaagaaagatacatgaatgcttccatctccttcccgaagcccccacactctaccagtcagcaagtcctgttcattcaacctggtgaagaacgagagatctga

SEQ ID NO: 153117 - DNA, 4890 bp, Homo sapiens
  misc_feature (1)...(4890): n = a,t,c or g
gaattcccgggtcgacgatttcgtgctcgtcagtcaaaccggttctctgtttgcactcggcagcacgggcatgcaagtggtccctaggttcgggagcagagcagcagcgcctcagtcctggtcccccagtcccaagcctcacctgcctgcccagcgccaggatggccaccatcacctgcacccgcttcacggaagagtaccagctcttcgaggaattgggcaagggagccttctcggtggtgcgaaggtgtgtgaaggtgctggctggccaggagtatgctgccaagatcatcaacacaaagaagctgtcagccagagaccatcagaagctggagcgtgaagcccgcatcttgccgcctgctgaagcaccccaacatcgtccgactacatgacagcatctcagaggagggacaccactacctgatcttcgacctggtcactggtggggaacttgttgaagatatcgtggcccgggagtattacagtgaggcggatgccagtcactgtatccagcacatcctggaggctgtgctgcactgccaccagatgggggtggtgcaccgggacctgaagcctgagaatctgttgctggcctccaagctcaagggtgccgcagtgaagctggcagactttggcctggccatagaggtggagggggagcagcaggcatgcgttgggtttgcagggactcctggatatctctccccagaagtgctgcggaaggacccgtacgggaagcctgtggacctgtgggcttgtggggtcatcctgtacatcctgctggttgggtaccccccgttctgggatgaggaccagcaccgcctgtaccagcagatcaaagccggcgcctatgatttcccatcgccggaatgggacactgtcaccccggaagccaaggatctgatcaataagatgctgaccattaacccatccaaacgcatcacagctgccgaagcccttaagcacccctggatctcgcaccgctccaccgtggcatcctgcatgcacagacaggaggcccgtgggcctgcgtgaaagaagttcaatcgccaggaggaaatctgaagggagccattctctccacggatgctggcccaccaggaacttctccggagggaagagtgggggaaacaagaagagcgatggtgtgaaggaatcctcagagagcgccaacaccaccatcgaggatgaagccaccaaagtgcggaaccaggaaattataaaagtgacagagcagctgattgaagccataagcaatggagattttgagtcctacacgaagatgtgcgaccctggcatgacagccttcgaacctgaggccctggggaacctggttgagggcctggacttccatcgattctattttgaaaacctgtggtaccggaacagcaagcccgtgcacaccaccatcctgaatccccacatccacctgatgggcgacgagtcagcctgcatcgcctacatccgcatcacgccagtacctggacgctggcggcatcccacgcaccgcccagtcggaggagacccgtgtctggcaccgccgggacggcaaatggcagatcgtccacttccacagatctggggcgccctccgtcctgccccactgagggaccaggctggggtcgctgcgttgctgtgccgcacagatccactctgtccgtggagtggagctgctggttctcccaggtggattttgctggaattctcccatgtcatcaccccaccaccgtcacttctgtacctgcatcaagaaaacctgcttgttcacaaaagtcatcgcaacttcagagcgaacggccacatcttccccacctctcacccccaccctctcccctgccaggctggggcttcctcaggcatgggtgtccacagcactggccccctctccccagcctcagctgctgtccgcctgatctgtcttgggctgtaggctagaatgcccgggctggtgcccaccaggggctggggagaaggaggggtggcatgatgaggaaggcagcatccgtccgtccctctcccagacctctcctcttccagtgtccccggggaagggcagatgacactcccttccccctaagccaaccgcactgaaggagtggggagaagagcatacgccaggagcctcctgcctcaaagtgctcccctaagtcttcttcctcctgtgctgacctcagggtggtctgacccttccctcggtgtgggggatgtggccctctcaggtgcccctacttgctttctgcttccttctggtgaagtccacctccaacattaacctgcccaccccacccccgtcatccctggagaattccagctttgtcgtatctcagagagggaatctaattgtttttggggggcaaaagaaagcaacgtttaggtatcacttctacttggaccgcatgcctttttatagccaaatttctgtgtatttcgtaaatggatttcgcgttaatggatatttatgtaataactagacttctcagattattgtgagaagggtcaggttggaaggggtgtaggaagaggggtgaggggtagtttttttctgttctagttttttttttttttttttgtcatctctgaggtggaccttgtcacctgtggttattggggccaaggcggactcagctccgggngagaagggcctctctgccatttcggtcccaaggtgagctgacacaggcgttccttttgggactgtggaagcatcagatgccagcactgactcaggaacagcaagtcagggcagagaggaggagggaggctgtcaggatggaaatacctggacttttctttgcttccctcgcaaactggggtcttctctaccgaacttcccaggatttcatctcaccatatctgtgtgccgccccccagcaccccccacccacctctggggggccccgtnagcgtgtgtcttcattgcctctttcccctttggcgtctgatgacccacagcaaagccactgggaatttttactcttcatgcctcatcctgcagcctcgggttcgcattctctctttcttttcctctttccctctttccctgggattgactctgagtggaataccttggcacatccactaggatctactgtctgcactgttttctttgcatgactttatacgcagtaagtatgttgaaaacaaacaaaaagaagaaaacactcaacaaaaccaatctacatgttttggactaaaaaaaaaaaatagaggttgtattctcagtgtccgactcggaattatgttgctgcctctctgtgcttttggcctctgtgtggccgtgttttgccagcatgagatactgtcccctctggaggattttaggggaggaagagccacgtccccagggattgggaggaggctccgggtacccttgaccctcctggggtgttggttgggagcagaactgggtgagggatgtttgatccccagattttcttgagctctccccgattcacccagctgtctgctggggttctttttcttcaaagtcctgcttgcccagggcccaggtgagacagggcaacgcagggtctgcaggccaggagagatgctgcccaggcctcctggtttccaagctggtccatcactggcctctgtccttggcagagaccttgctgcccaggcccaggggcaggctcttgggctcaagggcccaagaggttttccccagtaaaggcccagtgatcccattatcccaggggcaaaaccacctgtccccttttgagctgccagtttcctaacagccatccccagttcaagggtgagggtgtggccttcaccaggggctgctgtaattaccgagcaaggtctgagctcttcttcagcctcagttccctcattggttaaaagggttctttgttcccatccagccgatgaaggagcaaacgtctggctatgtgaagcctaatttacctgcaggaactggcagggatagtcactggctggactcctgtttacttctagacctggtcaggctccatcccctcccccacctgcccctgattcccctcgtcggtgcctgtcaactgcttttcagcagtggactgcaggggaaagagcagtgatttggggtgagtaggcttcaattcccagctctgaccagacttgctgtgtgaccttgggcaagttcctttccctctttggagcttggtttccctgccagaggaaactgagctggaggagcctgaggtcctgcctttcattggctgacacacctcctgtccactgtgtcactctccaagtgccagagaagtggaggcagatcgctaccccaggctgagatggcccccactgtgaaggccacgcctgtgggtgggcagccacctggtgccaccacagggcaccagggatgatcctgatgcggcaggcaggggagactcacagaaaaatctgcccagagcctaccctcaccagacaaactctgtgctcctccaaaacatcctttagatgcaaaataataataaataataataataaataaataaataaaaatccaaacccaagtcaaaaccttggctccagcatgaaaacacgtttacaggaaagtgttctcctgggtttgtgcccaccatggtgcgaatcctgacccaaggcctcctgtctccctttcaaagggagacccttttgggggatgagtttgccagactccccgtgctgggtttctttgttaccattctgatgttggagcggccgcatatttttttttagttctttttttttttttcttttcttttttaaaaatatgtggctgtgaacttgaatgaacactgctcaaactttctgctattggggggggcgggtgggatgggaagaaggggcgtttgttttattcttggtgttttcagtacaataaatagctacaaacttctgtgcaaaaaaaaaaaaaaaaaa

SEQ ID NO: 153118 - DNA, 553 bp, Homo sapiens
  misc_feature (1)...(553): n = a,t,c or g
ccctcatgcnnnnnnnnnnnnnnnnnnnnnnnnnnnnnnnnnnnnnnnnnnnnnnnnnnnnnnnnnnnnnnnnnnnnnnnnnnnnnnnnnnnnnnnnnnnnnnnnnnnnnnnnnnnnnnnnnnnnnnnnnnnnnnnnnnnnnnnnnnnnnaaatttcaaaacattaaaatatgaatcaggaaacttcgattctggtctttttcagactttaggttattttccttggttttatatcttattaccataaatcatcttgatgctggtacctgataagattctatttgcttttctttattcatagagaccacaaacagatcgcagatccaggtttctcaaactggagcatctgcttaattttcccataaaatcagtcttattctttctgacagctctgagactcctccggccacgactaggtgctgtcctggaggaaacggtggaggacggccgcacaaaaaccaatctacctgatgaaaactccgttcccttctcgccagaaacatanaatgcgatggagctacggaattccacgacactggaatgtggtccgatn

SEQ ID NO: 153119 - DNA, 935 bp, Homo sapiens
  misc_feature (1)...(935): n = a,t,c or g
atctttcttgaaatcaaatccaatccaatctgtattctaagaacctgctcaaatcttggttcttcaaagctttccctggtattttgcatttttgctttgaatagttccacgaaggataacttcttactccttccttcatctttctgtatcttgcatatagtaaatattaatgacttgtttgcattttgttatcctaacttggctataaagaaaatcagatgtcttcaccagtcgttcaaacttcaggtctgcctacagattcatagatggctgtggatttttataattttgtcacaaagttagtggtaactacaggttatctcagaatatcttttttggcgtataaatttttttcttttccttttttagacagtctctctctctgtcgcccaggctagagtgcagtggcgtgatcccggcttcactacaacctctgcttcctgggttcaagagattcttagcctcagcctcccgagtagctagggttacaggcgcgcaccacctccatgcccagctcttttgtatttttaagtagagacagggtttcaccatgttggtcaggctggtctcgaacttctgacttcaggcaaanttgcncgcctcggcctcccaaagtgctgggattacaggcacaagccactgcacccagccttattaccataaatcatcttgatgctggtacctgataagattctatttgcttttctttattcatagagaccacaaacagatcgcagatccaggtttctcaaactggagcatctgcttaattttcccataaaatcagtcttattctttctgacagctctgagactctccggccacgactaggtgctgtcctggaggaaacggtggaggacggccgcacaaaaaccaatctacctgatgaaaactccgttcccttctcgccagaaacataaaatgcgactggatac

SEQ ID NO: 153120 - DNA, 1653 bp, Homo sapiens
tacagattcaatagatggctgtggatttttataattttgtcacaaagttagtggtaactacaggttatctcagaatatcttttttggcgtataaatttttttcttttccttttttagacagtctctctctctgtcgcccaggctagagtgcagtggcgtgatcccggctcactacaacctctgcctcctgggttcaagagattcttaggcctcagcctcccgagtagctagggttacaggcgcgcaccacctccatgcccagctcttttgtatttttaagtagagacagggtttccacccaggttggtcaggctggtcctcgaaccttcctgaccttcaggcaaatcccgccgcctcggccctccccaaagtgcctgggattacaggcacaagcccactgcacccaccctggagtataaatttcaaaaacattaaaatatggaatcaggaaacttcgattctggtctttttcagactttaggttattttccttggttttatatctgagtataaaagtgaaaatagttattacacaagtggaaaatgttcttctgatgaacagtatacattttattttctatagatgaaagaaatggccctgccgtgatatcgttaaagaagttgcaaaaatgtaagttgaaatttttcttaccatccacaataatgtttcttttggcctttggcgtatatatattacattaatcctaagaaagctgttttcctgtaaaataacttagtgtataatttttagaaggtaaatttaacattctaagaagcctcacgaaggaagaaaatgtttttaaggcaatattttttaggtaggtaatgaatagggatggggaaaaataggcttgacaaaataaactcctgtttacagggttaagggacatataccattagggtcttaatttggttagctccccaacttctcaaatctcttaagtcctaataatagataatcttaagattgcctctattgtaagaatgcttacaaactttataggttacaactaattatttcaatacatgatccatgaagctggctcatttatataatctgctatttatttgggaaagatatgtttcactttttcaggtttattataaaagttcctataacaaggtaagaagagcagtattacaaaacatttcaacaaccagcttaagaaaccctgaatagtttattacaggtatataaagtagaatactattaatatgtaacaggtatttggacagtaaaacaataaaaaagtccaattaaccctgggtagtgatgtttcctaaaattttgtgattctctagatcaaagagtgtagacatttggtattacaaaaagattcccaacaaaatacgttgtgtagccagctttttagattcaaaagttatggataatcgtaattcataacaactctaagtattccacattagaactacataaacaaggtctagtcaatcacctgtctgtatggtagtgtatcaggttttacatctaacaatacgtggaagaaaaaaattccaatgggctctattgtttaataaacatactatttacatcacactcagagtctcttattaaccggtccatcaataaaacaactgccttgacccctcttgccacctcctcccatccgccctcgtagtttctgttgtgaa

SEQ ID NO: 153121 - DNA, 440 bp, Homo sapiens
gacagcatcgacgcacgcgtagtcttcgatctgattcgctccatcaatgacccggagcatccactgacgctagaggagttgaacgtagtagagcaggtgcgggttcaggttagcgaccccgagagtacagtggctgtggctttcacaccaaccattccgcactgcagcatggccacccttattggtctgtccatcaaggtcaagcttctgcgctcccttcctcagcgtttcaagatggacgtgcacattactccggggacccatgcctcagagcatgcagtgaacaagcaacttgcagaaaggcctttgacccctcagcctgcatactggtatcctggtcccagctcctgccagggctgttaccgttgttttcttgaatcactcacaatgagaaactaacattttgctttttgtaataaagttaatttatattcaaaaaa

SEQ ID NO: 153122 - DNA, 325 bp, Homo sapiens; identical to SEQ ID NO: 137998
  misc_feature (1)...(325): n = a,t,c or g

SEQ ID NO: 153123 - DNA, 945 bp, Homo sapiens; identical to SEQ ID NO: 137999

SEQ ID NO: 153124 - DNA, 1282 bp, Homo sapiens
ccgcgatggtaggcggcggcggggtcggcggcggcctcctggagaatgccaaccccctcatctaccagcgctctggggagcggcctgtgacggcaggcgaggaggacgagcaggttcccgacagcatcgacgcacgcgagatcttcgatatccgccgctgctgggcgcgggcgggttccgggggcttgcggtggggggagcagtgatatcgagcagctggtggagccgcatcccagcagggcgttcctggcagagggttctaagtgggcaagggcgcagagtcccttttccttcacttcccacaatttgattcgcttccttaatgaccccggagcattcactgacgctagaggagttgaacgtagtagagcaggtgcgggttcaggttagcgaccccgagagtacagtggctgtggctttcacaccaaccattccgcactgcagcatggccacccttattggtctgtccatcaaggtcaagcttctgcgctcccttcctcagcgtttcaagatggacgtgcacattactccggggacccatgcctcagagcatgcaggtaagtgtggactggtggtgagggtgttggcccgggcaccccctaagcagtctgaggcttcccccttgcacaggagtctatgggcaagactggagatgggtaactgtgtgagtgaaattgccagagactcctcagtatgggttatagcctagaccgaagctggcctgagaagactctcctttgcttaccatgtcctcttctcccaaatcccctctcaccaaatatacaggaccagagtgtgtcaggcttcagcagcgcaggaggcagccagggggagggatcctaagaaggcagattaggtgggctcaggtggttgaagtagcctgatcaatatgtggggtcctgggaaggaggtgacaggaggggctctgttgctgcgggggacatatcctatatagaggttcagaggtagggctggctagcactctgggcagaagcctagctttgactctgccttccccacacccttcttcccacctagtgaacaagcaacttgcagataaggagcgggtggcagctgccctggagaacacccacctcttggaggttgtgaatcagtgcctgtcagcccgctcctgagcctggcctttgacccctcagcctgcatactggtatcctggtcccagctcctgccagggctgttaccgttgttttcttgaatcactcacaatgagaaactaacattttgctttttgtaataaagttaatttatattcagttaaaaa

SEQ ID NO: 153125 - DNA, 738 bp, Homo sapiens
cgcacgctcgcataggatcagcggtggtggttccgcgatggtaggcggcggcggggtcggcggcggcctcctggagaatgccaaccccctcatctaccagcgctttggggaagcggcctgtgacggcaggcgaggaggacgagcaggttcccgacagcatcgacgcacgcgaagtctttcgatctgattcgctcccatcaaatgaccccggagcatcccactgacgctagaggagttgaacgtagtaagagcaggtgcggcgttcaggttagcgacccccgagagtacagtggctgtgggctttccaaaaccaacccattccggcacttgcaggcatggcccacccttaattggtctgtccaatcaaggtcaaagcttctgcgctcccttccttcagcgttttcaagatgggacgttgcacatttactcccgggggacccattgcctcaagagcatgcagttgaacaagcaactttgcagattaaggaagcggggtgggcaactgcccttggaagaacaccccaccttttggaggttgtgaattcagtgcctgtcgagcccggctcctggaacctgggcctttgtacccctcagcctggcataattggtatcctggtcccagctcctgccagggctgttaccgttgttgtgggtgggtcactcacaatgagaaactaacattttggctttttgtaataaagttaatttatattcagttcccaaaaaaaaaaaaaaaaa

SEQ ID NO: 153126 - DNA, 885 bp, Homo sapiens
  misc_feature (1)...(885): n = a,t,c or g
caggttcagtgagccattgcgcccggcccaaagcctctttcttttcagtgctgagctggataaagtctaccaaactgaaaggtctccaaggctatagctggctgtctgagaaattatggtgtttgtttagcccatcttaggacttgggctatcccagagccccccaagatgaacccagtggtggagccactgtcctggatgctgggcacctggctgtcggacccacctggagccggggacctaccccacactgcagcccttccagtacctgggaggaggttcacatctccccacgtgggccaggccatgctgaacttctcgttcaactccttccacccggacacgcgcaagtcgatgcacaagagagtgtggctttcatttcgcctcaaagcccgacaccaaacaaggttggcctttgtcaagcgccccagaacacagggcttggttggaattggaaggagggcgaggtgaaacgggcaaggagcttgtgcattcgcatcccacttccattcgccaggatctcctttcgccaagggaagccccacgtagagcagatcaccccggaaagttcaggctgaaattctgaaggcaaactttgagcagacgggtctcccatgggcaacccacgacacagcccaatgacttcagcatcatcacgacacctaccaagaaggtgaacaccgtaaaccctagagcttcttggaagcctcgggagggcntgggctactgtgcctcaacggttcggctcctcaacagacaggtcctgcggcaagaagtgggtgtggccgtgagcctctgcaggctcaagagtgttgtccagatgtttctgtactgggcatagaaaaaccaaataaaaggcctttatttttaaaaaaaaaaaaaaaa

SEQ ID NO: 153127 - DNA, 405 bp, Homo sapiens
cgttaccacctcttggctcacaccacactcaccctggcagcagtgcaagatggattccgcacacatgacctcacccttgccagtcatgaggagaaccctgcctggctgcccctttatggtagcgtgtgttgccgtctggcagctcagcctctctgcatgactcagcccactgcaagtggtaccctcagggtgcaggagactcgagtccgggcaggggagctggaccaggctctaggacggcccttcaccctaagcatcagtaaccagtatggggatgatgaggtgacacacacccttcagacagaaagtcgggaagcactgcagagctggatggaggctctgtggcagcttttctttgacatgagccaatggaagcagtgctgtgatgaaatcatgaaaattgaa

SEQ ID NO: 153128 - DNA, 1440 bp, Homo sapiens
atgttctcccgaaaccaccggagccgggtcaccgtggccaggggctccgccctggagatggagttcaaacgcggccgcttccgactcagcctcttcagcgacctgcccgaggacacggagttgcagaggaagctagaccatgagatccggatgagggaaggggcctgtaagctgctggcagcctgctcccagcgagagcaggctctggaggccaccaagagcctgctagtgtgcaacagccgcatcctcagctacatgggcgagctgcagcggcgcaaggaggcgcaggtgctggggaagacaagccggcggccttctgacagtggcccgcccgctgagcgctccccctgccgcggccgggtctgcatctctgacctccggattccactcatgtggaaggacacagaatatttcaagaacaaaggtgacttgcaccgctgggctgtgttcctgctgctgcagctgggggaacacatccaggacacagagatgatcctagtggacaggaccctcacagacatctcctttcagagcaatgtgctcttcgctgaggcggggccagactttgaactgcggttagagctgtatggggcctgtgtggaagaagagggggccctgactggcggccccaagaggcttgccaccaaactcagcagctccctgggccgctcctcagggaggcgtgtccgggcatcgctggacagtgctgggggttcagggagcagtcccatcttgctccccaccccagttgttggtggtcctcgttaccacctcttggctcacaccacactcaccctggcagcagtgcaagatggattccgcacacatgacctcacccttgccagtcatgaaaatgttgagtcatttgtgcagcaagctggggagatgcagaactgggcacaagtgcatggagttctgaaaggcacaaacctcttctgttaccggcaacctgaggatgcagacactggggaagagccgctgcttactattgctgtcaacaaggtgatgggtcccttggtagagactcgagtccgggcaggggagctggaccaggctctaggacggcccttcaccctaagcatcagtaaccagtatggggatgatgaggtgacacacacccttcagacagaaagtcgggaagcactgcagagctggatggaggctctgtggcagcttttctttgacatgagccaatggaagcagtgctgtgatgaaatcatgaaaattgaaactcctgctccccggaaaccaccccaagcactggcaaagcaggggtccttgtaccatgagatggtcttatcagagcctgtagccccagggggcccagcgatccccacggaccagaggcctctgcagcaaaggccaacctcgcacttggctccagtcaccagtgtgagagagaaaggtgctggcataggatctgcccagaagagaaaatga

SEQ ID NO: 153129 - DNA, 399 bp, Homo sapiens; identical to SEQ ID NO: 108773

SEQ ID NO: 153130 - DNA, 440 bp, Homo sapiens
tgtcgtggcgggggcgctaggctgcagctggctcggaatcggggctggtttcctgtctggaagggaaggggcctgcagaagggagcggggacagcagcagacaggcacacccctgccttcctctctccctctcctcccttctctggaaaagcgagctgggagaacagctgccaccaaagcgagactggacactctgtgcctagagccccctctgcagctggcctttcctcctggggaccccacttatcctcacttcgctttctttttcttccctgcctgggctcccggcaggcccccggagcagcagtggggcgaggaaaatttgtcacagcagccagagggggtttaacaggagttgcagagggataagggcagcttctgccctctgcccaagagctggccacctctttaaagactgagggaacagtgggaggaggaac

SEQ ID NO: 153131 - DNA, 588 bp, Homo sapiens
gtccgggcaggggagctggaccaggctctaggacggcccttcaccctaagcatcagtaaccagtatggggatgatgaggtgacacacacccttcagacagaaagtcgggaagcactgcagagctggatggaggctctgtggcagcttttctttgacatgagtaagagagaagggggctgggttgaacctttgggaagaactggagtttgtcatttttactaaaggcctctgtttcaagattatgtggaagggaatgtagcaggagaaagggcagcctggctctctcttttaatcagcgctcttcttccaggccaatggaagcagtgctgtgatgaaatcatgaaaattgaaactcctgctccccggaaaccaccccaagcactggcaaagcaggggtccttgtaccatgagatggctattgagccgctggatgacatcgcagcggagacagacatcctgacccagcgggagggcgcaaggctggagacacccccaccctggctggcaatgtttacagaccagcctgccctgcctaacccctgctcgcctgcctcagtggccccagccccagactggacccaccccctg

SEQ ID NO: 153132 - DNA, 2230 bp, Homo sapiens
gtgaagtgtgactccgtgggcctggcgtggaggcgggggcgctaggctgcagctggctcggaaacggggctgggttcctgtctggaagggaaggggcctgcagaagggagcggcgacagcagcagacaggcacacccctgccttcctctctccctctcctcccttctctggaaaagcgaggacacggagttgcagaggaagctagaccatgagatccggattaaggaaagggccctgttaaactgctggccaacctgctcccaagcgaaaagcaggctctggaggccaaccaagagcctgctagtgtgcaaacagccgcatcctcaagctacatgggcgaagctgcagcgggcgcaaggaggccgcagttgctggggaagacaagccggcggccttctgacagtggcccgcccgctgagcgctgccccctgccgcggccgggtctgcatctctgacctccggattccactcatgtggaaggacacagaatatttcaagaacaaaggtgacttgcaccgcttgggctgtgtttcctgctgctgcagctggggggaacacatcccaggacacagagatgatcctagtggacaaggaccctcacagacatctccttttcagagcaatgtgctcttcgctgaagcggggccagacttttgaacttgcggtttagagctgtatggggcctgtgtggaagaagagggggccctgactggcggccccaagaggcttgccaccaaacttcagcagctccctgggccgctcctcagggaggcgtgtccgggcatcgctgaacagtgctgggggttcacgagagcaataccattcatgctccccaccccagaggttggtggtcctcgataccacctcttggctcacaccacactcaccctggcagcagtgcaagatggattccgcacacatgacctcacccttgccagtcatgaggagaaccctgcctggctgcccctttatggtagcgtgtgttgccgtctggcagctcagcctctctgcatgactcagcccactgcaagtggtaccctcagggtgcagcaagctggggagatgcagaactgggcacaagtgcatggagttctgaaaggcacaaacctcttctgttaccggcaacctgaggatgcagacactggggaagagccgctgcttactattgctgtcaacaaggtgatgggtcccttggtagagactcgagtccgggcaggggagctggaccaggctctaggacggcccttcaccctaagcatcagtaaccagtatggggatgatgaggtgacacacacccttcagacagaaagtcggggaagcacttgcagagcttggattggaggctcttgtggcagcttttctttgacatgagccaatggaagcagtgctgtgatgaaatcatgaaaattgaaactcctgcttccccggaaaccaccccaagcactgggcaaagcaggggtccttgttaccatgagatgggctatttgagccgctggatgacattcgcagcggtgacagacatcctgaccccagcgggagggcgcaaggctggagacacccccaccctgggctggcaatgtttacagaccagcctgccctgcctaacccctgctcgcctgcctcagtggccccagccccagactggacccaccccctgccctgggggagaccccgaaccttttccctgggatgctgtccccccagaccacttcccctagggcttcgcttcggtttgccccccttcccaccttcagcgaatccccacggaccagaggccttttgcaggcaaagggccaacctcgcacttggctccagtcaccagtgtgagagagaaaggtgctggcataggatctgccccagaagagaaaatgacccatgcgcagttgggctctggatacggcgctgtctaatagcaaggtttgccagtctggccctcctgttcctctgctggaccctgggggtaggcttgcaggggtgggcagaagcccttgtttaaatttgtggtttgccatggtaccgagggactcattccctggggctcgctgggacctcccctaaacccttcctggaagaaaactggaaccaactctgccctacctccctgcactaaccaagctttgaggatggcactggaagaaccctttggaagcaaacatacctccctttgtgactcccacatcaaccattaaagttatttaacaagcagccttcaccttggctcctgaggaaa

SEQ ID NO: 153133 - DNA, 595 bp, Homo sapiens
cttgttactagaagagcagtactggcttgcttacgtcagcttgtacaaagagaagcagctgaagtttcagaacatgctgttatgcttgctaaggatagcagagaagagttgactccagatgctaacatcagagaagttggccttgagggggcattgttgatcttactagacaaggagacagatgagagattatgccatgatatcaaagagactttaaattatatgcttacatctatggcagtggaaaaactctccctgtggttaaagctttgtaaagatgtacttgctgcatcagctggtaagtattggacattatcagttaaaataataaaattgaaatttgaaactttacataaaattgtttacccctgagaaattatccagtctggtcaaacaagctggattctgactgtctgattgttgcttttcttcaaataaagattgtatttctagtgttttagaattctctgtaatttgaacaatataaatccaatacttaagcctgctctttttccctttggctgtcttagatgactttcctatataaaacaaattaaaaagtaaagttattgtttatgccctaaaaaaaaaaaaa

SEQ ID NO: 153134 - DNA, 363 bp, Homo sapiens
accatggaaagcataactgcttgtttacatgcattgcaagcacttctagatgtaccttggcccagatcaaaaattggcagtgatcaggacttgggtatattattgctgaatgttctacatcgagtaattttaaccagagaatcaccttccattcagttggcttcacttgaagtggtaaggcagattatctgtgctgctcaagaacatgtgaaggaaaaaagacgaagtgcagaaggaagcatctcaattctccctactatattgtacctcacaatcggggtcctcagagagactgctgtgaagttacctgggggccagttatcttcgacagttgcagcttccctacaggctctaaaaggaata

SEQ ID NO: 153135 - DNA, 474 bp, Homo sapiens
ctgacagtcctattatgtagtctacacgaatgacagttctttatcgtttacatttattttatgtaagaattaatttttcaagatattgttagctgctatcatttagtaatttataaactgatatgctttttttaaaacttgttctatatgtaaatagattattatgacattagcagaggatttgctgtgttctgctgctcaaaacagtcgcctttcagctcagcgcacacaagctggatggttgctgatttctgctctgatgacattaggtaacagtctgtagaaggtttacataccttgaaatactttgtgttttctgagtgaaatgattcttatatgtgatttgatgaaatgaacttttaatacataccagaatttaaatagccacacaaacatttttcttgtagtagtcacctttaaaagccttttactttcgtcattgcttaaaaccttttgagatctctcttgattttc

SEQ ID NO: 153136 - DNA, 395 bp, Homo sapiens
tgaagtaccaactattacttgcaattcttaatgatgaactatatcattctaaattggatgattgcctctgagttggaagtcctccatttctctttccacatgagtagtagcattcacatttgctgttactttatcacttgcttcaacaaaagaacaagttaatttattttatgtttcttaatgctgctgtaatgtttttaattgtttttctttgtcattacagacctgggcattacattctctatcattgatcattgattctgctggcccactctattatgtgcatgtggaacctaccctttctcttattataatagttgtggtaaatgtgcctcctactcatgctgaagttcaccaaagccttggtcgctgtttgaatgcccttattaccacgt

SEQ ID NO: 153137 - DNA, 434 bp, Homo sapiens
agctcctacattccatctttcagtatccaaatccagctgtttcctacccatacatttactctttagcatcctgtatcatggaaaaactgcaggaaatagacaagagaaaacctgaaaacactgctgagcttgagatcttccaagaaggcataaaggtcttagaaacactggttactgttgctgaagaacaccatcgcgctcagctggtggcctgtcttttgcccatcctcatttccttccttttggatgaaaattctctgggatcagcaacttccataatgagaaatttacatgactttgctctacaaaatctcatgcaaattggacctcagtattcatctgtttttaaaagtttagtggcttcttctccagccctaaaagcccgccttgaggctgctataaagggcaatcaggaaagtgtcaaagtcaagata

SEQ ID NO: 153138 - DNA, 540 bp, Homo sapiens; identical to SEQ ID NO: 93087

SEQ ID NO: 153139 - DNA, 8403 bp, Homo sapiens
ttttttttttttcttttcaatcgtttaataaaagtaggcactgagcgccttctacagagttgggcaggtgctgccgagaagcttagcgctacgccggcctccaagaccgcacatccgggacattcgagagtcagtccgaggccccgccctcctaagggcggggccactgggcaatcggcgcaggcccttcgtcgtgccccgcctcgtctgccccgccagcgcgtcgagggaggggccagcgacacatggcctagtaactgtccggccgcggcgctggcttaagccatggctgagggtagccggattcctcaggcccgggcgctcctacagcagtgcctgcacgcccggctgcaaattcgcccagccgatggggacgtcgcggcccaatgggtggaggtaacgtcagcccggcagctctcgttatcctccggcgtgcggggcggttttttccgcgttgtctcggtgactcgtccgctctgtgtctccctctgagaccggcggtccggccgcggggataccgggtcagcttgaagctggccgcggaggcctgcctggctgcgcttgtcctttcggtccagcatcaccgttccccagcgccagttgtagcacccgagaggaagagcgtgtctcccttcttggggggaccacaggtccaaagaggactggtgatctacgtgtgctttttcaagggagctgataaagaacttcttcccaaaatggagcccctaacagaggcagtagatgacactgtatatacaagatgtgggtctcatcaaacctggacaactcaagtttatatcattattatggaagaatttgcattagccatgtgtgcacttccttgtggaaataagaatagatttaatacactgttaaatgtgaaattaagtgagacagaaaatggcaagcatgtctctatattggatctacctggcaacattcttattatccctcaagctacccttggaggaagactaaaaggaagaaacatgcaatatcactctaactctggaaaagaagaagggtttgaactttactctcaatttgtgactctatgtgaaaaagaagtagctgctaatagcaagtgtgctgaagctagggttgtagtggaacatggcacttatgggaacaggcagctcttctggcccaaggtgctcaaagaatcttcaacagatattttatcttcacagtatatgtatgatgaggatagcgctgtggaaaggactttctggcaggcaaacatggatgagcagaccaaggactttgttttaattccgtttagcccgacttttattgattccccacaaacaccaccttcccacttcttaaagtctgctacagattccattatgcagaacctgctgtccctggccactgcagggctggagtccgccgagaaggggctgactggggcacagggtcggctgataaacagcgtggtccgttcttcctcctggactacgggaaagtctggcttcacctgtgcacaacagaatgatgtaagggagaaacagaagactcttgttgaacagctcctgtctttgttgaacagctccccagggcctcctacccgcaaactgcttgctaagaatctagccatactttatagtattggagacacattctccgttcatgaagcaatcgataaatgtaatgatcttattcgtagcaaagatgattctccaagttatcttcccactaagcttgctgctgtggtatgtttgggttccttgtacaagaagttgggtagaatactgggtaacacctttactgatacagtggggaatattcttaaagctatgaagagtgcagagtctcaaggccgatatgagattatgctaagtctgcaaaatatattgaatggactaggagctgccgctgcaccttgtcacagggatgtttataaagctgctagatcctgcttgacagatagatccatggctgttcgttgtgctgctgcaaagtgtctccttgaacttcagaatgaagccatctttatgtggagtacggacctggacagtgtggccacactgtgttttaagtcctttgaaggttccaattatgatgtgcggatttctgtttcaaagttactaggcataatattagctaaagctgtaatttctaaacatccaggaacagcctcacgtcaaagcattcgcagagtatctttggaggaagttctggaattactaggaacagggtttctacgtgggagttcaggattccttcgagccagtggagatatgctgaaaggaaccagttcagtcagtagggatgttcgagttggagttactcaggcttatgtggtatttgtttcaacactaggaggagcttggctagagaaaaattttgctgcctttttttctcatatcctaagccttgcgtcaccgtcacaccctaaagccacccaaactcagatcgatgccgtctgctgtcgccgttgtgtttcatttattcttcgaactactataggtggtcttcttggagaaaaggctcagcttgctgctgtaaaggatatttgccaggccatctggaagctaaagaaagttatggatgccgtaatgagtgatggtaatttggaaacccggcttggttccacagatgtagccgctagccaacatatgctggtttgtgctttacaagaacttggaaatctcatacacaatcttggcaccacagcggcacctttgctacaggattcaagtacaggtctccttgacagtatcttgtcagttattcttcatcctagcatttctgttcgactagcagcagcttggtgtttacactgcattgccgtggcattaccctcctacctaacaccactcttggatcgttgccttgaacggcttactggacataagtcttcacctgaagcagtgactggcttcagttttgctgtagcagctttgttgggagcagtaaaacattgtcctttaggaattcctcatggaaaaggcaagattattatgacattagcagaggatttgctgtgttctgctgctcaaaacagtcgcctttcagctcagcgcacacaagctggatggttgctgatttctgctctgatgacattagcatctcctaaagatctagaaacagaaaagagccgaggagattcgtttacatggcaggtgaccctggaaggacgagctggtgcactgtgtgctatcaagagctttgtttcccactgtggtgatcttcttactgaggaagtaactcagcgtcttcttccaccacttccttgtgctgtggatttgctaactcaagagctggctgctgacttgactgcccctgatattcaggtggcagcatctacatttttacttccacccctctgtcatcaggatgatcttttgatactaagtcctttcctacaagagactgaccatagatttattgaagaacagctcctgcttggtaatggtgttgcttgcggaagtcttgaatatgacccttattcgatttatgagaaagatgtagagggagattcagtgcctaagcccttacctccagcactatcagttattagttctgcatccaagctctttggggttgtatgcgctcatgtgggagaaactcaaaggcttcttatattggaacagcttttggacagtataaagcacacaaaaggagctcgtcagcaagtggttcagttacatgttgtttcttcagtttctagtttcttgaagtacgtggctggctccaagggatgtttaggtccagaagaaatgaaaagatttgccttaacattagttatgggagccctagaaagccccaaccccttgctgagatgtgcagctgcagagtcatgggctagattagcccaagtggtagatgatggagcttttactgctggattagctcaagttagctttgacaaattgaaatcagcaagggatgtggttaccagaacaggacactcattggccttggggtccctacataggtatttaggaggaataagttcttctcaacacctaaattcttgtattggaatcctttatactttggcgcaggacagcacttctcctgatgtgcagacctgggcattacattctctatcattgatcattgattctgctggcccactctattatgtgcatgtggaacctaccctttctcttattataatgttgttgttaaatgtgcctcctactcatgctgaagttcaccaaagccttggtcgctgtttgaatgcccttattaccacgttaggtccagagctacaaggtaacagtacttcaatttctaccttaaggacttcctgtctactgggttgtgcagtaatgcaagataacccagactgccttgttcaagctcaggccatctcttgccttcagccagcttcatatgtttgctccacgacatgtcaacttgtctagcctggttagctgcctctgtgtgaatccctgtagcccgtacatgtgactgagaagagcagtactggcttgcttacgtcagcttgtacaaagacaagcagctgaagtttcagaacatgctgttatgcttgctaaggatagcagagaagagttgactccagtaaattggtaccaggagtggggcactgctataaagatacccaaaaatttggaagcagctttagaattgggtaataggcagtggttggaatggtttggagggctcagaagaagacaggaagatgtggcaaagtctggaacttctagagacttgttgaatggctttgaccaaaatgctgataataatgtggacaatgaagcccaagctgttccagccatggctaaaagggaccaaggtacagctcaggccattgcttcagagagtgcaagccccaaaccttggcagcttctacatggtgttgggcctgctggtgcacagaattcaagaactgaggtttgggaacttccacctagatttctgaggatgcatggaaatgcccagatgtccaggcagaagtctgctgcaggggtgaagccctcatggagaacctctgctagggcagtgcaaagggaaaatgaagggtcagagcccccacacagagtccccactgaggcactgcctagtggagctagcgagactccatctcaaaaaaataagaaaagaagagggtctctagaccccagagtggtagatccactgacagcttacactgtgcgcctgaaaaagccacatatactcaacgccagctgtgaaaatgctaacatcagagaagttggccttgagggggcattgttgatcttactagacaaggagacagatgagagattatgccatgatatcaaagagactttaaattatatgcttacatctatggcagtggaaaaactctccctgtggttaaagctttgtaaagatgtacttgctgcatcagctgattttacagctgtaacttgtgtggatacaatgcaagaagaagaaggagataaaggggatgatgcctcagtcctgaccaccagacgtgatgaaaaatcccatccttttaccaatccccgatgggctactagagtctttgctgctgaatgtgtctgtaggataattaaccaatgtgagaatgctaacagtgcacattttgacattgctttagcacaagaaatgaaaaaaagagattcaagaaatgactttttggtactgcatcttgctgacttaattcgcatggcttttatggctgccacagatcacagtgaccagctccgtctttctggccttgaaatgctgttagttgttattcggcgatttgcaactgttccagaaccagagtttccaggtcatgtgattctggaacagtatcaagccaatgtggccagacgggagttccagaccagtgttgtctcccgggacactgacacagccgccaagtttattggtgctgggtcagccacagttggtgtggctgattcaggggctggcattggagcggtgtttggcagcttgattattgtctatgccaggaagctgtctctcaagcagcaactcctcttctatgccattctgggctttgccctgtctgaggccatggggctcttctgtttgatgatctccttcttcatcctgttcgccattgcctggatagcaagtggagttgtaagtgaccttaatgatctccgaagagttcatcagttgcttgtttcatcgttaactaaaatacaggctggaaaagaagctctaagtcacttatataatgaaagtgcttctaccatggagatcttagctgtgcttaaagcctgggcagaggtctacataattgctgtgcaaagacataaaaaccacagacaacctttgaagactaccacctgtttagaagacggtatcagaaatggatcatgttcatcagatggactgcttgacttagtctatgcagatcttggcacactaagcagactctggcttgctgcacttcaggattttgctcttttaactttgccttcagaatttgcctcccaacttcctgctgaaggtggtgctttctacacagcagagactagtgaaaatgcaaaattgcattattacaactcctgggcacttatcctccatgctacagcattgtggcttacaagcacgggttttgttgttgctgacccagatgaaggagcatctaatctctccaggcctgtaacaccaacttccatgtgtcagggttcatcatctggggctaccataaagtcccctgaggatgtctacactgatagattccatcttattttaggaatcagcgtggaatttctatgttccttacgttcagatgcaaccatggaaagcataactgcttgtttacatgcattgcaagcacttctagatgtaccttggcccagatcaaaaattggcagtgatcaggacttgggtatagaattgctgaatgttctacatcgagtaattttaaccagagaatcaccttccattcagttggcttcacttgaagtggtaaggcagattatctgtgctgctcaagaacatgtgaaggaaaaaagacgaagtgcagaagttgatgatggggctgctgaaaaggaaactctgccagagtttggagagggaaaggacaccggaggacttgtgcctggaaagtctttggtctttgcaacactggaattgtgtgtatgcattctagttagacagctcccagaattaaaccctaaattgacaggtagcccaggagtaaaagctacgaagccacagatactattagaagatggaagtagattggtttcagctgcattggttatcctttccgaacttcctgcagtgtgctctcctgaaggaagcatctcaattctccctactatattgtacctcacaatcggggtcctcagagagactgctgtgaagttacctgggggccagttatcttcgacagttgcagcttccctacaggctctaaaaggaatattatcttctcccatggcccgggcagaaaagagccgtactgcttggactgaccttctccgaagtgccttaacaacaattcttgactgttgggatccagagcatttctctttagttgatgaaacacaccaagaacttgatgaagtcagtctacttactgctatcacagtgtttattttgtctaccagtccagaagtaactaccatcccatgccttcagaagcgctgtattgataaatttaaagctactcttgagataaaagatcctgtggtacaaatcaagacctaccagctcctacattccatctttcagtatccaaatccagctgtttcctacccatacatttactctttagcatcctgtatcatggaaaaactgcaggaaatagacaagagaaaacctgaaaacactgctgagcttgagatcttccaagaaggcataaaggtcttagaaacactggttactgttgctgaagaacaccatctggtgtcaagtactagaaacacatcatctagatctttgtttaaacacaaaagctccttaaaaatagattttctaaattatggaaatgcttttgtttcagtggtcaacagatcaattctctcatctgccatttcacatgccagggtcaaatcctctcacagtacaaggtcatctctggttacctgcaaagccaaagaggtcagctcatgtaatacaggaaaacagagctttagacctaagaagaatctgcccaggactcttgaaacaccacaaggaaaacagaacaccccaaaagggatgagtgatgactttgttctgaattctttaaaggggttcaagttattagaagccttctctagattttctgatactacaggtggcaaagagggaaggaggttctactcaaggcatgctgtgtatgctctcggagagtgtggactgagtcacagggagggagtggagtggctgtatgcaaagaagctggaggcatcctgcctcctgacctgtgactcacatgggatgctgcaggacctcattcctaacatctcacaggaagagatcagctga

SEQ ID NO: 153140 - DNA, 2722 bp, Homo sapiens
  misc_feature (1)...(2722): n = a,t,c or g
cggccgccctttttttttttttttttgtttttgtcaatttatttagaaaaaaattaacatgggcaaatgagatacctcaggtgttacaacagagtatagaaatgtctagcaatagtcaaataatttgatctttaaatacaaaataaccacatgaacacctaatatacaggtttcatctgaatacatatttattaggataaatattagagggttgtcacatccatctaactacatacatgctttgcaaggactaggaaatcacaattagtttttttgaccagtttaaaggtatggaaatgattgccattgtacataccgatgtacaaagaccgatgatggtttctgtgggagttacttcagggctgcactggtgggtgtgtttatgggtggtaccgtgtgaatcacctgtgatcatgatatcaaaaattatacaaagtattgaattgggctacaattttcttcctgaaatcccccgtttcttttcattatttcccataggcaccctaaaaatacacagggtgggcagggactaggtaccactggaggcctaaataggttacatgtaggtacaataaaaacagaacaaaaacccctttcccactcagggttcagagtaatattacatggagcgagagagacagacgtggagaactcacaaatgctataaccaacaggatctagtttttccacgtgatggagttccaagcttttttttttgttttgttttgtttcgcaaaataaaaacaatacacattcccaagagaaatgaatgcatctgttgacacgtctctatttctcatttacatatgtaacaacacgtccccttgaatccgctgcctgttgaacacggcccctgtgtgggaacgggttcaagcccgaagggcccgtcgggaggcagacctgtaagctcctctgggggatccagggcttcccattaagggagaaaagtattagcaagtttcttaaaaaataaaatggctacacggaacatgatacatggataaagcttcaaaccaagaagcatgggggtgattgcctgtacttgggcccttccccgccctgcctggctggcttccctgttccatcttgcgaaatggcggcnagaaaacaatgccctgtgggccggggtgggatgcttggcatggaaaaagtggcttgcagaggcctcgtttttgctgaggttacttaatggctcccaagtagtcgtccgaaaaggaatcagggaaggatctctccagagttcaggaccatctctgtttatgggcgttgtctacctgcacctgtcacaacctggggcttgctcccgccccggatgcctttgcacctccctcacaccctggcctggctccaagagcactccgaaagagcttgtctccagactgcaggctgtaggcaccacgcacggttcagagccagccggaagggaaagctctgggccgagcttgctggtggagccttgttggagaggggacccaggaaacccgcctcaggtgctgagcccagagatggttgcaggaggtgcccggggcctgggctgcagggagcatctcgactctccgcactggaaagccgtggatccacctgtgagcagagtgtggacacaccctgataagaaccagaatgaatcccaggcctttctggggcaaagtatcaacgccaagaagcaagaactcctaaggaaggcatctgtaagtctgtctggagcttaattcccagatggtctgacacagggcgtggccacttgccaggccacagacactgggcaagggtggccacagtgctacctggcgttggcttgtccctgcccagctgactgagggatggctctaaatagcgggctgcccggtcttcccaactccccagcacagccgccccattctgttcacccccttcaactgtacaaataagccctggttgctttttttgtttttgttttaaaaaaaaagaagactcggtctttgtcattgagtcccaggtattttaaaaacacccagcaaaggctataacccaggtcatgaaaatgttgaatattatcaaagacgatactaaaatattcacaaagatatttacaaaagcgattcttaaaataattgatttgcatactgaacaacacgctatttgaaaaaaacctcgacaacgggacaaaggaagaaaaggggccggggcaatggcagctttcctacagaaaaccttgtgccgtctgggacagtgactggaagtcaacagctggggccacctttccggtaaaacccacagaggagtgctggggaccacccacagcggacgggagagcaggaaagggccccaggcagcagccgggaagggcgcaaagaatttacagatgggaccccagtgacgggacaacctggcatcaccataggccatgtggctcacggggcacagaccagcctgaaacaaagtgaacacaggacaggctccccaggaggccctggagagtggtaagccagatggagcaaagcggtggagggaaggccagaggctgcttttgcttgagtgagcaggagtttgggtgagattgtaatgtgtggaggagtgcaggcagggtaggctggcagccaagggcagtgtctggggcaggcacaaaaacacgcccccctcccccccatgcctgcaggtacatattggtgcacatgtccatggcctgggttgcagccgggggcatcttggagcacaaattcagaggaaaaggctgcccggcccc

SEQ ID NO: 153141 - DNA, 661 bp, Homo sapiens
tttcgtcgggaaggccggccggcaggggcgggggcaggattcgccgactctgggggtgctccgagctcgtgctgcggtcccactgtgcgccctgtcgccgccaccgcggaaaacgtcttgcacgtgcgaggggcatttcaggagtttcctgtctgtcaggctggagtgcaatggcgcaatcatggctcactgcgccctccacctcccaggctcaagccatcctcctatctcagcctcctgagtagttgagacaacaggcatgtgccaccatgtctggctaatattttaataaaatttttttgtagagacaggttctccatatgttgcccaggctttgattcttctaatgctcggtattaagactctatgactgtgtattatacatagagtttacatgtgagtaagttctgggtggagagacactattccttgctagggccttaagagtctggctgcagctctgctatcacatgggcaaaaccagctacataatttacaagatccagtgcaaaataaaaatgtgacatttcttgttagaaatcattgtgaatttcaagatggcaacaacaaagcattagaccaagcagggggcctttctaagcttgagcccccgtgtgactgcacaggtcatatgcccatgaagctggctctgcagagacta

SEQ ID NO: 153142 - DNA, 278 bp, Homo sapiens
ctgtggtcgcgctctcaccccttctgctgctctcgtggccccctcgcgatggcgggcatcctgtttgaggatattttcgatgtgaaggatattgacccggagggcaagaagtttgaccgaggtgacaagtttcggttggtcatagctagtaccttgtatgaagatggtaccctggatgatggtgaatacaaccccactgatgataggccttccagggctgaccagtttgagtatgtaatgtatggaaaagtgtacaggattgagggtcgacgcggccg

SEQ ID NO: 153143 - DNA, 474 bp, Homo sapiens
tgttttccaccctcgataatataaagaacagtgccttgcacatatctgtgcattgatgtttgtcagaattttggttcctagtgacaaaacagtaggaagatgcctcttctgtttcttaggctgagatggaacagtgccttgcacatacctgtgcattgatctttgtcagaattttggttcctagtgacacaacagtaggaagatgcctcttctctttcttaggctgagattgagagctgctgagtggcagtgctccagaatcacgggatggggccttctgtttcagctctgcgtgacgtgtcctatggggggcctgctcatgaggctgcagggggatgccaacaacctgcatggattcgaggtggactccagagtttatctcctgatgaagaagctagccttctgaacctcgcctgaagccagcctctctgccaagtcactcaggtcatgggcattgttcaagcctgagtggca

SEQ ID NO: 153144 - DNA, 1111 bp, Homo sapiens
agcgcgagaacccgctctacagcctattgcttccccgccctgggcagagccacctggacatgagacccgccctcaatgccgaagcctctcggaagcaatctttcgggacggaagttaagtagccccgagcgggaggctgtggcggaagtggtcgcgttaccgcttgtttgtgcgcatgcgccactctcgtctggccgccgcgctttcaggaggtgcttttggttctctccggtcttgtccacgctagggggtgcacgtactcccaactgtggtcgcgctctcaccccttctgctgctctcgtggccccctcgcgatggcgggcatcctgtttgaggatattttcgatgttgaaggatattgaccggaaggccaagaagtttggaccgagtgttctcgactgcattgtgagagtgaatctttcaggatggatctaatcttagatgtaaacattcaaatttaccctgtagacttgggtgacaagtttcggtttggtcatagctagtaccttgtatgaagatggtaccctggatgatggtgaatacaaccccactgatgataggccttccagggctgaccagtttgagtatgtaatgtatggaaaaggtgtacaggattgagggagattgaaacttctactgaagcagcaacacgccttctctgcgtacgtgtccctatgggggcctgctcaatgaggctgcagggggatgcccaacaacctggcatggattcgaggttggacttcccagagtttatctcctgatgaagaagcttagccttttgaacctcgccttaaaccagccctctttgccaagtcactcaggtcgtgggcattgttcaagcctgagtgggcagccgctctttgctcacctgttgaggaagggctggctcactgtccaccggtggcggcatctttaactggcctccactcaatgggaaacttgactcgcctgtgaaaagacacagaagggaagaagctgaaaatgaatcacccgcccttatgtatatgatttttaaattaaactttactttttcagactgcccctacacctttctgtaaaaagtccatttactgtaaaatcgttttttccagttaaaaaaaaaaaaaaaaaa

SEQ ID NO: 153145 - DNA, 2418 bp, Homo sapiens
atggggtttcaccatgttggccaggctgatctcaaactcctgacctcagataatgcttatgatcctgatgtgaacgctaaacaaatatggattgacaaaacagtgataaatgaccatatatgcttgacattcaccgacaatgggaatggtatgacttctgataaattacataaaatgctaagctttggcttcagtgacaaagtcaccatgaatggtcatgtcccagttggattatatgggaatggcttcaagtcgggttctatgcgtctgggtaaagacgcaatcgtttttaccaaaaatggagaaagcatgagcatgattaatttagcagaatcaaaagccagccttgctgcaattctggaacattctctgttttccacggaacagaagttactggcagaacttgatgctattataggcaagaaggggacgaggatcatcatttggaatcttagaagctacaaaaatgcaacagagttcgattttgaaaaggataaatatgatatcagaattcccgaggatttagatgagataacagggaagaaggggtacaagaagcaggaaaggatggaccagattgcccctgagagtgactattccctgaggtctaaaacagtgagaattacctttggattcaactgcagaaataaagatcattatgggataatgatgtatcacagaaatagactcatcaaagcttatgaaaaagttggatgtcagttaagggcaaacaacatgggtgttggagtggttggaattatagagtgtaatttccttaagccaactcataataaacaagatttcgactatactaatgagtacagacttacaataacagcactaggagaaaagctgaatgattactggaatgaaatgaaagtgaagaaaaatacagaatatcctctaaatttgccagttgaagatatacagaagcgtcctgatcagacatgggttcagtgtgatgcctgtctaaagtggcggaaattacctgatgggatggatcaacttcctgaaaaatggtattgctccaataaccctgacccacagttcagaaattgtgaggttccagaagaacctgaagatgaggatttggtacatcccacttatgaaaaaacctacaaaaagacaggaatcattagtgaatacccccccattgaagcttatagagaaggtgtaacagaagaggtgatacatgaattttaccagttcacgtgttgcttgaaacggagactttctactcgttcctcaattttgaatgcaaagaatcggagattgagtagtcagtttgaaaattcagtttataaaggtgatgatgatgatgaagatgtcatcatcttagaagaaaacagtacccccaaacctgcagtagatcatgatattgacatgaaatcagaacagagtcacgttgagcaaggtggtgttcaggttgagtttgtgggtgacagtgaaccttgtggccagactggttcaacaagcacctcatcatcccgatgcgaccagggaaatactgcagctacccagactgaagtaccaagtttagttgttaaaaaagaagaaactgttgaagacgagatagacgtaagaaatgatgcagtgattctgccctcctgtgtagaagctgaagcaaagatacatgaaacccaggaaaccaccgataaatctgcagatgatgcaggctgccaattacaagaactgagaaaccagctactccttgtcactgaggaaaaagagaattataaaagacagtgtcatatgtttactgatcaaatcaaagtgttacaacagaggatactagaaatgaatgacaagtatgttaagaaagaaacttgccatcagtccactgaaaccgatgctgtatttttacttgaaagtattaatggcaaatctgaaagtccagaccatatggtatctcagtatcagcaagctttggaagaaatagaaaggctgaaaaaacaatgtagtgctttgcaacatgtaaaggctgaatgcagccagtgttccaataatgagagtaaaagtgaaatggatgagatggctgtgcagcttgacgatgtgtttagacaactggacaaatgcagtattgagagggaccagtataaaagtgaggttgaattgctggaaatggaaaagtcacaaatccgttcacagtgtgaagaactcaaaactgaagtagaacagttaaaatctacaaatcaacagacggcaacagatgtttcaacatcaagtaacattgaggagtctgtaaatcatatggatggagaaagcctcaaactccgatctcttcgagttaacgtaggacaactgctggctatgattgtgcctgatcttgatcttcagcaagtgaattacgatgttgatgtagttgatgagattttaggacaagttgttgaacaaatgagtgaaatcagtagtacttaa

SEQ ID NO: 153146 - DNA, 964 bp, Homo sapiens
aaattgtgaggttccagaagaacctgaagatgaggatttggtacatcccacttatgaaaaaacctacaaaaagaccttgaaacggagactttctactcgttcctcaattttgaatgcaaagaatcggagattgagtagtcagtttgaaaattcagtttataaaggtgatgatgatgatgaagatgtcatcatcttagaagaaaacagtacccccaaacctgcagtagatcatgatattgacatgaaatcagaacagagtcacgttgagcaaggtggtgttcaggttgagtttgtgggtgacagtgaaccttgtggccagactggttcaacaagcacctcatcatcccgatgcgaccagggaaatactgcagctacccagactgaagtaccaagtttagttgttaaaaaagaagaaactgttgaagacgagatagacgtaagaaatgatgcagtgattctgccctcctgtgtagaagctgaagcaaagatacatgaaacccaggaaaccaccgataaatctgcagatgatgcaggctgccaattacaagaactgagaaaccagctactccttgtcactgaggaaaaagagaattataaaagacagtgtcatatgtttactgatcaaatcaaagtgttacaacagaggatactagaaatgaatgacaagtatgttaagaaagaaacttgccatcagtccactgaaaccgatgctgtatttttacttgaaagtattaatggcaaatctgaaagtccagaccatatggtatctcagtatcagcaagctttggaagaaatagaaaggctgaaaaaacaatgtagtgctttgcaacatgtaaaggctgaatgcagccagtgttccaataatgagagtaaaagtgaaatggatgagatggctgtgcagcttgacgatgtgtttagacaactggacaaatgcagtattgagagggaccagtataaaagtgag

SEQ ID NO: 153147 - DNA, 564 bp, Homo sapiens
ccacatggtaaatctttttggctttgtgggccacataaaggctctgttgcatattctttgttttgctgctttgtttcttcacaccttttaaaaatacaaagccattcttagcctacttgcaggctggatttagttcattggtttacttgttgattcctgggatagcacaaggaatttacatgtttggaattgtttttgtgtcttctgggataagggggaagaggaagattatatcttgtgttttgggcatgtcacactagaaatagttcctttaaggtgatgatttttccctccaacagattaatgctgaactgttgtttcggccaactgctctttcaactccaagcttttcttctcctaaagaaagtgttccaagaagacatctttcagaaggaacaaattcttatgcgacaagacttctaaataatcatcaagttccacctcagtctggaacctggggagccaacagggtcagtggctaagattggttttccatttggggaatattaaacagagcttttacttgacacttctgtgacagtgatgccaattcgggatcattgg

SEQ ID NO: 153148 - DNA, 4752 bp, Homo sapiens
  misc_feature (1)...(4752): n = a,t,c or g
taaatcatgagttagattgatagttttcagggcaaatccaaacagtctacattaatttccgtctttatttcgttaaggtttcacatggacactggtggatatggaatggcttttttctgcgcaattcacatccgaccaggtcaagtgactggagttcaccggtctcgggtataccgcatctcgcgccaggcttcaaactctagatccccgagtctcgagctccagctgggtgtcgagacgggtacgggccggccgcgcctcgcgcatgccccnttaggcccgcagggccccgcgctggaagctcagctcccactgtaccctgctttaaccagtcaggcaattcatcttccccaagctcccaattcggcattgcctggaggcggaagtgggtgggaggggccagacgtgcgcccctccccggaagtgggcggtacccatagggctccacagtcgttccgccacctcccagtcgggttgcggcggaggccgttcctggctttgtagctcgctcaagatggcggcgcagccaccccgcgggatacgcctcagcgcgctttgcccgaagtttttacatacaaattctactagtcacacctggggccattcagtgcagttgctggaattaataggataatgcttatggatccctgatgtgaacgctaaacaaatatggggtttgacaaaacagtggattaaatgaccatatatgcttgacattcaccgacaatgggaatggtatgacttctgataaattacataaaatgctaagctttggcttcagtgacaaagtcaccatgaatggtcatgtcccagttggattatatgggaatggcttcaagtcgggttctatgccgtctgggtaaagacgcaatcgtttttaccaaaaatggagaaagcatgagcgtgggccttttgtctcagacctaccttggaagtcataaaagcggagcatgttgttgttccaatagtggcattcaacaagcaccgacagatgattaatttagcagaatcaaaagccagccttgctgcaattctggaacattctctgttttccacggaacagaagttactggcagaacttgatgctattataggcaagaaggggacgaggatcatcatttggaatcttagaagctacaaaaatgcaacagagttcgattttgaaaaggataaatatgatatcagaattcccgaggatttagatgagataacagggaagaaggggtacaagaagcaggaaaggatggaccagattgcccctgagagtgactattccctgagggcttattgcagtatattatatctaaagccaagaatgcagatcatcctacgtggacagaaagtgaagacacagctggtttcgaagagtcttgcctacatcgaacgtgatgtttatcgaccaaaatttttatctaaaacagtgagaattacctttggattcaactgcagaaataaagatcattatgggataatgatgtatcacagaaatagactcatcaaagcttatgaaaaagttggatgtcagttaagggcaaacaacatgggtgttggagtggttggaattatagagtgtaatttccttaagccaactcataataaacaagatttcgactatactaatgagtacagacttacaataacagcactaggagaaaagctgaatgattactggaatgaaatgaaagtgaagaaaaatacagaatatcctctaaatttgccagttgaagatatacagaagcgtcctgatcagacatgggttcagtgtgatgcctgtctaaagtggcggaaattacctgatgggatggatcaacttcctgaaaaatggtattgctccaataacccatgacccacagttcagaaattgtgaggttccagaagaacctgaagatgaggatttggtacatcccacttatgaaaaaacctacaaaaagaccaacaaggaaaaattcaggatcagacagccggaaatgatccctcggattaatgctgaactgttgtttcggccaactggctctttcaactccaagtcttttcttctcctaaggaaagtgtttccaaaagaagcatctttcagaaggaacaaattcttatgcgacaagacttctaaataatcatcaagttccacctcagtctgaacctgagagcaacagcttgaaacggagactttctactcgttcctcaattttgaatgcaaagaatcggagattggagtagtcagttttgaaaattcagtttataaaggtggatgatgatgatgaagatgtcatcatcttagaagaaaacagtacccccaaacctgcagtagatcatgatattgacatgaaatcagaacagagtcacgttgagcaaggtggtgttcaggttgagtttgtgggtgacagtgaaccttgtggccagactggttcaacaagcacctcatcatcccgatgcgaccagggaaatactgcagctacccagactgaagtaccaagtttagttgttaaaaaagaagaaactgttgaagacgagatagacgtaagaaatgatgcagtgattctgccctcctgtgtagaagctgaagcaaagatacatgaaacccaggaaaccaccgataaatctgcagatgatgcaggctgccaattacaagaactgagaaaccagctactccttgtcactgaggaaaaagagaattataaaagacagtgtcatatgtttactgatcaaatcaaagtgttacaacagaggatactagaaatgaatgacaagtatgttaagaaagaaacttgccatcagtccactgaaaccgatgctgtatttttacttgaaagtattaatggcaaatctgaaagtccagaccatatggtatctcagtatcagcaagctttggaagaaatagaaaggctgaaaaaacaatgtagtgctttgcaacatgtaaaggctgaatgcagccagtgttccaataatgagagtaaaagtgaaatggatgagatggctgtgcagcttgacgatgtgtttagacaactggacaaatgcagtattgagagggaccagctataaaagtgaggttgaattagctggaaatggaaaagtcacaaatccgttcacagtgtgaaggactcaaaactgaagtaggaccagttaaaatctacaaatcaacagacggcaccagatgtttcaacatcaagtaacattgaggagtctgtaaatcatatggatggggaaaggctcaaactccgatcttttcgagttaacgtaggcaacctcctggctatgattgtgcctgatcttgatcttcagcaagtgaattacgatgttgatgtagttgatgagattttaggacaagttgttgaacaaatgagtgaaatcagtagtacttaaagtatatgttatgtaagataaaatatttgctcaattcttttggttgtacagctttcaaaatataattaattttgttttatagatatgataggcaacagactgaaaaccataatctttactgtattctatgcattcaaatgtggtcacaaatattgtggacacattatcttatgttttgaaatacctgtgaattgttggcattgagcagctgaagctaactcatgactctgttttgaatgtaaatatttgtaattaagcctgcacatatttttttattgccctagagtactccaagtgtttttcaccaaggagcttttccaggttgcccctaaggctttgtgcaattttttctggttccccaaagtgtatttttctctaagtcgaggggctatgccattaattacaaatggggaaatgttacctttgattttcttattaaagggagttttaaataggggtttttttaaataatgtagtaacactcctgatacaactctggttataagtgaattgagcattaatgtttcttttgtataaattccctgccctgaataatttatttcatgaaaataaggtaaggcaaaaaccaactccattttgccagggattttgttgtgctgaggattgccaatcacgggttaaacacaaagtgtttttataggaatgaaggaaacagtcttttaacagaaaaagggtattggaaatatttaatgggccaccaagtttactttgaaggcccatttttgggctgtttaggtcagcatgaagtgggcatgataattttttaatatttctttttgtgaaattcccctgtacagcccttttgtaggattacctacaggttaatgtgagttgaggaagacagtctttctcaaacaatactacataccttttattattattacaaacctaagtgttttatatcctagagtcaaggaacaaatttccttaggattatagtattacatgccataaaatactatgctttattggtcccatgttttggtgccatttttaaagagatgggctttctattaaggtataaactatggatatataagaacccatattttcccacaactaaaatgtgccattattttttccccaaagttttatcattgcctatttatttttaccctttgtttttgaacattcaatcccgttcattttgtatgtatgccttaatacgtgtcggtcatatatagtattgaatttttactgtatagggaattctgggaaagaggcaaataaatgaaggattgtttttatttgcccggataaagtaattgaaagtgtatttttgggtatgaagctggttttctgtcacaatttgtaatttcccgaaattttaaaatatcttataataaaataaaaatatatgatggctaactgttc

SEQ ID NO: 153149 - DNA, 2385 bp, Homo sapiens
  misc_feature (1)...(2385): n = a,t,c or g
ttttttttttttttttttttagagtgtcactgatgctttatttacatgcgtcaccatctcttttacaaactaaattacggttttaagtggaatacacaaggcaatatctacaaacaccaaggaaagttaagtactgcatctttatttcatttggaaaggggaagattcccaaatcaaactggttttgatccttaaaaaaaggcggcagagttaattcatggcaacatatggttagacaaaaatcctcagtaagaatgccatatgataagtgttcgcatttgaaaggaaggatggagggtgcttcaaaatcaaaagtctcaactgcttgactcttcaggtgtttaaatatggccacacaccatatttagttcctagattaatatgggattatgagccaagggaattgaaacagataagatagtttttacagatactgtatacagatttttttttcccattcatgcaaactttttttcttaaaaaaagttaaacatgtgaagcccaaaatgcacaatacatttttttaaatatttaactaatttttctggtcctccttcacatttgtttacatttcccatgtacataatgtgcctgggacaagtatacaagagaagactggattgccaggcaatgagataattttagagaaataagtgacccagacacatagttccttaaaagcagccgcacacgtatttctggagtgtggcaaagaggcctcatgacccaatcattcatcaaagagyaaatacayacagatacaaactaaacaagaggaaaatattccattcatttaaactgcataaaatgttacccacttaagatttagataaaatatactcttttatttgggcatccgcttcaagacctcatttgacaggcatgattccatcagaacttcacttcctctagtagtactctgcctccccaggtctctgagagaggctagctttttcgtacctctttactggtgattgcatttctaccaaaaaaaaatttttttttttaacattatgcctaatcatacaatgttcacccaaatacagcaagaaaaataaaaccagagttcagagctgttagggtttcctttttgctttcagagaggatgagtaacatttttttttttttttttgacacggagtttcactcttgttacccaggctggagtgcactggccatgaatctcggctcactgcgatcctcgccttcctgggttcgaacagattctcctgcctcagcctcccagagtagctgggaattatcaggcatgcgcccacccatgcccaggctaaattttgtatttttaaatggagacggggtttctcccatgttggtcaggctggataacatttttatttcccctcgcaagtccttggcaccaacatggaggacttctttttgactggcttaattcttcatggccttttccaagaagattcaaatgctccttattcctttaagtggggttcactaaggtagagggcaaagtctgttccccaccatctttaaaactgcgtaacaagtttgggaagccaccttgaaatcacaccctgaggcggggcaatactttgtcctngaagtagtaagccatggtgatcctctcctcagggtggggaagcaacacacacaatgctaaaaattaacaccaaaaacaaacacaaagtccgccttgtactacacatgtgtgactggatcctcccattaacaggagtgacaagcttctgaatttttaaaatgtgtttcagcaatcatattgcagaggaagcaataaaggaaaccaagctcagattcattcacagttaatggggtacactgagcctggcagccagttctcatgccaggacagtgaaggcttgtgataaagctctttcctagctttggtaacaggtatcaggttctggagccctggagagaacagcagatcccaagagcgcatgtcatgttttcaacattaggtactcttctaatttctcatcaaaaagtaggcggctccctagagcagcttatttacaggccaagtgtggcctcggatagttctcatcataaatcaaacattacagctgccaggccccttgaggctaagcattctgttgatatgctccagatcagaaaattattgttagggacccgtgacactcactcagaatgtgacatggtggccaacggctggcctgtcctgaaagcagggtctcaacataaggggcagagggctctggcagcacccctgcccacttcagaaccaggctagtctctgggccctggcctctctgcaggtggctgagggtgagggtgccgggaccctagacaggcttcactaccagattctcggctgaccctctccaggggctggtgggtctcgcagtactgatgctgcacttgacttta

SEQ ID NO: 153150 - DNA, 1773 bp, Homo sapiens
aaaggatgtgttaacttaaattcccatgaaggaaggacgccttgtggacaactgtaacaaaatctcagactataaaatccacagcacaaaattaagaagcagtgggtacacattagtttcacaaagaatgtgcatttttcttacatagccttgaagttatctccttcactgtctattggaggtaacatcatcttggggtgcccagaggctgacatggacatcgacttctgatgtctcagccgacaggtagatgtaacaaactgaggcagggcctagctgcgtaaccgaacatttctgtcaggctgggaggggtttgggttccaggcagaggcagaaacacagtatgaaggagcagtgacccacagagcaacctgtgtgtaatgcacacaccttccctccccaagcccatcctcatttcctggtaaagaataaaaatctccctaagcttgttttggagattctggagcaactgctaacctatagttgctttttttttttccaaacagtaatcataaaaatctattaccttaaaataaaatagcagattacatgtttgaatatctgtttctatgagagggacaatgtcctctgagggtatgcacaaaataaaacctattctaagagatgcctcaattcaaatctaagtggtaaaatgaatatataatatgagcatgctatgctctcaacctgttcccaaaacacactgacatattttattttttctttatttattttttttgtagagacaggggtcctcgctatattacccaggctggtcttaaatttgtggacttcaagtgaatcctcccgccttggccttaccaaagtgttgggattataagtgtgagccaccacacccggcccgcactgatgtattttaaatgcaattaataagaattacaggtataggaactagctgttatataacagtatcctatgttgtttggtgtttttttgagacagggttttgctgtcacctagctgcagtgcagtggtacgatcatggctcaatgcagcctcaacttcctgggctcaggtggttctcccacctcagcctcctaagtggctgggaacacaggcgcactccaccacgcctggggtaattttgtatttttagtagagagagttttgtcatgttgcccaggctggtcttgaactcctggggctcaaacgatacgcctgccttggcctcccaaagtgttgtgattacaggcatgagccaccatgccccagccttcccaatgttgttttaaacaatatagtcctagaaaccttccctaatcaaaaggacatttactcccaagataaaaaacagtccagcagagcccccttatcccaagatgggcaaattcatcagagcaaattaactgctaaccagacatggtaagatagagtggctggaagtctgcagtttcatctaacacacacagttaccggacaaaactacccccaggagtctcactgggacacattatttggaattccagctcagtaatcatgtccttggaattcaagggcagtttctttcctttaaggataagtaggaatacagctcttccagtgtctttctgcagaaatcctttggaaggattaaaacctggaaactggcaagttcttcctttccctaactcacgatacacagactaacgacatcttattggtgtcaacttcctagtagctcttcaggtggcccatctgctccacttctaccaggcctcagtatagagcctcgctccttgtcttcactggtcccctgccttgccccacacctca

SEQ ID NO: 153151 - DNA, 479 bp, Homo sapiens
aatagaccgcttgtagaactctgacgagccggccaggaattccaggctcacaaggctatcttagcagctcgttctccggtttttagtgccatgtttgaacatgaaatggaggagagcaaaaagaatcgagttgaaatcaatgatgtggagcctgaagtttttaaggaaatgatgtgcttcatttacacggggaaggctccaaacctcgacaaaatggctgatgatttgctggcagctgctgacaagtatgccctggagcgcttaaaggtcatgtgtgaggatgccctctgcagtaacctgtccgtggagaacgctgcagaaattctcatcctggccgacctccacagtgcagatcagttgaaaactcaggcagtggatttcatcaactatttaggcgctggcccgaggatatcccagcggtggtacttcggagacacctgtctgcatctgactgagcagaacaaatcgtcaggtgcctg

SEQ ID NO: 153152 - DNA, 424 bp, Homo sapiens
  misc_feature (1)...(424): n = a,t,c or g
tgtcgnnnnnnnnnnnnnnnnnnnnnnnnnnnnnnnnnnnnnnnnnnnnnnnnnnnnnatcggcgggcccgcaggtcccggatgttgcggacagtatgaggcaagcgcagggggacggggaccagcagctgtcgccgccgcnnnnnnnnnnnnnnnnnnnnnnnnnnnnnnnnnnnnnnnnnnnnnnnnnnnnnnnnnnnnnnnnnnnnnnnnnnnnnnnnnnnnnnnnnnnnnnnnnnnnnnnnnnnnnnnnnnnnnnnnnnnnnnnnnnnnttcctgttagacaagacaaattagagttttcctactgacttaacttgggtgaagagggaacagaaatctttgccccctgactttggaaatctcgtttaaccttcaaactggcgatgtcaagggttccaagtcctccacctccggcagaaat

SEQ ID NO: 153153 - DNA, 2549 bp, Homo sapiens
  misc_feature (1)...(2549): n = a,t,c or g
acgccagcttggacgagggagccgcagtgtatttttgctggccaacgtgcgcactgcgaatgcgtgtgtatttgtgtatcggcggtcccgcaggtcccgggatgttgcggacagtatgaggcaagcgcagggggacggggaccagcagctggcgccggcgctctcagggtgaagagggaacagaaatctttgccccctgactttggaaatctcgtttaaccttcaaactggcgatgtcaagggttccaagtcctccacctccggcagaaatgtcgagtggcccccgtagctgagagttggtgctacacacagatcaaggtagtgaaattcctcctacatgtgggacccatcaataactttagcttttgccgggaggaaatgggttgaagtccattaaaagttcaacattttcatcaggagcaaatgataaactgaaatggtgttttgcgagtaaaccccaaagggtttagatgaagaaagcaaagattacctggtcacttttacctgttacctggtcagctgttccaaagagtgaagttcgggcaaatttcaaattctccatcctgaatgccaagggagaagaaaccaaagctatggagagtcaacggggcatataggtttgtgcaaggcaaagactggggattcaagaaattcatccgtagagattttcttttggatgaggccaacgggctttctccctgaatgacaagcttaccctcttctgcgaggtgagtgttgtgcaagattctgtcaacatttctggccagaataccatgaacatggtaaaggttcctgagtgccggctggcggatgagttacgaggactgtgggagaattccccggttcacagactgctgcttgtgtgttgccggccaggaattccaggctcacaaggctatcttagcagctcgttctccggtttttagtgccatgtttgaacatgaaatggaggagagcaaaaagaatccgagtttgaaatcaatgatgtggagcctgaagtttttaaggaaaatgatgtgcttcatttacacggggaaggctccaaacctgaccaaaatggcctaatgatttgctggcagctgctgacaagtatgccctggagcgcttaaaggtcatgtgtgaggatgccctctgcagtaaccctgtcccgtggagaacgctgcagaaattctcatcctggccgacctccacagtgcagatcagttgaaaactcaggcagtggatttcatcaactatcatgcttcggatgtccttggaaaacctctgggtggaaatccaatggtggtgtcaacancccccaacttggtggcttaaggcaataccggctctctggctttcaagcacagtgcccctttttctggggacccccaacgcaaaacgccctgaaagcaatccctaaagatcctgctttgttgttaaggattccgttttaattttccagaaggcagcagcccactgtttgcttgccattgaaccaccagggtaggacagcgcaatctgtgggagcttttactcttgtttgttgagggggaagagattggcatttttggccccagattttttaaaaacagcactaaataacttgggggggaaacggggggagggaaaatggaaatgaaaaccctgttgctgcgtcaactgtgttccctttggcctggctgagtttgatactgtggggattcagtttaggcgctggcccgaggatatcccagcggtggtacttcggagacacctgtctgcatctgactgagcagaacaaatcgtcaggtgcctggagcaaaaaggaaaaaaaaaaaagaaaggacattgagttttaacagaagggaaaaggaaagaagaaaagatttttgcagaatttctcaaaaatcagtttgtggattccagtagtatttatattgagagaaacaaattttagtccttctaactgtgctaaaacttggatatttgtgaaaactccttacccaccctacaagccatccagaagagcctctcttgttgttagcaccttattgtttgcaagaacagaatacatccttttatccttttatgaaaaatgacaagtgaaggcaaaaggggaaggttatttgatctggaagatgagtgttctgatgtggtggcttttgcaaaaatctttattggtgttggaaaactggaaaaaataactccatccagaattccatattgtcttgacaagaactatggttctctgttttttaggatattgtggggaaatgtttttgggcatttttctctgattttatttcttctcccccacccctttttctaaaaaacaaacaaaaaaaaaaaaacacacaaaacaaaaacagaacaaaagaagagagaaggaaattttatcaattaaaaatgctgtgtgataaaatccccagcccagatggctcagctgtttgtacctgacttgccgcctgcataggagccagttctgttccttctgactagcccctcttcctccaggggagaacttccaaatgttaattttttttttttttgaaaatataaataattactattttgtaaaaaaaaaaaaaaaa

SEQ ID NO: 153154 - DNA, 493 bp, Homo sapiens
  misc_feature (1)...(493): n = a,t,c or g
gagaggtcnnnnnaactgagaccatgagtaacagtcgaggaatccggaggaggcgccggaccggggggannnnnntatttaaacagatcacatcatgcgtgagtacaatctagtggtccttggttcaggaggcgttgggaagtctgctctgacagttcagtttgttcagggaatttttgttgaaaaatatgacccaacgatagaagattcctacagaaagcaagttgaagtcgattgccaacagtgtatgctcgaaatcctggatactgcagggacactcagtccacgtttaacgacttacaggacctgagggaacagattttacgggttaaggacacggaagatgttccaatgattttggttggcaataaatgtgacctggaagatgagcgagtagttggcaaagagcagggccagaatttagcaagacagtggtggtactgtgcctttttagaatcttctgcannagcanagatcaatggttatgagatat

SEQ ID NO: 153155 - DNA, 1101 bp, Homo sapiens
atgcgtgagtacaagctagtggtccttggttcaggaggcgttgggaagtctgctctgacagttcagtttgttcagggaatttttgttgaaaaatatgacccaacgatagaagattcctacagaaagcaagttgaagtcgattgccaacagtgtatgctcgaaatcctggatactgcagggacagagcaatttacagcaatgagggatttgtatatgaagaacggccaaggttttgcactagtatattctattacagctcagtccacgtttaacgacttacaggacctgagggaacagattttacgggttaaggacacggaagatgttccaatgattttggttggcaataaatgtgacctggaagatgagcgagtagttggcaaagagcagggccagaatttagcaagacagtggtgtaactgtgcctttttagaatcttctgcaaagtcaaagatcaatgttaatgagggtcccatcatcagacctcttgtgggtgagacgaagggcacgggccacacttctctagccgctgtcatccttgcccttagcatcactaatgtctccagttgcacaggttggggagttcaacgcagccaccaggatcaagggaactctaagcatgcagcctcctcagtttggaaagtaggatttggaatagtgagactaggcactgggacctgcctgtcttccttggagaggggatacatgtgcatggagaaagagatgtttgatccttatactcccagcagggtcctgaagcccagggtaaaactgggaccagatgttgttgccaaagaggacaaggagatgaacccagccaggaagacgagtggaaagggatcgaggaagaaagggaaaaacgtggaggataggacagttcagtttgttcagggaatttttgttgaaaaatatgacccaacgatagaagattcctacagaaagattgttctccacacagtaaccatcataattccatttaaatggagaagtcctatgcactggactcaggcccaacccagccccaccggagcctggagtctgatgaacttggttggtgggtcccatggaggtaaggacaaggacagcaaggaaccacatccc

SEQ ID NO: 153156 - DNA, 2012 bp, Homo sapiens
ggcacgagaggaggtggaggaggtggaggaggcgccggaccgggggggatagattcccagaagtgggataactggatcagagggtgattaccctgtgtataagagtatgtgtctcactgcaccttcaatggcattgagtagatcgtcagtatttaaacagatcacatcattgcgtgagtacaagctagtggtccttggttcatgaggcgttgggaagtctgctctgacagttcagtttgttcatggaatttttgttgaaaaatatgaccctttcgatagaagattcctacagaaagcaagttgaagtcgattgccaacagtgtatgctcgaaatcctgggatactgcagggacagagcaatttacagcaatgagggatttgtatatgaagaacggccaaggttttgcacttagtatattctatttacagcttcagtccacgttttaacggactttacagggaccttgaggggaaccagattttacgggtttaagggacacgggaaggatgttcccaatgattttggttggcaataaatgtgacctggaagatgagcgagtagttggcaaagagcagggccagaatttagcaagacagtggtgtacactggcccttctggaatcctccgcccaaggtcagagatccaggttaatgaggttctctagtgaccctgtccgacagattaatcgggaataccaccagtggaaaagaagaagccttagaagaattccatgtcgacgctcctaggccccatagtccgcaggcagctctgagccagattacaggaatgaaagaactgttgcctaattggaaagtgccagcattccagcacttcaaaaataaaaaatctgaaagaggcttctcctgttttatatattatgtgaagaatttagatcttatattggtttgcacaagttccctggagaaaaaaaattgctctggtgtatatctcttggaaaataaagacaatagtatctctcccttccaaatagcagttataacagatgtgaaaatatacctggactctaatatgattatacaaaaggggcatggatggcatttcaaatgttaaaatattgctcctataatccaaatggatttccatattggatcctttttatccatggatccctaccctatccaagcacctaaaaagttgaacccccattatacctttatatccctgtaatggataccctgattatgaaatgtcccccctcaaacctcattgccagcagataaccttttttggagtcattgaccttcattttatatttaaaaaaattatgggatatcatcctgtcattatattcctaattaaaattggtgcataatgctttggaaaaatgggtcttttataggaaaaaaactgggataactgatttctatggctttcaaaagctaaaatattataatatactaaccccaacctctaatattgcttcttgtgttttactgtcaagattaaattacagcttttatggatgattaaattaatagtacattttcatttggtttgtgtgtttttgttattgtttatagattaaagcgtttattttataatgaccacattgttttaaatgcgacagtagctcctttctgcctagtatctgcagaacactggctttaaactatactaagtaactggtgatttctctaggaacagacctcgcactttctgttctaaatatatttattcctactatacagtaaaatacatcagacaacatagaatagttttgtatattctctcttgatcttaaagattgtatcttattgaatatcccactgtatattatttttatatgtaaaaagataagtttaatactgtatcagggtttaacttttactatttcagatcttccacagcttgtaatttcatcaagggaatccttttgcattgttaatttgttgggtgtgagtccaccaatgaagtgttatgtgaaaaatttcaaacttgctttatattaaatggagaaattgtgagagaggggagaaaaggttaaaccctt

SEQ ID NO: 153157 - DNA, 618 bp, Homo sapiens
catccttgcatcttaggttcacccgttgactcaccaactggctcagtggcccttgatgaaaggatacatgctataaattagtagaagagttcgtctcctggggccaacatgcttgcttcccataattggatgataaaaattataaatcctgatgtgtttctctttttaccaatggctgtcaggaaactcaagagtaaaacttaattgcatgattatgggaattacaccagttagatttacagaataatttctcgtgcttttttacttcttatttttattttactgaacccctatgattaagattgtaaatagcctctgatgctttttgaaaatcctgagtaattaaatcagtttggttgaggactcgatcccttaagtccctgctcagtgctctttttaagatacagcatcatgtttattggttaaaagaaagatgaggctggatgccgtggctcacgcctataatcccagcaccctgggaggccgaggcgggtggatcaccgaggtcaggagttcaagaccagcctggccaacatggtgaaacccgtctccaccaaaaataaaaaaattagtcgggtgtggtggcacaaccgcaatcccagctactcgggaggctga

SEQ ID NO: 153158 - DNA, 1338 bp, Homo sapiens; identical to SEQ ID NO: 151232

SEQ ID NO: 153159 - DNA, 2125 bp, Homo sapiens
tttttttttttttttttcagtgtccataaataaagttttattggaatacagccacgttcgttcatgtatgtgttgtctatggctgcttttgcactacaatggcagaattgggtggttgcaacatattttatggcccccagccctaaaatatttactgtttggccctttacagacaagcttgctggacccttggctctaagtcaattcgtgacgatttttccaactgctgacatttataaaatgggcagtcccctgggcttcattcatcagtaaattgggttgggtgggcaactaggccctgtgccattttggcttctcctcaggcagggatctcacatgtgtggaagggctttcaggtttcaggaaatcatcaatttccagttttaaggtctggatggaaaataattatattttttttccaccatgtttcacctcttaaacttcttgcttaaagatcttcacctgtaatgttgtatacagaggcttattagtatactgaaaatgaagaaacagaaacacttgcggtataccaagggttcagagttttccagccacagctctagtggctaggtttggggaagagactgtttcctctgtactcacaatgttagaacatgatgtttctaggaagtagaacattaggttatttctgtcttggaaataaatatttcacattctttagaaagtttgtttttttaaaaaagatcacatcaaataaactgttcaactttaagaaaaggtggaattccttcagctaactactacttcagatagatgaatatgttctttaaaaatctgtagattattgaaactttaaaagggatcattttagaacaaatatgaaatatgttacctaaaaagtggaaacaatactagactaactttctttttgctctctctccctcttgtctggctggactgctgcctccaaagttcaagcaattctcctgcctcagcctcctgagtagctgggactacaggaatttttatattttttggtagagatggggtttcaccatgttggccaggctggtctcgaactcctgacctcaagtgatccacacacctcggcctcccacagtgctgggattacaggcatgagccactgtgcctggtcctaaactctaaacttcttttcttatgagctcttcttttcttttacaagtgctctttcttgaaaagaccattgtaaaggaggtcataacatgggatgtcaattcacatagatgcaccaatgactataagagaagcctccctagcttttgttttgagacggagtctcgctctgtcgctaggctggagtgcagtggcgcaatctcggctcactgcaacctccgtctcccgggttcaagcgattctcctgcctcagcctcccgagtagctgggactacctgcgcacaccaccacgcccagctaactgttgttgtatttttagtagagacggggtttcaccatgttggccaggatggtctcaatctcttgacctcgtgatctgcccgccttggcctcccaaagtgctgggattacaggcgtgagccactgtgcctggccaggcctccccagctttaagcaaagctgtgaagttaacagaatgattctaaatatctgcttgcttagaaaaagaaaaaaaaagtcatgtgaatccattggtcagaaaaaataaatatctacttgctacaggacaatagaatctaaaggcaatcatctaaatcactatcaatcaccctcccccagtctcctaaaatataagcaattagcaatgttcattatagtaggcatattatttttaagtcaaatttctaatggagttgtattcttctgtacttaagaagtaatcttgtagcacatatcgggctctttatatgtagagaagtatatgaccaatttactagctttagtgtaatttcacctcattacagaagttatagaggtgtgtataacatcacacctatgatttatttgatactaacttctggatatggaaaacaatatttaaaattttgaccactgcagagtgtaatataggacatcagttattttaggagttgctctttaaatgtggaaacatgatctcaatgtattgggccttcttttgggctgttttaagtaaaatttggctctgggc

SEQ ID NO: 153160 - DNA, 2058 bp, Homo sapiens
cgaggctggaagaggatcttgggcgccgccagtctttagcaccagttggagtaagagttgagacctacttcacagtagttctgtggacaatcacaatggggatccaaggaagggtctgtcctgttcggggctgctgctcgtcctggctgtcctctgcccattcaaggtcattagccctgccagtgctcaacgggttcctaccccaaactgctgactgccaaaaacagccgttcaattgttcatctggattttggatgcgtgtcttcattacccaaaagctgggttaccaagtgtataacaaagtgttggaagtttgagcattgcaatttcaacgaccgtcacaaccccgcttgaaggaaaatgggtctaacgatcttactgtgcaagaagggccccgttgtaattttaccgaaccggcttgaaaatggtgggacatccttattcagagaaaacagttcttctgctgggtgaactccatttctgggcagcagcctgggagccttccatccctaagtcaaacaccagggagtgcttcctcacaaaactcccccgttccctgcgtagttccgtttttccccttggctggccacattctaaagggcttgatattttccaaatgggatcctggttgggaaaagaataaaaattagcttgagcaacctggctaagattagaagcgctttgggagactttgaagaccagtcctgtttgcaggggaagccccacttgaaggaagaagtctaagagtgaagtaggtgtgacttgaactagattgcatgcttcctcctttgctcttgggaagacccagctttgcagtgacagcttgaagtgggttctctgcaagccctcaagattattttcccctctggctccttggatgtaagtccagttagccatccattagtaccatctttggagggtggggccaggagtatatgagcatccctctctcacatggaacgcctttccataaacttccagggatccccgtgttgcccatggaggcatgcccaaatgttcccatatgtgggtgtccagtccagggacaacaagatccttaatgcaagagctagaggacttctggcagggaagtggggaagtgttccagattccagatagcagggcaataaaacttagagagggtccaagggctgaaaaatcgagtttttcctctgtctttaaattttatatggggctttgttatcttcccactggaaagagtgtaatagcatacatcattgggtgtgttaaagctatttccttgcccttttttttattggaatggtaggatatcctgcgtttgcccacacacagtttacagagtgaacactcttactacatgtgactggcaggtattaagtgtgcttattttaaatgttactggtaagaaagggcagtttcaggtatgtgtggatataggtatgaatgcagtgggggacccctttggttggttacagtttgagacttcaaaaaggtcatccttaatacaaccagaatcttgcagggggtattgtttttaccaatctggaatccaggcctccgtgctaactccctagctgactcaggcatagattgtatcaaaatccctttgtaacgggctcttagcacactcacagatgtttgaggctttcagaagctcttttaaaaaaatgatacaccccttccacagggacaaactttttcccttttccctgtgtattctagtgaatgaatctcaagattcagtagacctaatgacatttgtattttatgatcttggctgtatttaatggcataggctgacttttgcagatggaggaatttctggattaaatgttgaaaaaaaaacccttgattatactctgttggacaaaacgaggtgcaatgaatgatgcttttctgaaaatgaaatataacaagtgggtgaatgtggttatggccgaaaaggatatgcagtatgcttaatggtagcaactgaaagaagacatcctgagcagtgccagcttttttctgttgatgccgttccctgaacataggaaaatagaaacttgcttatcaaaacttaaaaaaaaaaaaaaa

SEQ ID NO: 153161 - DNA, 438 bp, Homo sapiens; identical to SEQ ID NO: 136369

SEQ ID NO: 153162 - DNA, 535 bp, Homo sapiens; identical to SEQ ID NO: 130889
  misc_feature (1)...(535): n = a,t,c or g

SEQ ID NO: 153163 - DNA, 419 bp, Homo sapiens
gtctcggagctcctggagtcttcctgcagagccgctggtgacctgggtgaaaacttttggcccgtttggaagcggcacgcaggacaacctgactatgtacatggatttagtggacggcatctttttgaaccaaattatgctgcaaatagatcccaggcccacaaatcaacgcatcaataagcacgtcaacaatgatgtgaaccttcgcattcagaatttgaccatcttggtgagaaacattaagacctactaccagagatggggtgatgattatgatgaagaaggtgaagaagcagatgagccgggggaagaaggaggagatgaggaacatgatccagactatgacccaaagaaggatcaaaacccaacagagtgcaagcagcagtgaagcaggatggtctaccttccgcttccctggg

SEQ ID NO: 153164 - DNA, 467 bp, Homo sapiens; identical to SEQ ID NO: 130890
  misc_feature (1)...(467): n = a,t,c or g

SEQ ID NO: 153165 - DNA, 798 bp, Homo sapiens; identical to SEQ ID NO: 151856

SEQ ID NO: 153166 - DNA, 1222 bp, Homo sapiens
atggacgtgacagtctcggagctcctggagctcttcctgcagagcccgctggtgacctgggtgaaaacttttggcccgtttggaagcggcagccaggacaacctgactatgtacatggatttagtggacggcatctttttgaaccaaattatgctgcaaatagatcccaggcccacaaatcaacgcatcaataagcacgtcaacaatgatgtgaaccttcgcattcagaatttgaccatcttggtgagaaacattaagacctactaccaggacatgggatatggccagacacaggcctggggagcagggatcctggagagctttctcgggggaaatgtctgcctgcggctggtggggttgactggcagggaaggggtgtcctctgggcaagagcggcacctgcagagctttggagacataaagcagcctgaagaggcacaaggtcgaatggtgggttcctttgagcgtacccctcagatttgtggccttgggtacaggttcaggaagggagagctggaacctctggaggtggccgtgttcgtgggaacagggtcagtgggagcagctgtcatggtggccatgggagctgctaccctggaggccccagaggcactagagagcatcaaccaggaatcttcctgtggctgcataaagccttgtggaaactccctggagtggcgacagctggcccgtgcacttcttgtgagatggggtgatgattatgatgaagaaggtgaagaagcggatgaggaaggggaagaagaaggagatgaggaaaatgatccagactatgacccaaagaaggatcaaaacccagcagagtgcaagcagcagttgaagcagggatgtatgtggcctttgagggataacctgcactggtctaccttctgcttccctgggaaaggattgaatttacatcatttgacaagcctattttccaagttatttgttgtttgtttgctttgtttttgtttttgcagctaaaataaaaatttcaaatacaattttagttcttacaagataatgtcttaattttgtaccaattcaggtagaagtagaggcctcccttgaattaagggttatactcagtttttaacacattgttgaagaaaaggtaccagctttggaacgagatgctatactaataagcaagtgtaaaaaaaaaaaaaaaaagaggaagaaaatcttaagtgattgatgctgttttcttttaaaaaaaaaa

SEQ ID NO: 153167 - DNA, 2403 bp, Homo sapiens
  misc_feature (1)...(2403): n = a,t,c or g
atctgctcgcggcgccgcctcctgctcctcccgctgctgctgccgctgccgccctgagtcactgcctgcgcagctccgggccgcctggctccccatactagtcgccgatatttggagttcttacaacatggcagacattgacaacaaagaacagtctgaacttgatcaagatttggatgatgttgaagaagtagaagaagaggaaactggtgaagaaacaaaactcaaagcacggtcagcgtaactgttcagaatgatgccaaaatcctcagattcttgcaagcccttcaagaaagacttgatgggtctgggtagaaacaccaacaaggatacattgaaagcctgccttagggtagttaaaagacggagtgaatgctctcaaaaacctgcaagttaaatgtgcacagaaagaaacccaacttctatgagggaagttcacgatcttgaaaggaagtatgctgttctctatcagcctctatttgataagcgatttgaaattattaatgcaatttatgaacctacggaaggaaggaatgtgaatgggaaaccagatgaaggaaggatgaggatttcggagggaattggaaagaaaagggccagattgaagatgagaaaaaggatgaaggaaaaagaagaccccaaagggaattccctgaattttggttaactgtttttaaagaatgttgacttgctcagtgatatggttcaggaacacgatgaacctattctgaagcacttgaaagatattaaagtgaagttctcagatgctggccagcctatgagttttgtcttagaatttcactttgaacccaatgaatattttacaaatgaaagtgctgacaaagacatacaggatgaggtcagaaccagatgaattctgatcctttttcttttgatggaccagaaattatgggttgtaccagggtgcccagataggattggaaaaaaggaaagaatgtcactttgaaaactattaaggaagaagcagaaacacaagggacgtgggacagttccgtactgtgacctaaaaccagtttccaatgactccttctttaacttttttggccccctccctgaaagttccctgagaagtggagatctggatgatgatgctgaagcctatccttgctgcagacttcggaaattggtcacttttaccgtgagcgcataatcccaagatcagtggtaaattttacctggagaagctattgaagatgatgatgatgattatgatgaagaagganggtgaagaagcggatgaggtaatgtttaccaaatgagcaaataattctctgtggttaccacatttgagaagcaaatttgaatggacttattgtattcctttgctataatcattctgtgatttgggataaaaacattttggaaaacatgattttagaatttctacaagcccaaaacaatgtatgtataaggtttcaataaataaattgcaaaactcagcaacatttttttatttcaaataattttgttctgctgcagggttatcagctctttgaagaagtcaaaagctgcagtaaacttttccaacgttggctgcagtaactattttcaataaaagctgtctggatgtctcaagttgtgttgggaaatttttcatattagaagctttcaaattaaattgtattatcatcaaagtctgtaatcatgaaaatctgttgatccgtagagtaacttgtattaaattttccctccattatgagccagtttacctactatgtacatacttcatggatgcattttgaactttaatataggaaggggaagaagaaggagatgaggaaaatgatccagactatgacccgaagaaggatcaaaacccagcagagtgcaagcagcagtgaagcaggatatatgtggccttgaggataacctgcactgtcctagcctaaacacaactcttatttacttacagccttatgtttttgtattttcttggtagactaggtaatttttgttttaaaggacaggaaactgatattttaaagaccaatctgttctacctaggcatttttaactagtttttctgccagctatgttgaatgcacaaattctgtcacgcatgttcattcattgctacataatttggttcttctggaatatttttatgtagctcttggagtacagctatgaaaattaacaactgttaaaggaaataccnnnnnnnnnnnnggaaatttttcctttaaaaacccaaagatttttttcactgggttgtgaaaaagggtaaacccccttgggaataacctggccnnnnnnnnnnnnnnnnacaaaagggcggggctttatcttaaaacatttttttgttnnnnnnnnnnntggccaaaacacctattgggtaaaaattttccggggggcccccccccaaaacctgtttttaaaggg

SEQ ID NO: 153168 - DNA, 435 bp, Homo sapiens
ccacgagctagagcggagaggccggcgccggccagctgctcttcgccaacttcaaccaggacaacacccgatacggaagatgtgtgcattgtagagagattgttctccagcagcctagtggccatcgtgagccttaaagcaccaaggaagctaaaggtttgccactttaagaagggaactgagatctgcaactacagctactccaacacgattctggctgtgaagctcaacaggcagaggctgatagtatgcctggaggagtccctgtacatccacaacattcgggacatgaaggtgctgcatacgatcagggagacgcctccaaaccctgcaggcctgtgtgcgctgtcaatcaacaacgacaactgctacttggcgtacccagggagcgcgaccatcggagaggtgcaggtcttcgataccattaatttgaga

SEQ ID NO: 153169 - DNA, 457 bp, Homo sapiens
agctcctcttcgccaacttcaaccaggacaacacgtccctagctgttggtagtaagtccggttataaatttttctccctttcttctgtggataagctggaacagatctatgaatgcaccgatacggaagatgtgtgcattgtagagagattgttctccagcagcctagtggccatcgtgagccttaaagcaccaaggaagctaaaggtttgccactttaagaagggaactgagatctgcaactacagctactccaacacgattctggctgtgaagctcaacaggcagaggctgatagtatgcctggaggagtccctgtacatccacaacattcgggacatgaaggtgctgcatacgatcagggagacgcctccaaaccctgcaggcctgtgtgcgctgtcaatcaacaacggcttcggagaaggggaccgtgattagggtattttccattccagaag

SEQ ID NO: 153170 - DNA, 1463 bp, Homo sapiens
atgctcctgaggctccagcgaatcaagaccctcagacccccgggctgtccccaccccatgaccacatgttccgcaggcaccctcagcgctgtgccctgcgtgtcgcccaggcaggtgtttgtttttgagcgcagattctgcctgtggcatagccatgtggagatgttcacgcatgtacttccctttgtgatttcagccgatacggaagatgtgtgcattgtagagagattgttctccagcagcctagtggccatcgtgagccttaaagcaccaaggaagctaaaggtttggccactttaagaagggaactggagatttggcaactacagctactccaacacgattctggctgtgaagttcaacaggcagaggctgatagtatgcctggaggagtccctgtacatccacaacattcgggacatgaaggtgctgcatacgatcagggagacgcctccaaaccctgcaggcctgtgtgcgctgtcaatcaacaacgacaactgctacttggcgtacccagggagcgcgaccatcggagaggtgcaggtcttcgataccattaatttgagagctgcaaacatgattccggctcacgacagtcctttagcggcactggcctttgacgcaagtggaactaaacttgccacggcttcggagaaggggaccgtgattagggtattttccattccagaaggacaaaaactctttgagtttcggagaggagtaaaaaggtgcggtaagcatctgccccctggccttcagcatggacggccatgttcctctccgcttccagcaacactgaagacccgtgcacatcttcaaactcgagactgtgaaagaaaaacccccagaggaagcccaccacctggaccgggtacttcgggaaagtgctcatggcctccaccagctacctggccttcccaagtgaccagaaatgttcaaccagggcagagctttcgccacggttccgcctgccattctgcgggccacaaaaacatcttgctcggctagcccacaattcagaagatcccgcggttgttggtgggtgccgcccgacgggtacctgtacatgtacaaacctggacccccaggagggctggcgagtgtgccctgatgaagcagcaccggctggacggcgagtctggaaacgaccaatgagatcttggactctgcctctcacgactgccccttagtcacttcagacatacggcgcagctgcaggaaaagcctacacagacgacctgggtgctgtgggtggcgcctgcctggaggacgaggccagcgccctgcgcctggatgaggacagcgagcacccgcccatgattattcggactgactgaacttgacctgtgacctctgacccggggagcagagaacactggcttcacagaggactttgtgcattgctgctatgaactttgacctgagtcgggggagaggatggcagagactttattaaaaaaaaa

SEQ ID NO: 153171 - DNA, 2728 bp, Homo sapiens
  misc_feature (1)...(2728): n = a,t,c or g
ggtgcgtcgcgggggcggggccgcgcaggcgtaccgggtgccccggctctggagcataaacaagagcggggacgggatgaggcggcggttgatcccagggtggcgagtggcggcgaccgaggcggcgagcggggcccggcgccgaccctgagtgcagcctgacccgccctcgcgcgcgcgccctccccggccgggcccactcgccgcgcgcccagccatgaacctggcgagccagagcggggaggccggcgccggccagctgctcttcgccaacttcaaccaggacaacacagaagtgaaaggggcatcaagagcagctggtcttggccgtcgcgctgttgtctggtccctagctgttggtagtaagtcccggttataaatttttctccctttcttctgtggataagctggaacagatctatgaatgcaccgatacggaagatgtgtgcattgtagagagattgttctccagcagcctagtggccatcgtgagccttaaaagcaccaaaggaagctaaaggtttgccaactttaaagaagggaactgagatctgcaactacagctactccaaacacgattctggctgtgaagctcaacaggcagaggctgataagtatgcctggaggaagtccctgtacatcccacaacattcgggacatgaaggtgctgcatacgatcagggagacgcctccaaaccctgcaggcctgtgtgcgctgtcaatcaacaacgacaactgctacttgggcgtacccagggagcgcgaccatcggagagggtttgccaggtcttcgataccattaatttgagagcttgcaaacatgattccagctcacgacagtcctttaagcggcactggcctttgacgcaagtgggacttaactttgccacggcttcggagaaggggaccgtgattagggtattttccattccagaaggacaaaaaactctttgagtttcggagaggagtaaagaggtgcgtgagcatctgctccctggccttcagcatggacggcatgttcctctccgcctccagcaacactgagaccgtgcacatcttcaaactcgagactgtgaaagaaaaacccccagaggagcccaccacctggaccgggtacttcgggaaagtgctcatggcctccaccagctacctgccttcccaagtgacagaaatgttcaaccagggcagagccttcgccacggtccgcctgccattctgcggccacaaaaacatctgctcgctagccacaattcagaagatcccgcggttgttggtgggtgccgccgacgggtacctgtacatgtacaacctggacccccaaggagggcggcgagtgtgccctgatgaaaccagcaccggctggaacggcagtcttggaaaacgacccaatgaagatcttggactctgccctctcacgactgccccttagtcacctcagacattacggcgcagcttgcaggaaaaggtacttacgtgccttcatccccaacggagacttgccctacacgagacgaccctgggtgctgtgggtggcgcctgccctggaggaccgaaggcccagccctgcgccctggatgaggacagcgagcacccgcccatgattcttcggactgactgaacttgacctgtgacctctgacccggggagcagagaacactggcttcacagaggactttgtgcattgctgcctatgaactttgacctgagtcgggggagaggatggcagagactttattaaaaaaaaaaaaaaagattgtaagtggtaagtctaaactcccaataaacgctgaaggaaaaatacatcaattttcaacttcaagtggcttttaaaatcctgccttaatgaaattttaagctttttggttgtttggtttcctctttttgcccaaaattaactgtttggttgaagcccgcaaaaacctccttcgctttgcatgcatgaacgtgcccagcccagccatggggagctaggaagccacttttccagcccacctcccgttgggtttttttttatatctgtacataatggccgagtgcgttaagggaaaccgtgggcgtcgcgncacagtggggtctggcttgttcaaggggccagtttctggccagttgacagggcccaggggctgcccacccagggtgtgctggggcagaccttcagctggggacagaagttccgattctccctaggggccccacctggaccattttccctccgtttttattttgttaattaaattctttccaaattgggatcgctctgggatttcttccatggtggacttttggtttctgaatcttgttttccctgtggatattggaggacagcgaggttctttctgatactaaaaacctttctttcaggcagcaaatgaacttgaaaggttgcctggactcgctggagcaaaggaaagcgatctttcgtttgtataattaaatgatctgttcttctacttcactcttcctgttgaaaaactgtgtgatttttttttttttttaagtaaagtttgtagctcctcccatgcccaggaaagcacagaactcaagtgtggtggccgtctgagctgtcctttcgctggccccgctgtccgcaggggcttcctacctgtgtgagaggtcgtagcgggagacagcaacagagagtaggcggctgggccacgtccttcacagggcgtcatgtgcctttctattttcatcttagaaaatttcctcagcaaaccgatgagagatt

SEQ ID NO: 153172 - DNA, 1162 bp, Homo sapiens
caactggtgcagtcactggtatgggtcagcttccaggccggcacctcttctccttactcagccccatcttttaagcccaacatcacactacgcaatgccccatctcagcttcctgatttagctggggttggaaggggatgggggagcttcgcaatgggtgggggggcggcaaaggctccaagactgccggaacaggagcctgcaaggaagtcccgagactctgattccgcccatcttcagatcactgtgccttcgagaacttgtttccccatttgcaagtggggctgacctccctcctcgcgctgttccttctgcagctgcggctttaggaaggaatctgcgtttatgaaggggatggcaccgcagaatcattcccccgtgggtggcatcgatttcgagggccgcctcatcctgggggccaagcctccactcttcaaggtgccaagtcaacctgaaaccctgggagagacttgggtcatagccaagatggcaggtacctacggagggtcccgaaatacacttcccagaagtccaggcggcaacttccgctccacggtgccaaggtaggtccagacgacgcctaggcaaccgggggcggggctcccaaagcctgtcgtcgtggcaacgagtagtgattgacaagcctctcgctctagccctgggcgctcccgcaaggacggcccggattcgttccccgcgcttccggtctcactggggagccggaatccccgagtctgcagccaccgcccccgtccacacgatagccctcccggttaagaggaccccgccctcacctctgcgctcagcgggccgctccgcgctcctgagcacgcgcagtcttcgacttccccctcccgctggactacgtctcccaggatgctccgcgcaccagctcgagcgcctccttgcccttcccccaccctcgtccccgtttctacaccctctcctcccttcccctagcggtggtcgcaatgatcaggtcatactcctggccgcttcttcccatgctccccgcctcgaatccgtgcgtcggcatgcgcaagcctctcaggtacaacagacggcagcaccgcctaccagatcgcgcatgccccccaccacgttttcctcacttctctacgggccttcctgagattagcaggatcctgcaccaatcacggcc

SEQ ID NO: 153173 - DNA, 393 bp, Homo sapiens; identical to SEQ ID NO: 152074

SEQ ID NO: 153174 - DNA, 381 bp, Homo sapiens; identical to SEQ ID NO: 152075
  misc_feature (1)...(381): n = a,t,c or g

SEQ ID NO: 153175 - DNA, 633 bp, Homo sapiens
acatccttatggacaaaacagtcaaacttgtgtgcccagttacgggcatggcactcccaagattgataattggaaaagttgataagcagacgccattatgggatgcagatgatcccgtgtcacaactccataaatgtgcattttaccttaaggatacagaaagaatgtatttgtgcctttctcaagaaagaataattcaatttcaggccactccatgtccaaaagaaccaaataaagagatgataaatgatggcgcttcctggacaatcattagcacagataaggcagagtatacattttatgagggaatgggccctgtccttgccccagtcactcctgtgcctgtggtagagagccttcaggtgagaacgcctagttccaattggccttcaagctctttgcagctactctcagctgtgacctggcatcatttcatttcatgggagttttgatttttctccaatcgtctgattaggggatttttatatacaccatttgttgatttaaagaaaaaaaaacaaaattaggaggagcgtacttgccagaaaatttaaatgtaaataaacttgtatgttatcttgaaatgtttttagctagctttgtaataaaaaacaaaataaattgccctttttt

SEQ ID NO: 153176 - DNA, 2234 bp, Homo sapiens
  misc_feature (1)...(2234): n = a,t,c or g
atgcgcagtgccgctcgcgggccgcgccaatcctgcagcgccttcaacaggtttcgggcggcgaattccagttctccgggttttggggctccctgcgggaggcagtgctggatctgggaatctctaggaaaggaaagagcaaaggaggggaaagatggggggctgcagtctccacgtacgtccctcaaagcgcgtcctaaaacccggataaccggagcgctccccatggaccacacggagggctcgcccgcggaggagccgcctgcgcatgctccatcgcctgggaaatttggtgagcggcctccacctaaacgacttactagggaagctatgcgaaattatttaaaagagcgaggggatcaaacagtacttattcttcatgcaaaagttgcacagaagtcatatggaaatgaaaaaaggtttttttgcccacctccttgtgtatatcttatgggcagcggatggaagaaaaaaaaaagaacaaatggaacgcgatggttgttctgaacaagagtctcaaccagtgtgcatttattgggataggaaatagtgaccaagaaatgcagcagcttaaactttggaaggaaagaactattgcacagccaaaacattgtatatatctgactcagacaagcgaaacaccttcatgttgtctgtaaagatgttctatgggccaaccagttgatgacattggtgtgttcctcagacaagcggataaacgtcatctncaaacccttccaaaaaggaagcagtcattgaaaaatgctgacttatgcattgcctcagggaaggaaaggtgggctctgtttaatcgactactatcccagacagttaggtaccagatacttgcacgtaggaaagagggtaattttcatgccagttcacagcagtggggagccttttttattcatctcttggatgatgatgaatcagaaggagaagaattcacagtccgagatggctacatccattatggacaaacagtcaaacttgtgtgctcagttactggcatggcactcccaagattgataattaggaaagttgataagcagaccgcattattggatgcagatgatcctgtgtcacaactccataaatgtgcattttaccttaaggatacagaaagaatgtatttgtgcctttctcaagaaagaataattcaatttcaggccactccatgtccaatagcacctagtgagagagatgataaatgatggcgcttcctggacaatcattagcacagataaaggcagaagaaaactttttatgagggaatggggccctgtctttgcccccagtcaatccttgtcttgtgtaagagagccttcagttgaaaggcggtgcggacggtagccaatgcttgaacttaccaggacagaatttcactccaaaatttacggagtgtggtttggggaaggtagaagctgaaactatgtacaggtgtggagagagtatgcctctgtgtcgtcccagacattttctgcattccgagaaaggttggagatgggtccggcaacccagtcccaggttcccagtaactttggtcccgaaattgattggaattccatttatttcccaccagcctttaccttttaccttacacaccagaacccagggccgcgggccaccattgcagtgccagcaggagcaatccttcgagcccaattcaagccagggtgccccctaacggaatcaaacacaaacagcgagggaagtttacacaaacgccagcacaaattcaaccagtgtcacatcatctacagccacagtggtatcctaactaccgtctttttgctaggacttaaactgacttgagtgtggcaaaaagttaacaaaaaaggagaaaaaatgaacaatcgtttgtggtttcttgggaaaacttttcataccaggtgatactattcaaaaaccccgttgtctccctgcaaagtgctgatttgaaattgcagaagccacagtccaaaacacnnnnnnnnnnnnnnnnnnnnnnggggggcccttttaaaaaaatcctttgggggcccaaaatttaccccgactttcaaagaaaaatttttttcctaaaaaggggccaaaaaaaaacccacttggaaatttttggaaaaaaacttaatttttgggggggaacaaaatgggaaaaaccccctaaaaaaatttaacgctttaggggnnnnnnnnnntttttaaaggaatagggggaaaaacatccctcaaattcttcttttttaaaaaag

SEQ ID NO: 153177 - DNA, 435 bp, Homo sapiens
  misc_feature (1)...(435): n = a,t,c or g
ttttttttttttttcattttttaaatggtctttattaaaggctacaagtataaaatatgactaagttacaagtcgtcagtaagaatttattacttttgaaaatgttaattaaagaaagggagacgcaaagaaagggaggctcttcctgaaaatccacacagggggccaagggaggggctcccagatgaaacagaggctggttgctgatttcttgggggaacttttgtaaaaatgaagacactgaatcccttgagctgaatcccgggtgcagagactggggggagngtggagantccaaaatcatgctcaggtttctcctgaaaagtgtgtatttttctaaaaaataaatataaactcctgggtttgagaaactccctcatgatgaatggggagggaaaatcntggcaattggagagctaaggaacccatcttcgc

SEQ ID NO: 153178 - DNA, 1779 bp, Homo sapiens
  misc_feature (1)...(1779): n = a,t,c or g
cagcagtatctcttggagctggtgcagacaccaaggctgcccagtggtacaacgtggtccacctcccctagggaagctgctgcactcagaggctgtcctgcccagtggcccctgagccgtgtgagcctgcaggaggcgtttgagcagagcctcaagcccggtatggcgccatctccatgttgccatcactgcgttctcacctgaagccttaatctttgcgacacctgccagtgagcgctcggtttcaataccaaagtgtgtcttcttctttttttttttttttttaaatgcctgtttcataggaccttctgaaatgatttccagaatattttatctggctccaaaataaagcacatagcaactcacctcaacccctcatcatctccaggaaagtttctgccaaagctgtggcatagccaacttttgatttggttcttgccaattgttttatgtccctaaacctcatttggatccttggggtatagttttatctttctgcttcagtgatttactgtaacttttcaaatattggttctttgcgctaccatttaagtatagttgatatatgtgagggcaaaaaaagggtttcagcatgggtgggtgaggggaaaaagggagcttaggaaatcccagttggggcacagctggggggcaagcgccagttccccctcagggcttaacgggcacttgnttcacacagggatcctcaggaatcagccgggccacctgcctccaccttctgcctgggagggcatggggctgttgtaggaacctatggtaggcaaatgtatatgtatgagtttgtattctgtagtgttggtgtagcacagaagaaagacctgtgtcctagagagtaggccaaggtgatctgcctcttctattgggagaaattctaatttctttcccactttctcaacaagcccaatattccctccaagttcttcttgggtgctgagggctgtaggaattattgaaagccctctgcctcacttagtatcgtctggggcccagcacccagcaataactctaaataatgtttccttaatggtatagccctcctgagattaaaatggtaaaatcaaaaaattaggaaatcttggaagggagtcctcaagttgtattgctttggctgtgcttttgggaagaagggacgacctggaggacacaggctcctgtgggggtcttccatcctgcctgaccgggcagaatcttcctctaacaccttgggcaaaagtctatgcggaagatgggtttcttaagctctcccatttgcccatgattttcctccccattcaatcatgaggggagtttcttaaaaccagggagtttagtatttattttttagaaaaatacaccactttttcaggaagaaacctggagcatggattttgggattcttccacctcccccccagtcctcctgcaccctgggattccagcctcaaggattcagtgtcttccatttttacaaaaagttccccccaagaaatcagcaaccaagcctctgtttcaatctggggagcccctccccttgggccccctgggttttggggggtgctgcccctactgggggaacagcggggggtctgtcacccgtctgagccgcacccccctgtggtggatttcaggaagaagcctcccttttctttgggtctccctttctttaattaacattttcaaaagtaataaattcttactgacgacttgtaacttagtcatattttatacttgtagcctttaataaagccgatttaaaaaatgctaaaaaaaaaaaaaaaaa

SEQ ID NO: 153179 - DNA, 338 bp, Homo sapiens
atgagatctgccagttcctgaaaggagccaagatcacgcggctccaggatcagcaggttccctacgcagtcaaggggaaccagtgggtgggctatgatgatgtgaagagtatggagaccaaggattaacttacagagaagcaggcaagatgaccttgctgcctggggcctgctctctcccaggaattctcatgtgggattccccttgccaggatggcctttggatctctcttccaagcctttcctgacttcctcttagatcatagattggacctggttttgttttcctgcagctgttgacttgttgccctgaagtacaataaaaaaaattcattttgc

SEQ ID NO: 153180 - DNA, 606 bp, Homo sapiens
  misc_feature (1)...(606): n = a,t,c or g
ttgattctggtaaaagcagcagcagcactggacacagggcatctaagtccttggtttggagtcaggtgtgctttccagaatcctgggaggagaggctgctcactgaagggaagcagcttcagtctagagtaatttgaggataggaatttcagtcaacagcagcctgtgaagaacactacatggcttccatacgtaggtctgtttccccatcactttcagtttgcactagtcctttaccttcagtcttggacatcctacctccaactgacctttattttgagcagcacagtccaattctttagctaaaggtgaagggatcgctgcactgacgttcttcccctttgagaaaagaatcgtaattttaagagtctgaaggagtttagtgggtcacctagtctctcctcccttgatacctctactgatactttctactcaagcattggggaaggcttttttaggaggaatcttatcttcaaaaattctaccttttttaatgtgtgtatttgtgggccctcaggaagttcctaaattctattacaaaggaacacaaaagtttctgggagggttggatccggggcntactgtngttcaagccaatgtnatttg

SEQ ID NO: 153181 - DNA, 1271 bp, Homo sapiens
atgggagcaaccaccatggaccagaagtctctctgggcaggtgtagtggtcttgctgcttctccagggagagatggggttttgctatgttgccagagctggtcttgaactcctgggctcaagaagtcctcctgcctcagcctcccaaagtgctgggataacaggatctgcctacaaactggtttgctactttaccaactggtcccaggaccggcaggaaccaggaaaattcacccctgagaatattgaccccttcctatgctctcatctcatctattcattcgccagcatcgaaaacaacaaggttatcatcaaggacaagagtgaagtgatgctctaccagaccatcaacagtctcaaaaccaagaatcccaaactgaaaattctcttgtccattggagggtacctgtttggttccaaagggttccaccctatggtggattcttctacatcacgcttggaattcattaactccataatcctgtttctgaggaaccataactttgatggactggatgtaagctggatctacccagatcagaaagaaaacactcatttcactgtgctgattcatgagttagcagaagcctttcagaaggacttcacaaaatccaccaaggaaaggcttctcttgactgcgggcgtatctgcagggaggcaaatgattgataacagctatcaagttgagaaactggcaaaagatctggatttcatcaacctcctgtcctttgacttccatgggtcttgggaaaagccccttatcactggccacaacagccctctgagcaaggggtggcaggacagagggccaagctcctactacaatgtggaatatgctgtggggtactggatacataagggaatgccatcagagaaggtggtcatgggcatccccacatatgggcactccttcacactggcctctgcagaaaccaccgtgggggcccctgcctctggccctggagctgctggacccatcacagagtcttcaggcttcctggcctattatgagatctgccagttcctgaaaggagccaagatcacgaggctccagggatcagcaggttccctacgcagtcaaggggaaccagtgggtggggctatgatgatgtgaagagtatgggagaccaaggttcagttctttaaagatttaaaacctggggaggagccatgatctggtctattgacatggatgacttcactggcaaatcctgcaaccagggcccttaccctcttgtccaagcagtcaagagaagccttggctccctgtga

SEQ ID NO: 153182 - DNA, 660 bp, Homo sapiens
gtttgaaatgggaaccagatatgtttccattttatacagataattcagttgcttgaagaagagggacacaggagaaaagatttaaactattggctaaaatgaggtgtcttattattgattttcatctatatcttgtcccataatcaggaataaacagtagctacgctgccttgtatggcagccagagcgctgcatgcatgcacttttaatgattccatcaataccatgtagattgaattagcaaggagaagtaaccctttcatttcttcgccagactatattgggaaatgaaaatcggtcagtacttttccttgctagcaattgtccgaatatctgggataaagaaatacatacaggaaaatgttagggcagtccaagtattaaaagctagggacagagcaggacaaaggaggaaggataattctacttgtttgggcaaagttacatcagttgtcttactgacacatcagggtactatctataggtggaaattgagggcccggagagggttaaatgggcatgcccggtgttcacttgctatttttcagaacaaaaattagaatccagatctgaatcctggtgcagtgttctctcctatgccctactgggctttagtgggctaaagttctgaagcaagatgttaagggctaattaaatgcg

SEQ ID NO: 153183 - DNA, 1655 bp, Homo sapiens
atgaccctggcaccctctgaccaagatctttttgtctttaggtctggccctcctgctgcagctgggatgccctgtcttttcttccctgaagttcccttctgcaccagggtccatcagcccactggcagagatgggagcaagaacctactcaatgagttatttatagcgtgccctggaggactcatggcacaagggccccttgatcctacagagagctctgttcccaacacaaaggccttgtgtggaatattctctgatgtggcggccactgctgagaaccgccagaccttcatgcagtcagccatacagtttctgaggaagtacaacttcgatgggctggacattgattgggagtatccaggcaatcgtggcagcccagctgacacccagcagctcttcaccatcctgttgaaggaaatgtatgaggcttttgagcaagagtctacccgcagcaaaaagcccagattgttgatgtctgctgctgtgtcagctggcaaaggtaccattgagactgcctgccagatccctgagatgtcgagttctactccttcccgaaaggagccacctagagtgtggaatgccccctgggaggtgccttatgtctacaaggggaaccagtggatcaggtacgacaactccaagagcttcaccctcaaggtgttcttccccactccaaagacaaagtgtagaccacagagttttttgctctcctttgcctatctcctgcccatggcaaattcacacaggctgagcccaaatcgggaggcgatagagcctctggtctattgcagagtacccacctctatcctgggcaccagcttggcccccatcatcactgcagcacctgggggtggcagcacaggtggcagtggattctgtactgggaagtccaaaggtctgtatcctagtcccacacagcaagcatgctttctacaactgtgtggatgagcacacatacgaggaggcttgtcaggaaggcctggtctttgatacccagctgcttcttgctgtaactgggcataacctactacaatttaccctctgccttactgccagactgatctttctaaaaggcactttggtcatttccctgctttaccgtccgcaaaaagttccctgcagattcaggactatattgggaaatgaaaatccgtcattacttttccttgctagcaattgtccgaatatctgggataaagaaatacatacaggaaaatgttagggcagaccaagtattaaaagctaggacagagcaggacaaaggaggaaggataattctacttgtttggcaaagttacatcagttgtcttactgacacatcagctaaagaattggactgtgctgctcaaaataaagatcagttggaggtaggatgtccaagactgaagatctgccagttcctgaaaggagccaagatcacgaggctccaggatcagcaggttccctacgcagtcaaggggaaccagtgggtgggctatgatgatgtgaagagtatggagaccaagagagaagcttccgaggccccagactctaggatgggatccagcagcctttatagctcaagtctagtagtgactctatgtcatacccgcgagcatgctgtggtacaggtagaagagttggaaaggacgctaaaaagaattgagaacaagtaa

SEQ ID NO: 153184 - DNA, 1528 bp, Homo sapiens
tcacagcagctgtggctggggagcccagatgaagtgtggctctatcttgtatgtgagcacacccacattttcactgccattatctgggacagcagaaccaggtttggctcaacagatttctctttccacccatctattgcaggtgtagtggtcttgctgcttctccagggaggatctgcctacaaactggtttgctactttaccaactggtcccaggaccggcaggaaccaggaaaattcacccctgagaatattgaccccttcctatgctctcatctcatctattcattcgccagcatcgaaaacaacaaggttatcatcaaggacaagagtgaagtgatgctctaccagaccatcaacagtctcaaaaccaagaatcccaaactgaaaattctcttgtccattggagggtacctgtttggttccaaagggttccaccctatggtggattcttctacatcacgcttggaattcattaactccataatcctgtttctgaggaaccataactttgatggactggatgtaagctggatctacccagatcagaaagaaaacactcatttcactgtgctgattcatgagttagcagaagcctttcagaaggacttcacaaaatccaccaaggaaaggcttctcttgactgcgggcgtatctgcagggaggcaaatgattgataacagctatcaagttgagaaactggcaaaagatctggatttcatcaacctcctgtcctttgacttccatgggtcttgggaaaagccccttatcactggcgacaacagccctctgagcaaggggtggcaggacagagggccaagctcttactacaattgtgaaatatgctgtggggtactggatacataagggaatgccatcagagaaggtggtcatgggcatccccacatatgggcactccttcacactggcctctgcagaaaccaccgtgggggcccctgcctctggccctggagctgctggacccatcacagagtcttcaggcttcctggcctattatgagatctgccagttcctgaaaggagccaagatcacgtggctccaggatcagccaggttccctacgccagtcaaggggaaccagtgggtgggctatgatgatgtgaagagtatggagaccaaggttcaagttcttaaagaatttaaacctgggaggagcccatgatctggtctattgacatggatgacttcactggcaaatcctgcaaccaggggcccttaccctcttgtccaagcagtcaaggaggaagccttggctccctgtggaaggattaacttacagagaagcaggcaagatgaccttgctgcctggggcctgctctctcccaggaattctcatgtgggattccccttgccaaggctggcctttggatctctcttccaagcctttcctgactttcctcttagaatcatagattggacctggttttgttttcctgcagctgttgacttgttgccctgaagtacaataaaaaaaattcattttgctccagtaaaaaaaaaaaaaaaaa

SEQ ID NO: 153185 - DNA, 537 bp, Homo sapiens
  misc_feature (1)...(537): n = a,t,c or g
gtgctctgcgcacagcaccgccctcagggtggtacgaaatcacttttatttcacaatcacagcgacccaagtgcacaagggaagcagcagccacccctgcactgacagaggtaatgagatgatggcttcctctccccaaccctcagcctttgggatccctggctggggggcccgctagccagcccccgctcccctcccacacagaaggggtctcccagggtcagtgactgggtagtggagacccatagtgggacagtgacttccccacacacccactgcaaggccagcacaaaggcccagcctgaaggtcctggcacaccacccccctggcaagccctcatggaaagaactccccgagtcacacaagaaaagccttgccccttcttttcccggnaaacaaaccaatttttataagaaatggaaagcttgggctccagggggctacgactcgggcaaggggcacacagctggtcagtgggcaggactaaaacccatgccctgcctgccacacagacggtgcagtctctgatggatgca

SEQ ID NO: 153186 - DNA, 1660 bp, Homo sapiens
tcccaaacacatggcttttgaactgcctttccttggatccagttcaaggggatggaggagcagtgagagtcagccgcccttccactccaatttcccagcacctcccttatctctgcctcacaagtcacccagcccccctctcttccttccttgtgcttgaagaatctctccttgctggaaagccccctgttttctcaatctccctttccacttcggtaaaatctctacttgctggaaagccccctgttttctcaatctccctttccacttcggtaaaatgcccactttctggtccccacctttttcctgagtgtagtcccaaccagccaaatccaacctcaaaacaggaagacccaaggccagtggacccccataggcctggaggtttgtgcagggcagtggggcgtggggtaaggcttcctgatgccccctgtccctgcccagaacctgatggccctcattagtccttggctcttaccttggaagcacaggcgctgacagccgtcccagcccttcttgtctgcgggcctgaaccaaacggtgccatggggaacttgtctgcacagggcggagctctccccctcaacatgagaactcaagtcagctggactttcgaagatgtatggaattcttcctatggtgtgaatgattccttcccagatggagactatgatgccaacctgggaagcagctgccccctgccactcctgtaacctgctggatgactctgcactggccttcttcatcctcaaccagtgttcctggggtatcctagctagcaggactggcctcttcatgcctttcagaacctttcttccgctggcagctctgccctggggtggcctgtcctgggcacagctggctgtggggcagttgccttctttcagcatttgtgggtgcccgtctttgggccccagggctacggtagcaactcgcagctctgccctgctgtagcttggggctactggtgtctggtatggctcagcctttgcccaggctttgctgctaagggtgcccatgcctccctgggccacagactgggtgcaggccaggtccaggggcctcaccctggggctcactgtgggaatttggggagtggctgccctactgacactgcctgtcaccctggcccagtggtgcttctggtggactctgcaccctgatatacagcacggagctgaaggctttgcaggccacacacactgtagcctgtcttgccatctttgtcctggttgccatttgggtttgtttggagcccaaggggctgaaagaaggcattgggttaatgggcccaggccccctggatgaaatatccctgtgggccctggtttattttctggtggcctcatggggtggttctaggactggatttccctggtgaggttccaagcggttgctgttgtcaacatgtctggcccagcaggctttggacctgctgctgaacctggcagaagccctggcaattttgcactgtgtgggtacgcccctgctcctcgccctattttgccaccaggccacccgcaccctcttgccctctttgcccctccctgaaggatggttttttcatttggacacccttggaagcaaatcctagttctcttcccccctgtcaacctgaattaaagtttaccctgcctttgtgaaaaaaaaaaaaaaaaaa

SEQ ID NO: 153187 - DNA, 1830 bp, Homo sapiens
actggtaatctgaagtaaaggctccaagtcttaagtatccaattttccaagataattagaaaaagaaaaaaatcaaatactcttaagcattatttttcatacttctaagactataagatctttgtataaataaaaattatacttaaacacatatacaatacaagctaatgaactgtattagaaatcctcaagcattttaaactcttaacacaaatatacatacatttctgtaagactgaaaaatatcgtgagcaaaaataatttgactgtatcatattaactcagtgtacagtactggatttaaaataacaagtgtagtaaaaacgaaaactgaggtcactttgtgtaagacaatgatccctcaaaggacattaaatacttgctttttataaatatttttgggttttggctttgtaataaatatgtaataaatatctgcagtacactgtttatgttgagagcttatctttctccatttgaaagtctttctccagagtaataatgtcttagagagtatcccagtgggcggggagttaggattttgcagcaaatccagtaacaaagcaatcttatcatcaatgtgctcctggagttcatgtattccgctgatcaatgtaatccataagtttcctttccctccggtcccttatttttagaaagaatttttttccaagtaggagcaaatagattgctcttccattccaacaccaagaatgcgttcaccatgcttggtgatgttttcctgacactcggtcttatttcccacatggagatgattaacttgactacataaattctggagaaaaggcagcaactcggagttgggtatatttgagttgtcacttactttctttggtaagaaagaggccattgcatttttaagatcattttcaagaaaggaatggttttgaggcataactttacactcatcaagcttggtagaattctctccaccaggcagttgtgtacttttatcaatgtaagtttgtaagttttcagtcacgttcccagatgtcaatccagttctaaaaggaaaaggtgtggaggacgacttgtttaaggttcctaaggtagatgaggattgtggtccaatcatatgcttgtatccagaattgcccaacaccgactgaagctgctctccaatgggaatacaattccgctgctgacacctaaccatatccatcaactgctgagctccaggacataactttgtccccatggactccattatggtttggaccttgtcaaggtctatccttgatcctagagcaggagagcttgttgaagaatttgcaaaaactgatctcatgtgtaccacaactttactgatgaacacgccctgcctttcgtcaaaggagagcaactttattttacaagcatgtgtggaggactccaattttagatttttttttatacaaaatgatcttttcatgttcactgtcatccaggacagtacaaccattcttgcccctactggttccacagtactcctctcctaagtacacttccatatttcttgctgaacttaaaatgccaatagaagcgatttcttcacctccatcagggccacacctcaggtaaaggaagcaggggttttcatctttgttgttgtggtttctcttcaaaatcaccagatcctgacctggagcaggcggtgccagcagctcctcccagtcgaagtcaccggggccgagaccggcccgggtgaggaggaggctgtgggtcagggccccgcctgcaacatcccaagaagaggccagcgccgggcggcgggtgaggcccccgtcctcggtccacgtaaacattccgccgccttcagtcaggccagcc

SEQ ID NO: 153188 - DNA, 1698 bp, Homo sapiens; identical to SEQ ID NO: 121178

SEQ ID NO: 153189 - DNA, 1167 bp, Homo sapiens
atggggagaaaccggagcagaaaagatgaaaattctaaaaaccagagtgcttcttctcctccaaaggatcgcagctcctcgccagcaacagaacaaagctggatggagaatgactttgacgagttgacagaagtaggcttcagaagactaaaccaggaagaagttgaatccctgaatagaccaataagaggttctgaaattgaggcaataattaatagcttaccaaccaaaaaaagcccaggaccagatggattcacagccgaattctaccggaggtacaaagaggagctggtaccatttcttctgaaactattccaatcatatgaaaaagaggtaatcctccctaactcattttatgaggccagcatcatcctgataccaaagcctggcagagacacaacaaaaaaagagaattttagaccaatatccctgatgaacatcaatgcaaaaatcctcaataaaatactggcaaatcaaatcccacagcacatcaaaaagcttaaccacgaagatcaagttggcttcatccctgggatgcaagccttgttccacatacaggaatcaataaacgtaatccatcacatcaacagaaccaaagacaaaaaccacataattatctcaatagatgcagaaaaggcctttgacaaaattcaacagcgcttcatgctaaaaactctcaataaattagatgacatgattgtatatttagaaaaccccatagtctcagcccaaaatctccttaagctgataagcaacttcagcaaagtctcaggatacaaaatcaacgtgcaaaaatcacaagcattcctatacaccaataataggcaaacagagagccaaatcatgagtgaactcccattcacaattgctacaaagagaataaaatacctaggaatcgaacttacaagggatgtgaaggaccttttcaaggagaactacaaaccgctgctcaaccaaataaaagaggacacaaacaaatggaagaacattccgtgctcatggataggaagaatcaatatcgtgaaaagggccacactgcccaaggtaatttatagattcaatggcatccccatcaagctaccaatgactttcttcacagaattggaaaaaactaatttaaagttcattggaaccaaaaaagatgccccattgccaaggcaatcctaa

SEQ ID NO: 153190 - DNA, 2175 bp, Homo sapiens
atggtaaagggatcaattcaacaagaagagctaactatcctaaatatatatgcacccaatacaggagcacccagactcataaagcaagtcctgagtgaccaacaaagagacttagactcccacacaatagtaatgggagactttaacaccccactgtcaacattaggcagatcaacgagacagaaagtcaacaaggatacccaggaattgaactcggctctgcaccaggcggacctaatagacatctacggaactctccaccccaaatcaacagaatatacatttttttcagcaccacaccacacctattccaaaattgaccacatagttggaagtaaagctctcctcagcaaatgtaaaagaacagaaattataacaaactgtctctcagaccacagggcaatcaaactagaactcaggattaagaaactcactcaaaaccgctcaactacatggaaactgaacaacctgctcctgaatgactactggagaaagcaggaaagatccaaaattgacaccctaacatcacaattaaaagaactagaaaagcaagagcaaacacattcaaaagctagcagaaggcaagaaataactaaaatcagagcagaactgaaggaaatagagacacaaaaaacccttcaaaaaattaatgaatccaggagctggttttttgaaaggatcaacaaaattgatagaccgctagcaagactaataaaggaaaaaagagagaagaatcaaatagacgcaacaaaaaatgataaaggggatatcaccactgatcccacagaaatacaaactaccatcagagaatactacaaaaccctctacgcaaataaactagaaaatctagaagaaatggataaattcctggacacatacactctcccaagactaaaccaggaagaagttgaatctctgaacagaccaataacaggatctgaagttgtggcaataattaatagcttaccaaccaaaaagagtccaggaccagatggattcacagccaaatactaccagaggtacaaggaggaactggtaccattccttctgaaactattccaatcaacagaaaaagagggaatcctccctaactcatttgatgaggccagcatcatcctgataccaaagcctggcagagacacaaccaaaaaagagaattttagaccaatatccttgatgaacgttgatgcaaaaatcctcaataaaatactggcaaaccgaatccagcagcacatcaaaaagcttatccaccatgatcaagtgggcttcatccctgggatgcaaggctggttcaatatatgcaaatcaatcaatgtaatccagcatataaacagaaccaaagacaaaaaccacatgattatctcaatagatgcagaaaaggcctttgacaaaattcaacaacccttcatgctaaaaactctcaataaattagtgttggaagttctggccagggcaattaggcaggagaaggaaataaagggtattcaattaggaaaagaggaagtcaaattgtccctgtttgcagatgacatgattgtatatttagaaaaccccatcatctcagcccaaaatctccttaagctgataagcaacttcagcaaagtctcaggatacaaaatcaatgtgcaaaaatcacaagcattcttatacaccaataacagacaaacagagagccaaatcatgagtgaactcccattcacaattgcttcaaagagaataaaatacctaggaatccaacttacaagggatgtgaaggacctcttcaaggagaactacaaaccactgctcaatgaaataaaagaggatacaaacaaatggaagaacattccatgctcatggataggaagaatcaatatcgtgaaaatggccatactgcccaaggtaatttatagattcaatgccatccccatcaagctaccaatgactttcttcacagaattggaaaaaactactttaaagttcatatggaaccaaaaaagagcccgcatcaccaagtcaatcctaagccaaaagaacaaagctggaggcatcacgctacctgacctcaaactatactacaaggctatagtaactcaaaacagcatggtactgctaccaaaacagagatatagaccaatggaacagaacagagccctgagaaataatgctgcatatctacaactatctgatctttga

SEQ ID NO: 153191 - DNA, 2898 bp, Homo sapiens
atgagacagaaagttaacaaggatacccaggaattgaactcagctctgcaccaagaggacctaatagacatctacagaactctccaccccaaatcaacagaatatacattcttttcagcaccacaccacacctactccaaaactgaccacatagttggaagtaaagcactcctcagcaaatgtaaaagaacagaaattataacaaactgtctctcagaccacagtgcaatcaaactagaactcacgattaagaaactcactcaaaaccactcaactacatggaaactgaacaacctgctcctgaatgactactgggtaaataatgaaatgaaggcagaaataaagatgttctttgaaaccaacaagaacaaagatacaacataccagaatctctgggacacattcaaagcagtatgtaaagggaaatttatagcactaaatgcccacaagagaaagcaggaaagatctaaaattgacaccctaacagcacaattaaaagaactagaaaagcaagagcaaacacattcaaaagctagcagaaggcaagaaataactaagatcagagcagaactgaaggaaacagagacacaaaaaacccttcaaaaaattaatgaatccaggagctggttttttgaaaggatcaacaaaattgatagaccgctagcaagactaacagagaagaaaagaaaaaagaatcaaatagacgcaataaaaaatgataaaggggatatcaccaccgatcccacagaaatacaaactaccatcagagaatactataaacacctctacgcaaataaactagaaaatctagaagaaatggataaattcctggacacatatgtcctcccaaggctaaaccgggaagaagctgaacctctgaatacaccaatagcaggctctgaaattgaggcaataattaatagcttaccaaccaaaaaaagtccaggaccagatggattcacagccaaattctatcagaggtacaaagaggagctggtaccattccttctgaaactattccaatcaatagaaaaagaaggaatcctccctaactcattttatgaggccagcatcatcctgataccaaagcctggcagagacacaaccaaaaaagagaactttagaccaatatccttgatgaacatcaatgcaaaaatcctcaataaagtactggcaaaccgaatccagcagcacaacaaaaagcttatccaccatgatcaagtgggcttcatccctgggatgcaaggctggttcaacatacgcaaatcaataaatggaatccaacatataaacagaaccaaagacaaaaaccacacgattatctcaacagatgcagaaaaggcctttgacaaaattcaaaaacccttcatgctaaaaactctcaataaattaggtattgatgggacatatctcaaaataataagagctatctatgacaaacccacagccaatatcatactgaatgggcaaaaactggaagcattccctttgaaaacgggcacaagacaaggatgccctctttcaccactcctattcaacatagtgttggaagttctggccagggcaatcaggcaggagaaggaaataaaggatgacatgatcgcatatctagaaaacccgatcatctcagtccaaaatctccttaagctgataagcaacttcagcaaagtctcaggatacaaaatcaatgtgcaaaaatcacaagcattcttatacaccagtaacagacaaacagagagccaaatcatgagtgaactcccattcacaattgcttcaaagagaataaaatacctaggaatccaacttacaagggatgtgaaggacctcttcaaggagaactacaaaccactgctcaaggaaataaaagaggatacaaacaaatggaagaacattccatgctcatgggtaggaagaatcaatatcgtgaaaatggccatactgcccaaggtaatttatagattcaatgccatctccatcaagctaccaatgactttcttcacagaattggataaaactactttaaagttcatatggaaccaaaaaagagcctgcattgccaagtcaatcctaagccaagagaacaaagctggaggcatcatgctacctgacttcaaactatactacaaggctacagtaatcaaaacagcatggcactggtaccaaaacagagatatagatcaatggaacagaacagagccctcagaaataatgccacatatctacaactatctgatctttgacaaacctgacaaaaacaagaaatggggaaaggattccctatttaataaatggtgctgggaaaactggctagccatatgcagaaagctgaaactggatcccttccttacaccttatacaaaaattaattcaagatggattaaagacttaaatgttagacctaaaaccataaaaaccctagaagaaaacctaggcaataccattcaggacataggcatgggcaaggacttcatgtctaaaacaccaaaagcaatggcaacaaaagacaaaattgacaaatgggatctaattaaactaaagagcttctgcacagcaaaaggaactgccatcagagtgaacaggcaacctacagaatgggagaaaacttttgcaacctactcatctgacaaaaggctaatatccagaatctataatgaactcagacacatttacaagaaaaaaacaaacaaccccatcaaaaagtgggcaaaggacatgaacagacactgctcaaaagaagacatttatgcagccaaaaaacacatgaaaaaatgctcatcatcactggccatcagagaaatgcaaatcaaaaccacagtgagataccatctcacaccagttagaatggcgatcattaaaagtcaggaaacaacaggtgctggagaggatgtggagaaatag

SEQ ID NO: 153192 - DNA, 668 bp, Homo sapiens
aaatacaaactaccatcagagaatactataaactcctctacgcaaataaactggaaaatctagaagaaatggataaattcctggacacatacaccctcccaagactcaaccaggaagaagttgaatctctgaagacaccaataacaggtactgaaccaaggtttggaccaaccaaaaatgtccaggaccagatggattcacagttgaattctaccagagtgttggaagttctggctagggcaatcaggcaagagaaagaaataaagggtattcagttaggaaaagaggaagtcaaattgtctctgtttgcagatgacacgattgtatatttagaaaaccccattgtctcagcccaaaatctccttaagctgataagcaacttcagcaaagtctcaggatacaaaatcaatgtgcaaaaatcacaggcattcctgtacaccaataatagacaaacagagagccaaatcatgagtgaactcccattcagaattactacaaagagaataaaatacctaggaatccaacttacaagggatgtgaaggacctcttcaaggagaactacaaaccactgctcaacgaaataaaagaggacacaaacaaatggaagaacattccatgctcgtggataggaataatcaatatcacgaaaatggtcatactgcccaag

SEQ ID NO: 153193 - DNA, 1242 bp, Homo sapiens
acactaaaccaggaagaagttgaatctctgaatagaccaataacaggctctgaaattcaggcaatgattaacagcttaggaaccaagaaactccaggaccagacggattcacagccaagttctaccagagatgacatgattgtatatctagaaaaccccatcgtctcagcccaaaatctccttaagctgataagcaacttcagcaaagtctcaggatacaaaatcaatgttcaaaaatcacaagcattcttatacaccaataacagacaaacagagagccaaatcatgagtaaactcccattcacaattgcatcaaagataataaaatacctaggagtccaacttacaagggatgtgaaggaccccttcaaggagaactacaaaccactgctcaacgaaataaaagaggacacaaacaaatggaagaacatcccatgctcatggataggaagaatcaatatcatgaaaatggccatactgcccaaggtaatttatagattcaatgccatccccatcaagctaccaatgactttcttcacagaattggaaaaaagtactctaaagttcatatggaaccaaaaaagagcctgcattgccaggtcaatcctaagccaaaggaacaaagctggaggcatcacactacctgacttcaaactatactacaaggctacagtaaccaaaacagcatggtactggtaccaaaacagagatatagaccaatggaacataacagagccctcagaaacaatgccacatatctaccactatctgatctttgagaaacctgacaaaaacaagaaatggggaaaggattccctatttaacaaatggtgctgggaaaactggctagccacatgtagaaagctgaaactggatcccttccttacaccttatacaaaaattaattcaagatggattaaagacttaaatgttagacctaaaaccataaacaccctagaagaaaacctaggcaataccattcaggacataggcatgggcaaggacttcatgtctaaaacaccaaaagcaatggcaacaaaagccaaaattgacaaatgggatctcattaaactaaagagcttctgcacagcaaaagaaactaccaccagagtgaacaggcaacctacagaatgggagaaaatttttgcaatctactcatctgacaaagggctaatatccagaatctacaaagaactcaaacaaatttacaagaaaaaaacaaccccatcaacaagtgggtga

SEQ ID NO: 153194 - DNA, 1021 bp, Homo sapiens
actaaaccaggaagaagttgaatccctgaatagaccaataagaggttctgaaattgaggcaataattaatagcttaccaaccaaaaaaagcccaggaccagatggattcacagccgaattctaccggaggtacaaagaggagctggtaccatttcttctgaaactattccaatcatatgaaaaagaggtaatcctccctaactcattttatgaggccagcatcatcctgataccaaagcctggcagagacacaacaaaaaaagagaattttagaccaatatccctgatgaacatcaatgcaaaaatcctcaataaaatactggcaaatcaaatcccacagcacatcaaaaagcttaaccacgaagatcaagttggcttcatccctgggatgcaagccttgttccacatacaggaatcaataaacgtaatccatcacatcaacagaaccaaagacaaaaaccacataattatctcaatagatgcagaaaaggcctttgacaaaattcaacagcgcttcatgctaaaaactctcaataaattagatgacatgattgtatatttagaaaaccccatagtctcagcccaaaatctccttaagctgataagcaacttcagcaaagtctcaggatacaaaatcaacgtgcaaaaatcacaagcattcctatacaccaataataggcaaacagagagccaaatcatgagtgaactcccattcacaattgctacaaagagaataaaatacctaggaatcgaacttacaagggatgtgaaggaccttttcaaggagaactacaaaccgctgctcaaccaaataaaagaggacacaaacaaatggaagaacattccgtgctcatggataggaagaatcaatatcgtgaaaagggccacactgcccaaggtaatttatagattcaatggcatccccatcaagctaccaatgactttcttcacagaattggaaaaaactaatttaaagttcattggaaccaaaaaagatgccccattgccaaggcaatcctaa

SEQ ID NO: 153195 - DNA, 1443 bp, Homo sapiens; identical to SEQ ID NO: 122745

SEQ ID NO: 153196 - DNA, 969 bp, Homo sapiens
atggggagaaaccagtgcaaaaaggctgaaaattccaaaaaccaaaacacctcttctcctccaaaagataacaacttcttgccagcaagggaacaaaactggatggaaaatgagtttgatgaattgacagaagtaagattcagaaggtgggtaataacaaactcctctgagcaaaaggagcatgatctaacccaatgcaatgaagctaagaaccttgaaaaaaggagctggtttttagaaaagatcaacaaaatagatagaccactagccagactcgtaaagaagaaaagagagaagaaccaaatcaacacaataaaaaacgataaaggagatatcatcactgatcccacagaaatacaaactaccatcagagaatactataaacacctctatgcaaataaactagaaaatctagaagaaatggataaattcctggacacatacaccctcccaactctaaacaaggaagaagttgaatccctgaataaaccaataacaagttctgaaattgaggcagtaattattagcctaccaaccaaaaaagtccaggaccagaaagattcacagccaaattctaccagagtattggaagttctggccacggcaatcaggcaagagaaagaaataaaggatactcaaacaggaaacgaggaagtcaaattgtctctgtttgcagatgacatgattgtatatttagaaaaccccattgtctcagtccaaaatctctttaagctgataagcaacttcagcaaagtctcaggatacaaaatcaatgtgcaaaaatcacaagcacttctatacaccaataacagacaaacagagagccaaatcatgagtaaactcccattcacaattgctactaagagaataaaatacctaggaatccaacttacaagggatgtgaaggacctcttcaaggggaactacaaaccactgctcaaggaaataagagaggacacaaataaatga

SEQ ID NO: 153197 - DNA, 1164 bp, Homo sapiens
ctatttgtaagatgccccgtgggttctatctcccttccgactctctcctctcctgtaaaacgttacaggttcccccatatggcatatccctccctcacacgatgtatccactccggtctcccacagtactgcatgtccataaactgtttccccatgcaccctggttaccgcgtcccttctcggtgcttccctgtctctcccattttttttccaacatgaaagcgtctggatttgtagtccaattacagtgtatgtgcgcctatctgagcctctctctgtacttctggctctggctcgttccccgtttacacttcccagagtcagcccaagacgccgggagctttttcgggtacgttgagcgtccgtgaacctctctctccagaacccgatgtcttgctcccggggagcgctaagtgtgcgtgagtcctcaggtctctccccaggggcactgtgttggtttgtgtccgtcctggacgcggcgcgtctccagtaacgcgatgcgccggtgtcccggagtccccccacacgcggagcgcctgtgtcctgtctctgaggatccaccgtgcctatgtaactggaaaacgcgggcagctggtgcccgcgagtcgtccctggttccttgcccatacgctgctcgctaccctccttccccgccgagggtagcgtggtcatctcacttctcttatcggggcctctctccctccttgggacccaacaagccaggaaatcctcgggggccgtcggaaagtcccgacagcggcagcgcagccgacccagggctgcggctgcctcggccccgccgccaggggccgcccgactgcccgcttccccaacgcccaggctagcccgggaccgcggcgtcagccaccctgcccggccctgccctgcctggccgctgcgggcgctgacggtagcagctgccagccacggctccgccggccccgcacccgggcgcggccaggccgtgaggggtgcgctctgcctctctgagcccagcctgccggccggcccgctcaccttgtggctctggtaagtctcgagcgcccggatcgccgtctcggtgagcttcacatgcagtacggtgatgttgtcctgccccagccgtccgcacgacagcccatagcgctgctcctcccgcaggccccctgtcccccccgccgccat

SEQ ID NO: 153198 - DNA, 2075 bp, Homo sapiens
actgtaagctccttgatggtgggcagttttatctggttccctgctgtatctccggtgaaaacaacattgactggtacatgagagacagatcaacgagacagaaagtcaacaaggatacccaggaattgaattcagctctgcaccaagcagacctaatagacatctacagaactctccaccctaaatcaacagaatatacattcttttcagcaccacaccacacctactccaaaattgaccacatagttggaagtaaagcactcctcagcaaatgtaaaagaacagaaaatgtaagaaactgtctctcagaccacagtgcaatcaaactggaactcaggattaagacactcactcaaaattgctcagctacatggaaactgaacaacctgctcctgaatgactactgggtaaataatgaaatgaaggcagaaataaagatgttctttgaaaccaacgagaacaaatacacaacataccagaatctctgggacacattcaaagcagtgtgtagagggaaatttatagcactaaatgcccacaagagaaagcaggaaagatctaaaattgacaccctaacatcacaattaaaagaactagaaaagcaagagcaaacacattcaaaagctagcagaaggcaagaaataactaagatcagagcagaactgaaggaaatagagatacaaaaaacccttcaaaaaattaatgaatccaggagctggttttttgaaaagatcaacgaaattgatagaccgctagcaagactaataaagaagaaaagagagaagaatcaaatagacacaataaaaaatgataaaggggatatcaccaccaatcccacagaaatacaaactaccatcagagaatactacaaacacctctacgcaaataaactagaaaatctagaagaaatggataaattcctcgacacatacatcctcccaaggctaaaccaggaagaagttgaatctcggaatagaccaataacaggagctgaaattgaggcaataatcaatagcttaccaaccaaaaaaagtccaggaccagatggattcacagccgaattctaccagaggtacaaagaggagctggtaccaatccttctgaaacgattccaatcaatagaaaaagtcggaatcctccctaactcattttatgaggccagcatcatcctgataccaaaggctggcagagacacaaccaaaaaagagaattttagaccaatatccttgatgaacattgatgcaaaaatcctcaataaaatattggcaaaccgaatccagcagcacatcaaaaagcttatccaccatgatcgagtgggcttcatccctgggatgcaaggctggttcaacatacacaaatcaataaatgtaatccagcatataaacagaaccaaagacaaaaaccacatgattatctcaatagatgcagaaaaggcctttgacaaaattcaacaacccttcatgctaaaaactctcaataaattagatgacatgattgtatatctagaaaaccccatcgactcagcccaaaatctcctcaagctgaaaagcaacttcagaaaagtctcaggacagaaaatcaatgtacaaaaatcacaagcattcttatacaccaacaacagacaaacagagagccaaatcatgagtgaactcccattcacaattgcttcaaagagaataaaatacctaggaatccaacttacaagggatgtgaaggacctcttcaaggagaactacaaaccactgctcaatgaaataaaagaggatacaaacaaatggaagaacattccatgctcatgggtaggaagaatcaatatcgtgaaaatggccatactgccaaaggtaatttatagattcaatgccatccccatcaagctaccaatgactttcttcacagaattggaaaaaactactttaaagttcatacggaaccaaaaaagagcctgcatcaccaagtcaatcctaagccaaaagaacaaagctggaggcatcacgctacctgacttcacactatactacaaggctacagtaaccaaaacagcatggtacttgtaccaaaacagagatatagactaa

SEQ ID NO: 153199 - DNA, 1635 bp, Homo sapiens
atgcattgtatcctccccacaccttctggctctggctcgttccccgtttacacttcccagagtcagcccaagacgccgggagctttttcgggtacgttgagcgtccgtgaacctctctctccagaacccgatgtcttgctcccggggagcgctaagtgtgcggcactgtgttggtttgtgtccgtcctggacgcggcgtctccagtaacgcgatggccggtgtcccggagtccctgggaatgcaggtgtgtcccctccccccccgtacgcgaagcgccagtgtccccgccgttccagtgtgcgccgcccccttacacggactgcctaagtccctatctctatgagtacaccgtgtgcccctcaccatgcgcccgagtccccatcccttcgagcacacatccctgggaatacaaggtcccacccccacacgcggagcgcctgtgtcctgtctctgaggatccaccgtgcctatgtaactggaaaacgcgggcagctggtgcccgcgagtcgtccctggttccttgcccatacgctgctcgctaccctccttccccgccgagggtagcgtggtcatctcacttctcttatcggggcctctctccctccttgggacccaacaagccaggaaatcctcgggggccgtcggaaagtcccgcagcggcagccagccgacccagggctgcggctgcctcggccccgccgccaggggccgcccgactgcccgcttccccaacgcccaggctagcccgggaccgcggcgtcagccaccctgcccggccctgccctgcctggccgctgcgggcgctgacggtagcagctgccagccacggctccgcgacacccgcatccgggccgccgccagggcgtgaaggtgtgcgctctgcctctctgagcccagcctgccggccggccgctcaccttgtggctctgaaccgccctcatcggccgccctccactctcacgggggcgggcccaaagtcactagagttttgctcctgggacgggacgtccgagagactaaaccaggaagacgttgaatctctgaatagaccaataacaggttctgaaattgaggcaataattaatagcctaccaaccaaaaatgtccaggaccagaaggattcacagccgaattctacaagagtattgaaagtcctggccagggcagtcaggcaaaagaaagcaatacaaggtattcaaataggaaaagaggaagtcaaattgtctctgtttgcagatgacatgattgtatatttagaaaacccgatcgtcccagcccaaaatctcctcaagctgataagcaacttcagcaaagtctcaggatacaaaatcaatgtgcaaaaatcacaagcattcctatacaccaataacagacaaacagagagccaaatcatgagtgaactcctattcacaattgctactaagagaataaaatacctaggaatccaacttacaagggatgtgaaggatctcttcaaggagaactacaaaccactactcaaggaaataagagaggacacaaacaaatgtaaaaacattccatgctcatggataggaaggatcaatatcatgaaaatggccttactgcccaaagtaatttatagattcatgctatccccatcaagctatgactga

SEQ ID NO: 153200 - DNA, 2353 bp, Homo sapiens
agaaagcaggaaagatccaaaattgacaccctaacatcacaattaaaagaactagaaaagcaagagcaaacacattcaaaagctagcagaaggcaagaaataactaaaatcagagcagaactgaaggaaatagagacacaaaaaacccttcaaaaaattaatgaatccaggagctggttttttgaaaggatcaacaaaattgatagaccgctagcaagactaataaaggaaaaaagagagaagaatcaaatagacgcaacaaaaaatgataaaggggatatcaccactgatcccacagaaatacaaactaccatcagagaatactacaaaaccctctacgcaaataaactagaaaatctagaagaaatggataaattcctggacacatacactctcccaagactaaaccaggaagaagttgaatctctgaacagaccaataacaggatctgaagttgtggcaataattaatagcttaccaaccaaaaagagtccaggaccagatggattcacagccaaatactaccagaggtacaaggaggaactggtaccattccttctgaaactattccaatcaacagaaaaagagggaatcctccctaactcatttgatgaggccagcatcatcctgataccaaagcctggcagagacacaaccaaaaaagagaattttagaccaatatccttgatgaacgttgatgcaaaaatcctcaataaaatactggcaaaccgaatccagcagcacatcaaaaagcttatccaccatgatcaagtgggcttcatccctgggatgcaaggctggttcaatatatgcaaatcaatcaatgtaatccagcatataaacagaaccaaagacaaaaaccacatgattatctcaatagatgcagaaaaggcctttgacaaaattcaacaacccttcatgctaaaaactctcaataaattagtgttggaagttctggccagggcaattaggcaggagaaggaaataaagggtattcaattaggaaaagaggaagtcaaattgtccctgtttgcagatgacatgattgtatatttagaaaaccccatcatctcagcccaaaatctccttaagctgataagcaacttcagcaaagtctcaggatacaaaatcaatgtgcaaaaatcacaagcattcttatacaccaataacagacaaacagagagccaaatcatgagtgaactcccagttcacaattgcttcaaagagaataaaatacctaggaatccaacttaacaagggatgtgaaggacctcttcaaggagaactacaaactactcactgatcaaggaaataagagaggacacaaacaaatggaaaaacattccatgctcatggataggaagaatgaatatcatgaaaatggccatactgcccaaagtaatttacagattcaatgctatcctcatcaagctaccattgacttccttcacaaaattggaaaaaacaactttaaagttcatatggaaccaaaaaagagcccgcatcgccaagtcaatcctaagccaaaagaacaaagctggaggcatcacactacctgacttcaaactatactacaaggctatagtaactcaaaacagcatggtactgctaccaaaacagagatatagaccaatggaacagaacagagccctgagaaataatgctgcatatctacaactatctgatctttgacaaacctgagaaaaacaagcaatggggaaaggattccctatttaataaatggtgctgggaaaactggctaaccatatgtagaaagctgaaactggatcccttcctcacatcttatacaaaaattaattcaagatggattaaagacttaaatgttagacctaaaaccataaaaaccccagaagaaaacctaggcaataccattcaggacataggcatgggcaaggacttcatgactaaaacaccaaaagcaatggcaacaaaagccaaaattgacaaatgggatctaattaaactaaagagcttctgcacagcacaagaaactaccatcagagtgaacaggcaacctacagaatgggagaaaatttctgcaatctactcatctgacaaagggctaatatccagaatctacaaagaacttaaacaaatttacaagacaaaaacaaacaaccccatcaaaaagtgggcaaaggatatgaacagacacttctcaaaagaagacatttatgcagccaaaagacacatgaaaaaatgctcatcatcactggccatcagagaaatgcaaatcaaaaccacaatgagataccatctcacaccagttagaatggcgatcattgaatcaagtcaggaaacaacaggtgctggagaggatgtggagaaatag

SEQ ID NO: 153201 - DNA, 425 bp, Homo sapiens
  misc_feature (1)...(425): n = a,t,c or g
aaacactttaagatgagaaaaattgatctctgtctgagctctgaagggtccgaagtgattttagctacatcaagtgatgaaaaacacccacctgaaaatatcattgatgggaatccagaaacgttttggaccaccacaggaatgtttccccaggaattcattatttgtttccacaaacatgtaaggattgaaaggcttgtaatccaaagttactttgatttggtacacacagaggggcagcttcaaaatgaagaaattgtggctcccatcccaaattatggaagtactgggcatctttgaagaccagctcaaatgccaccagctccaaaaagcattgttggattcacccagctcagaggattgctgtctcctctgtgccctctgagcacttagtcttcactctaacatatactccaccttgagtn

SEQ ID NO: 153202 - DNA, 355 bp, Homo sapiens
gcacgagcgggagtcccaggttaaacactttaagatgagaaaaattgatctctgtctgagctctgaagggtccgaagtgattttagctacatcaagtgatgaaaaacacccacctgaaaatatcattgatggatttggtacacacagaggggcagcttcaaaatgaagaaattgtggcacatgatggctccgctacttacttgagattcattattgtatcagcctttgatcattttgcatctgtgcatagcgtttctgcagaaggaacagtagtctcaaatctttcctcataatgataacaaaatgctcttgcatgattttttaacaatatatttaaacaggaagttgtcactga

SEQ ID NO: 153203 - DNA, 516 bp, Homo sapiens
atcagccactttgggagactagctttgaggctagttcaagaccagcctgggcaacacggtgagaccctgtccctacaaaaaatgagagttgcagtttttagctccagttgctatttttcatcaaatcaaggctggtatttagctgatatgtaccacaactattatatgtagctggccttatgtgttgttatatatttagaatattactcttgcatcaagctgtttcttttgctaactgcttgttaacagttaactagcactgctaaaagcatttatattgatttttttcccatacaggcacatgatggctccgctacttacttgagattcattattgtatcagcctttgatcattttgcatctgtgcatagcgtttctgcagaaggaacagtagtctcaaatctttcctcataatgataacaaaatgctcttgcatgattttttaacaatatatttaaacaggaagttgtcactgatatactttattaaaaggatttttatcaaaaaaaaaaaaaa

SEQ ID NO: 153204 - DNA, 713 bp, Homo sapiens
cgcggtaccgcgccggaattaccgggtcgacgatttcgtccgcggcgagcaggcggagctgcgggtcgtgacgctctgcgtggggcggcgcgcaagggaggtttcgagcccggaaagtccggcgcccagagctaacgggagtcccaggataaacactttatgatgagaaaaattgatctctgtctgagctctgaagggtccgaagtgattttacgctatcagtcaagtgatgaaaaacacccaccctgaaaatatcattgatgggaatccagaaacgttttgcgaccaccacaggaatcgtttccccaggaattcattattggtttcccacaaacatgtaaggattgaaaggcttgtaatcccaaagttactttgtacaagaccttgaagattgaaaaaacgcaccgtctaaacgagccacgttgacttttgacgcaactggattgaaaaagatttcggtacacaccagaggggcagcttcaaaaatgaagaaattgtcggcacatcgatggctccgctacttacttgagattcattattgtatcagcctttgatcattttgcatcggtgcatagcgtttctggcagaaggaacagtagtctcaaatcttctcctcataatgataacaaaatggctcttgcatgattttttaacaatatatttaaacaggaagttgtcactgatatactttattaaaaggatttttatcaaaa

SEQ ID NO: 153205 - DNA, 2078 bp, Homo sapiens
accctgcggaagaggtggttacttacatccccctagacttctgccactaccacagtgaagatggcaagcagtttctcctgcccctgaccccgaccctcctcactcaccccctgtgcttggtcaccggcaccacgtctctgctgctggtgtgtgtggggaagcctgagatcttcgtagcgatacactactatacaccaaacacaaagctggtgccattggcacgacctagaaacagccatgttcctcatcccccagagcgcaccacggtcactcagtacagcacgtgtgcgctgcttactgccctgtgcctgctgctgcctgtgctgcaggaaacagcccagagtcgaaggatggtcaccagccacccggaagaccgtcctgctctggcacgcaaacacggagcatcgcaaccggccggcctcggctttccaagaactcagactgtcactcccgccttcacattccagaccccaacagcagctgagcccgcacttctgaccgcgtggctgggtagagctccagaaactgagacaatcacagacatggcaggtgctgctggcacccaccggaggaagaggcgactggagcccgagaagcgacctggcgcttcccagaagacgacactgaaggagcggccccctgagactggaccatgggatcttccacccccacctacagagcgcaccacggtcactcagtacagcacgtgtgcgctgcttactgccctgtgcctgctgctgcctgtgctgcaggaaacagcccagagtcgaaggatggtcaccagccacccggaagaccgtcctgctctggcacgcaaacacggagcatcgcaaccggccggcctcggctttccaagaactcagactgtcactcccgccttcacattccagaccccaacagcagctgagcccgcacttctgagcgcgtggctgggtagagctccagatactgagaacatcacagacatggcaagggcaacctccagatccatcacgtggggcaggatggtcagtgcaaaggcacgtggggcggcagcagtgacggaggaacgagagacaccagaacggaatcttgttcagagaaatccagacagcaactcctccgacatcagccctgagtccttcctgaactcagatctgtgctggagccaatgggcctccatgcctgctgagaaaagctggaatctctgtccccacagcttgagtgcactggcctcttctcagctcaacctccgcctcttgggttcgggtaatgatggttccacgtcagcggccctccgcctcttgggtttgcgtgacggttccacgtcaccgaccctccgcctcttgggttcgggtgatgatggttccacgtcagcggccctccgcctcttgggtttgcgtgacggttccacatcaccgaccctccgcctcttgggttcgggtgatgatggttccacgtcagcggccctccgcctcttgggtttgcgtgacggttccacgtcaccgaccctccgcctcttgggttcgggaggtgcacatgctgtcgtgccccagtgttccagcatcgctgactgggagagggaagaagaggtctttaagccccatgaggacagaggtagtcttatttgcacagaactggtacatacctactatgacctacaagaggtcatggatggaaatgtcataactgcaaagagaacagctgcagtttctgccattgccaccaagtgtgacaatctaaaaacttgtcacacttcacatggatctgtcatggcggaaacagcggttatcaatcacaagaaacgtaaaaatagcccgcgaatcgtccagtcaaacgacctcactgaggcggcatatagtctctcccgggatcaaaaacgtatgctgtatctgttcgttgaccagatcagaaaatctgatggcaccctacaagaacatgacggtatctgcgagatccatgttgctaaatatgctgaaatattcggattgacctctgcggaagccagtaaggatatacggcaggcattgaagagtttcgcggggaaggaagtggttttttatcgccctgaaaaggatccggcgatgaaaaagctatga

SEQ ID NO: 153206 - DNA, 1306 bp, Homo sapiens
gcacagccgagggtacgtggatcgcggtgcggagactgaggttagaaggcacaggtggcgagatgagccgggtaccagcgttcctgagcgcggccgaggtggaggaacacctccgcagctccagcctcctcatcccgcctctagagacggccctggccaacttctccagcggtcccgaaggaggcagtcatgcagcccgtgcgcaccgtggtgccggtgaccaagcacaggggctaccttgggggtcatgcccgcctacagtgctgcagaggatgcactgaccaccaagttggtcacccttctacgaggaccgcggcatcaccttcggtcgtcccttcccaccagggtaattgtggttactcttttgagcccagcaatgggcaccctgctggcggtcatgggatgggaaatgttcataaattgcaaagagaacagctgcagtttcttgccatttgccaccaagttttttgaaacctcccagcagtgaagtgctgtgcatccttggggctggggtccaggcctacagccattatgagatcttcacagagcagttctcctttaaggaggtgaggatatggaaccgcaccaaagaaaatgcagagaagtttgcagacacagtgcaaggagaggtacgggtctgttcttcggtccaggaggctgtggcaggtgcagatgtgatcatcacagtcaccctggcaacaggagcccattttgtttggtgaatgggttgaaaccaggggctcacatcaatgctgttggagccagccagacctgactggagagaactggatgatgagctcatgaaagaagctgtgctgtacgtggattcccaggaggctgccctgaaggagtctggagatgtcctgctgtcaggggccgagatctttgcctgagctggggagaagtgatttaagggagtgaaacccagccccactgtgagaagaccccacggtgttccaagtctttgggaatggcagtgggaagacacagttgcagcccaaactcatcctatgattccctggtcatctggtaaataaaacaaaggaacttgatgttgagaatgattgcttggggaatattgctgctggttctcataatttctagagttaaatgggggagcccagtccccagtgaactctcctttggtgcttatcatgttttaccttaaatgctgagatcctcatttatgtttgtagttggaaagcaaagctaggtagccatttcttctgttctaccaagttataatagcattcatttccctttatatttccctgaaataaagcacattccaattgtgaaaaaaaaa

SEQ ID NO: 153207 - DNA, 3086 bp, Homo sapiens
actgccacctcggtcggtcggtgcttacttcgctgccagctggtctgtcgccatgaacccggacctgcgcagggagcgggattccgccagcttcaacccggagctgcttacacacatcctggacggcagccccgagaaaacgcggcgccgccgagagatcgagaacatgatcctgaacgacccagacttccagcatgaggacttgaacttcctaactcgcagccagcgttatgaggtggctgtcaggaaaagtgccatcatggtgaagaagatgagggagtttggcatcgctgaccctgatgaaattatgtggtttaaaaaactacatttggtcaattttgtggaacctgtgggcctcaattactccatgtttattcctaccttgctgaatcagggcaccactgctgagaaagagaaatggctgctttcatccaaaggactccagataattggcacctacgcccagacggaaatgggccacggaactcaccttcgaggcttggaaaccacagccacgtatgaccctgaaacccaggagttcattctcaacagtcctactgtgacctccattaaatggtggcctggtgggcttggaaaaacttcaaatcatgcaatagtccttgcccagctcatcactaaggggaaatgctatggattacatgcctttatcgtacctatccgtgaaatcgggacccataagcctttgccaggaattaccgttggtgacatcgggcccaaatttggttatgatgagatagacaatggctacctcaaaatggacaaccatcgtattcccagagaaaacatgctgatgaagtatgcccaggtgaagcctgatggcacatacgtgaaaccgctgagtaacaagctgacttacgggaccatggtgtttgtcaggtccttccttgtgggagaagctgctcgggctctgtctaaggcgtgcaccattgccatccgatacagcgctgtgaggcaccagtctgaaatgaagccaggtgaaccagaaccacagattttggattttcaaacccagcagtataaactctttccactcctggccactgcctatgccttccagtttgtgggcgcatacatgaaggagacctatcaccggattaacgaaggcattggtcaaggggacctgagtgaactgcctgagcttcatgccctcaccgctggactgaaggctttcacctcctggactgcaaacactggcattgaagcatgtcggatggcttgtggtgggcatggctattctcattgcagtggtcttccaaatatttatgtcaatttcaccccaagctgtacctttgagggagaaaacactgtcatgatgctccagacggctaggttcctgatgaaaagttatgatcaggtgcactcaggaaagttggtgtgtggcatggtgtcctatttgaacgacctgcccagtcagcgcatccagccacagcaggtagcagtctggccaaccatggtggatatcaacagccccgaaagcctaaccgaagcatataaactccgtgcagccagattagtagaaattgctgcaaaaaaccttcaaaaagaagtgattcacagaaaaagcaaggaggtagcttggaacctaacttctgttgaccttgttcgagcaagtgaggcacattgccactatgtggtagttaagctcttttcagaaaaactcctcaaaattcaagataaagccattcaagctgtcttaaggagtttatgtctgctgtattctctgtatggaatcagtcagaacgcgggggatttccttcaggggagcatcatgacagagcctcagattacacaagtaaaccagcgtgtaaaggagttactcactctgattcgctcagatgctgttgctttggttgatgcatttgattttcaggatgtgacacttggctctgtgcttggccgctatgatgggaatgtgtatgaaaacttgtttgagtgggctaagaactccccactgaacaaagcagaggtccacgaatcttaccacaagcacctgaagtcactgcagtccaagctctgaagtgtcacaaggacaagtttaatctgcttcagaaagcgcctgtgtgcaactcaaattttgtggaatcttttcgaattcaaatagctatagagcaaatgataaattgacccctttttataaatggagggaaaaaatgaacagatttcagagattaaatgaaaaaaagcagatgtgttttaagtgcaattaacactgaaagagacctgttaaaccattcagaaaaagcttaagaaatgcgatatgacttccttttgtaatgctgctgatcccagtagactatgacttttgataattagcagaatttaactactgagtagttgattattttcacattttaattgctaatcactggctatataagtgtttttaagcaagggtatttttgaagtggtgtagaacccttccacgctttcctgctcagtgttctaccagacaagaaaagggacttggggaaggaaacttattggaaacttgatgcgaattaggttcttctttgcacaaactctgcctgcttgctctcccttgctgatgggttgcaattctcaaactattcatgctagcaatttttccacgggggggcctttttcccacgggggcctctataggggcccatttctccggtaaataggaatttcccctttaaggggtgccagtagtaggagtatagggaacctctcagctgtggcactgttgtagctttggagtcagagtgtactctgggcaatcagatttccacatattctgcatcttggataagcattaaaagttgggatactaatttggataaaaaaatgcactaggcaaactccagcgagacagaaagtatagggaaacctctcagctgtggcactgttgtagctttggagtgcagagtgtaactctggcgacaatcagatttcacatattctgtcatcttggcataagccattaaaagcttggagattactgtatttggcattaaaaaaaaatgtcacttaggtcagcactcccagacgtagcacagaaaaaccctttgacacaaaccatgtgttctgatttttggttcaga

SEQ ID NO: 153208 - DNA, 401 bp, Homo sapiens
ccacgttcttcttccaggtgaagcctgatgggcacatacgtgaaaccgcttgagtaacaagctgacttacggggaccatggtgtttgtcaggtccttccttgtgggagaagctgctcgggctctgtcttaaggcgtgcaccattgccatccgatacagcgctgtgaggcaccagtctgaaatcaagccagggtaaggatagggtcctagatgggctcagtaccaaaggcctagtttttaccccattcagatcccagaattcccaaatgtcaatacagaagatgcattagcacctgcaaaattggctagggtgataactgggcctgtaatttcatatctaggcttccttttcttaagaggaaagacagaaataaccacccttgctataatcagtgactgcca

SEQ ID NO: 153209 - DNA, 906 bp, Homo sapiens
atgacgggcggtggcttcggtggctgcacggtgacactgctggaggcctccgctgctccccaccgcatgcggcacatccaggagcactacggcggactgccaccttctacctctctcaagcagccgatggagccaaggtgctgtgcttgtgaggcacccccaggacagcacacgcttcatgccctcaccgctggactgaaggctttcacctcctggactgcaaacactggcattgaagcatgtcggatggcttgtggtgggcatggctattctcattgcagtggtcttccaaatatttatgtcaatttcaccccaagctgtacctttgagggagaaaacactgtcatgatgctccagacggctagagtcggcgacaactcaatcgactgctggaaagacgcgcgccgtctctttcaagacggcgataagtctcgagcgccacacgatccgatcctgacagatcagacgcaagaatggtccggttctgcaacctttacatctgacggaggaatccgtttattctacactgactattccggtaaacatcacggcaaacaaagcctgacaacagcgcaggtaaatgtgtcaaaatctgatgacacactcaaaatcaacggagtggaagatcacaaaacgctttttgacggagccggaaatacatatcagcacgttcagcagtttatcgatgaaggcaattatacatccggcgacaaccatacgctgagagaccctcactacgttgaagacaaaggccaaaaataccttgtattcgaagccaacacgggaacagaaaacggataccaaggcgaagaatctttatttaacaaagcgtactccggcggcggcacgaacttcttccgtaaagaaagccagaagcttcagcagagcgaggaaagacagaaataa

SEQ ID NO: 153210 - DNA, 462 bp, Homo sapiens
ccctcaggaaaaatggaaattaccaagagctataaagtaatacagaaaggggcagtgctcccatatatgattaagtgcacgcaactaattcatacttaaggtttttttgtctccttcccttgctctatttaaatagctgattctgtcacacctgatgactcttctctcaaatgcccatccttgatatttcctcgaagttttgtgcaccgaggccggcctgagcctctggatcttcacttgggcatgttcctgcccaccttgcttcaccaggcaactgcggagcagcaggagcgcttcttcatgcccgcctggaacttggagatcattggcacttatgcccagacagagatgggtcatggtatggagtattcagtctaccttaaggagatgggcgggcccctgtgagcttaccatgtgtggagtgccccctcgtgccaagataggcgtaatgatgctacgatt

SEQ ID NO: 153211 - DNA, 373 bp, Homo sapiens
catgacagagcctcagattacacaagtaaaccagcgtgtaaaggagttactcactctgattcgctcagatgctgttgctttggttgatgcatttgattttcaggatgtgacacttggctctgtgcttggccgctatgatgggaatgtgtatgaaaacttgtttgagtgggctaagaactccccactgaacaaagcagaggtaaaaatccagtgtctctgcacctttttaaaagtcttcacttaaatattgaagcaggaaaggcctctcgaaggggatttatctgtgaaagctctgaaagtaccatggccacttctgacagtcactttatttgagcaacaggttcagaagggaactgggttgttcccacagtaa

SEQ ID NO: 153212 - DNA, 4204 bp, Homo sapiens
  misc_feature (1)...(4204): n = a,t,c or g
ccgtcggccggaactcccgggatgacgctttcgtgctggagctgcggatttagattgtcactgccacctcggtcggtgcttacttcgctgccagctggtcgtcgccatgaacccggacctgcgcagggagcgggattccgccagcttcaacccggagctgcttacacacaccctggacggcagccccgagaaaacccggcgccgccgagagatcgagaacatgatccttgaacgacccagacttccagcatgaggacttgaactttcctcactcgcagccagcgttatgaggtggctgtcaggaaaagtgccatcatggtgaagaagatgagggagtttggcatcgctgaccctgatgaaattatgtggtttaaaaattttgtgcaccgagggcggcctgagcctctggatcttcacttgggcatgttcctgcccaccttgcttcaccagggcaactgcggagcagcaggagcgcttcttcatgcccgcctgggaacttgggagatcattgggcactttattgcccagacagagatggggtcatgggaactcacctttcgaggctttnggaaaccacagccacgtatgaccctgaaacccaggagttcattctcaacagtcctactgtgacctccattaaatggtggcctggtgggcttggaaagacttcaaatcatgcaatagttcttgcccagctcatcactaaggggaaatgctatggattacatgcctttatcgtacctattcgtgaaatcgggacccataagcctttgccaggaattaccgttggtgacatcggccccaaatttggttatgatgagatagacaatggctacctcaaaatggacaaccatcgtattcccagagaaaacatgctgatgaagtatgcccaggtgaagcctgatggcacatacgtgaaaccgctgagtaacaagctgacttacgggaccatggtgtttgtcaggtccttccttgtgggagaagctgctcgggctctgtctaaggcgtgcaccattggcatcctatacagcgctgtgaggcaccattctgaaatcaagccaggtgaaccagaaccactgattttggattttcaaacccagcagtataaactctttccactcctggccactgcctatgccttccagtttgtgggcgcatacatgaaggagacctatcaccggattaacgaaggcattggtcaaggggacctgagtgaactgcctgagcttcatgccctcaccgctggactgaaggctttcacctcctggactgcaaacactggcattgaagcatgccgtatggcttgtggtgggcatggctattctcattgcagtggtcttccaaatatttatgtcaatttcaccccaagctgtacctttgagggagaaaacactgtcatgatgctccagacggctaggttcctgatgaaaagttatgatcaggtgcactcaggaaagttggtgtgtggcatggtgtcctatttgaacgacctgcccagtcagcgcatccagccacagcaggtagcagtctggccaaccatggtggatatcaaccagccccgaaagcctaaccgaagcatataaactccgtgcagccagattagtagaaattgctgcaaaaaaaccttcaaaaagaagtgattcacagaaaaagcaaggaggtagcttggaacctaacttctgttgaccttgttcgaggcaagtgaggcacattgccactatgtggtagttaagctcttttcagaaaaactcctcaaaattcaaagataaggccattcaagctgtcttaaaggagttttatgtctgctgtattctctgtatgggaatcagtcaggaacgcgggggatttccttcaggggagcatcatgaccgggcctccagattacaccaagtaacccagccgtgtaaagggagttactcactctgattcgctcagatgctgttgctttggttgatgcatttgattttcaggatgtgacacttggctctgtgcttggccgctatgatggggaatgtgtatggaaaacttgtttgagtgggctaaggaactccccacttgaaccaaaggcagaggtccacggaatctttacaaggcacctggaagtccactgccagtcccaagctcttgaagtgttcacaagggacaagtttaaatctggctttcagaaagcgcctgtgtggcaactgcaaattttgtgggaatctttttcgaattcaaataggctataggagccaaatgattaaattgacccctttttattaatggggggggaaaatgaacagatttcagaggttaaaatgaaaaaaagcagatgttttaagtgcaattaacactgaaagaggacctgttaaaccattcagaaaaagcttaagaaatgcgatatgacttccttttgtaatgctgctgatcccagtagactatgacttttgataattagcagaatttaactactgagtagttgattattttcacattttaattgctaatcactggctatataagtgtttttaagcaaaggtatttttgaagtggtgtagaacccttccaagctttcctgctcagtgttctaccagacttaccctggggcctggctttaaaagcaggattgaagaaaagggactgggggaaggaaacttattggaaaacttggatgcgaatgagtttctgcttggcaccagtctctgccctgctttgctctcctttgctggatgggattgcatttatcaaactattcatgcttagcatttgttcccaacggaggggaactttattccgcaacgggccttactgttagggaccatttgtctcggtgtaattaaggaattttcccatttgaaggaattgctaaattgtcacagtagtagggaagtataggggaaacctctcaagctggtggcaccggttgtagctttggagtgccagagtgttaactctggggacaatccagattttcacatattctgtcatccttggcataagcccattaaaagcttgggagattactgtattttggcattaaaaaaaaaaatgtcaccttagggtccagcactccccagacgtaagcacagaaaaacccctttgacacaaacccatgtgttctggatttttgggtcagaaaatattgaaactgtgagttgtttttttttttaacaactgggaaaaaacaaaaacaaaaaaactatagttagaaaaatggaagttccataggttctatttcttactctatgtatggctttgttttcagtctatttctaggagctttctctgaatcgctaattgtcctttcagttgaaatctaatttatacaatcattctatacttaaaggttaaatacatcttaattaatttaatcttaaagtcaatgtaagtcactttgttttgtttttttttaatctacgccatatgcctcatgaaaccagctgttctagaatcagtcctgagaatatggcttaattccatggaaacataaactccctatccttgggacctgacataatatctatcctatccccggggaactggtaatatgaagaccttaataggttaacagcagaaatgcctacatgttggacaaaagcccttaatcgttcccactgggagaactaattgataattgtgttaagattgaagattaaccctgtgttaatctcacttgagtctatccctgacagtagttcagattctgggaaaatgataaactgacctggctaggatgtaggaattgtttcaaaattaggtgttgaaataccttgttcacagatgaatatctggggcagggttctgagggtgtttggaatgacaccccccaatccagttgccataggatggggaggcctttggcaggtttgaggagatcatcgacctgcagagccccctttgacccagtacctcacgttttatttaaaatctaaatctggggccaggcgtggctgtcacgcctgtggtccaggcactttgggaggccgaggcgggtggatcgcctgaggtcaggagtttgagaccatcctggccagcatggtgaaaccccgtctctgctgaggagaatgcagaaattggctgggcatggtggtagcgcgcgcctgtggtcccagctactcgggaggctggggcgggataatcgcttggacttggcgggtggaggttgcagtgagccgggatggtgccactgcactgcagcctgggtggctgagtcgagctccgtctc

SEQ ID NO: 153213 - DNA, 463 bp, Homo sapiens
  misc_feature (1)...(463): n = a,t,c or g
tttgacacaaaatttaatttaatagaaattttgtttgtagttcttacattctcagtgtgagccaatctgggacccactgccccacccagaagtggcccagtcctgggggcaggggagaaagggaggggtgaaatgagaagagccccgttcttcctcagtgctggggggttggagacaccacccccttctgctgccctcctctgggctccaggaaggagagcagatgaaatctcaggcctgtgnngtctccacaccactgccccccaggttggaggggagctaagagatgagagaaggggacagatgtcgggaccaaacatgatgttgtattctgagtctccggctatgtgaagctgtttcctaatagtttggaccagacagacatgcacggagactcagaatacaacatcatgtttggtcccgacatctgtggncctggcaccaagaaagggtttcatggtnc

SEQ ID NO: 153214 - DNA, 648 bp, Homo sapiens
  misc_feature (1)...(648): n = a,t,c or g
gagacacaaaatttaatttaatagaaattttgtttgtagttcttacattctcagtgtgagccaatctgggacccactgccccacccagaagtggcccagtcctgggggcaggggagaaagggaggggtgaaatgagaagagccccgttcttcctcagtgctggggggttggagacaccacccccttctgctgccctcctctgggctccaggaaggagagcagatgaaatctcaggcctgtggcttctccacaccactgccccccaggttggaggggagctaagagatgagagaaggggacagaggcaagaaaagatgttgatcaagaaagatgagaaccanntnnnagtngaggaggggaacaaaaccaaaatccaccccaaatccgaaccagcctggaaaaaaatgaaagttctcgagtctcacagagacattatttggcgcggcaagctctgcggcaggagcgctcaggcctcagtccagccctggaggcaggcctctctacagctcgtccttggcctggccggggacatttcctcctcatcttcctccttgtctcncatcntctcacctcatcttgtcccanatctcctgtcnctgctgtccgatnttggctcgaggccaatccttatggcgatnatcgtacaag

SEQ ID NO: 153215 - DNA, 2184 bp, Homo sapiens
cgaggatgtctcccttttttgccagggtccaagccaggtggttttttttcgtccccacagcgtcattaaattgggggcccccagggtttttcccccaccccctctttaaaaccccggcccaggatatttaaaaccccccccataagggggaattgggggccgcgccccccccctggggttagtccgcagttccaggggtttggtggagacacaaaatttaatttaatagaaattttgtttgtagttcttacattctcagtgtgagcccaatctggggacccagctgccccacccagaagtggcccagtcctgggggcaggggagaaagggaggggtgaaatgagaagagccccgttcttcctcagtgctgggggggttggagacaccaccccccttctgctgccctcctctgggcacttatttggtgagctatttgaaatctcctggcctgtggccttcgtccacaccacttgccccccaggttggaaggggaagctaagaagattgagagaaaggggaccagaggcaaagaaaaagattgtttgatcaaagaaaagattgagaacccaggggtgaagggctgaaggagaatcaaagattaaaataccagtttaaaaaaaaaaaaaaaaaaagggcggggagggggtggggggagagtggaggaggggagacaaaaccaaaatccaccccaaatccgaaccagcctggaaaaaaatgaaagttctcgagtctcacagagacattattttggcgcggcaagctctgcgggcaggaagcgctcaggcctcagtccgagcccgtggaggcaggcctctctacagactcgttctttggctggccgggggacatcttccctcctcatatttcctcttggtgcctctcaatcctcctcatacccaatctttgtcctcatcatcctccttgtcctctgcctcctcctcctctttgcgtttcttgtcttcttcctcctccttaagcctctgctcctcgtcctgtttgtccttcatttgtttctctgctgcctttgttacgccccacgtctcgttgccaaactcctcagcgtatgcctcatcgttggtgatgaggaagttgtcaaagatggtgccagacttgacctgccagaggtccaggcccagcacgccaaagttatcataggcatagatactgggatcgggagaatactcggggttgtcaatttctgggtggatccaagtgcccttgtaatctgggttgtcgatctgccggggcttccactcacccttgtactcagggttctgaatcactgggggttcccactctccgtccatctcttcatcccagtcctcgggcttcttagcatcagggtcagggatatgctcgggcttgtcccagtcctcaggcttggagtctgtgggatcatcgatcttggcccgctcatcccagtcttccggttttgaagcatcaggatcctttatcttcttgggtggcaggaagtcccaatcgtcttccaaggagccggactccacctggctgttgtcaatcttcacctcataggtgttgtctggccgcacaatcagtgtgtacaggtgtgtaaactcatcatccttgcaacggatgtccttgttgatcagcacgttcttgcccttgtagttgaagatgacatgaaccttcttggtgccagggccacagatgtcgggaccaaacatgatgttgtattctgagtctccgtgcatgtctgtctggtccaaactattaggaaacagcttcacatagccgcccccacagtcgatgttctgctcatgtttcaccgtgaactgcaccaccagcgtctggcctttgttgctgaaaggctcgaaactggccgacagagcataaaagcgtgcatcctggcttgtctgcaaacctttatctttctcctcgtcaccgtagaacttgccggaactgagaacgaatttgccaaaatctgacttgtgtttggattcgatccagcgggaagtccacccgtctccgtccagaaactgctccttgaagtagacggcgggctcggcgacggccaggccgaggaggccgagcagcagcggcacggatagcagcatggcgggccgagggggcggcaacgcgcggccctttaaaacgaccctccggcagcggctctgcagtacggacggggggggggggggaggaggttaagatgatccggaattc

SEQ ID NO: 153216 - DNA, 949 bp, Homo sapiens
ttttttgaagctcacaaagccaagattgattttttgaacaccgagtacaattgacaaatctctaacaagtttgattaagaaaaaagaaagcatgaataaacaattttagggataaaaagggaaacatcgctaaagatatcccagaaatgtaaaagataataagggaatattatgaaaatattcatgccaatacatttgaaaacttaggtgacatagacaaaaacaaaattgaccaaaattgagcaaaaaagaaacaaaatctgagtagtcctataacttagtaaaaattgagttagaaaagttaaagaagtctttacacaaatcaaacatcagactcagttttctaggagagttttgccaaacattcaagtagcagataattctggtctatttttggccccagaagatatattttacttgccatgcatttaatgagatagctgttgatttttttcaatcaccgtgacaggtgttttatattaggtgttattcgccagacatctagtccacctgttgccagatatggaattaatattcacttattttgaattaaaatttgttaataaattaataaaacaaagtcaaagttcaaattattaaaaaagtaaaagaaataaaatatattttatagagagcccttacaaaacagtaccaacataatgagctttccaaattttgaatgggcaaaataaatgaataggcatttcacaaaagaaggaagggtggccaataagtatatattaatataaaaatggttacttgtaataggaatcaaaagtgtttgacttattgactaagagtcagtttttgttttgatccctgttagtctatccagaaggcatgggtcttaataaacaccttgacctcaacagtttactgaatacaagggtaatttcatatgccttgccttctttaagggtttgttgtaaagattaaaatcctagtgccg

SEQ ID NO: 153217 - DNA, 239 bp, Homo sapiens; identical to SEQ ID NO: 126729

SEQ ID NO: 153218 - DNA, 215 bp, Homo sapiens
  misc_feature (1)...(215): n = a,t,c or g
acagtattgaaatgcatttgccttatacagctaaagccatggaaagggtatgagtattatagaacaattagactctgtatcttttagcaattacttgaagaaataccataatactatatgtggaagacatcccattggggtgttattaaatgctatcacagagctccagaagaatggaatgaatatgagtttttcgnttttgaattatgcccagt

SEQ ID NO: 153219 - DNA, 627 bp, Homo sapiens
atggcagagaaatgcacctctcagcagaaacgcacccagaacaagcatggcagcacaggcatcaagatgtccaaccgagtggtccgctgggaagccagccactctgggaactggtacacagcctcaggaccacagctgaatgcacagctagaagacaaagatgaacacggtattgaaatgcatttgccttgtacagctaaagccatggaaatccataaggatgagtttaccattattcctgtactggttggagctctgagtgagtcaaaagaacaggaattcggaaaactcttcagtaaatatctagcagatcctagtaatttctttgtggtttcttctgatttttgccattggggtcaaagattccgttacagttactatgatgaatcccagggggagacttatagatccattgaacatctagataaaatggcccgagcctccccgacgagcgccgccccctgctccacggcgcccagtcccatcgaccgcccaagggctgaggagtgcgagcgcatggctcaggactggcaggcagctccacctgcagccctggtgcgggatccactgggtgaagccagctgggctcctgagtctggtggggacgtggagaacctttatgtctag

SEQ ID NO: 153220 - DNA, 853 bp, Homo sapiens
ggcacgaggcaccataggcggcacaggcaccaagatgtccaaccgagtggtctgccgagaagccagtcacgccgggagctggtacacagcctcaggaccgcagctgaatgcacagctagaaggttggctttcacaagtacagtctacaaaaagacctgctagagccattattgccccccggagaattttcatccttgggccttctcatcatgtgcccctctctcgatgtgcactttccagtgtggatatatataggacacctctgtatgaccttcgtattgaccaaaagatttacggagaactgtggaagacaggaatgtttgaacgcatgtctctgcagacagatgaagatgaacacagtattgaaatgcatttgccttatacagctaaagccatggaaaggtgccctgttgatgtagtgatgcagattctgcccaagaagcccctgcattgcagagggactggagatctgtatgatctgtttatttcgcaattgacaggccataaggatgagtttaccattattcctgtactggttggagctctgagtgagtcaaaagaacaggaattcggaaaactcttcagtaaatatctagcggatcctagtaatctctttgtggtttcttctgatttctgccattggggtcaaaggttccgttacagttactatgatgaatcccagggggagatttatagatccattgaacatctagataaaatggctatcacagagctccagaagaatggaatgaatatgagtttttcgtttttgaattatgcccagtcgagccagtgtagaaactggcaagacagttcagtgagttatgcagctggagcactcacggtccactga

SEQ ID NO: 153221 - DNA, 1119 bp, Homo sapiens
atgcaagtaccctgtgaccaccaccactgggactgtgctgggtcagacctgaagccagcaatgcactggaccttatccaaggctctttccttaagggtgacaagaattcgagatgcattgggtgtggggacccaaaaaggctgtcacactgactcttcactgagctgttcagcacttaagccatccgtggatgggaaagctaaaagagcattgtttgtaacacatgctttctggggctccagaggtcgcgggcaactcctagatgctgctgtgggctggctggtgttcaagtttcttttagagctatatactggaatgtctgcagatgaaatgatatgctattcaggtaaaagtactgagttaagtggaaagttggttttaaactatgttttgactgtgatggagggagagaggagcagaggagtgaggccacagcaaggaaatgactgtgatgatggatttttgagtctcagactaggaccgcagctgaatgcacagctagaaggttggctttcacaagtacagtctacaaaaagacctgctagagccattattgcccctgtgggttggacttcagcgactcacatccaaagaacagaatacggcaaaaggaagatagcaactttacaacagacaaacctggcaaacacttactaccttaaccaaacgatcaaaatgcagattctgcccaagaagcccctgcattgcagagggactggagatctgtatgatctgtttatttcgcaattgacaggccataaggatgagtttaccattattcctgtactggttggagctctgagtgagtcaaaagaacaggaattcggaaaactcttcagtaaatatctagcggatcctagtaatctctttgtggtttcttctgatttctgccattgggtttacggagaactgtggaagacaggaatgtttgaacgcatgtctctgcagacagatgaagatgaacacagtattgaaatgcatttgccttatacagctaaagccatggaaaggtgccctgttgatgtagtgagcaggggtcctcagctggtccgtggcctgttaggaactggactgtgcaacaggatgcgaacggtgggccagcgagcattacccacctga

SEQ ID NO: 153222 - DNA, 2325 bp, Homo sapiens
  misc_feature (1)...(2325): n = a,t,c or g
atggctgaaggtgaagcagaagcaggcaccctcttcacaagaggtcttttagcacaggtgctgcctttggactttccagtgcctcagcatcagcctggggatcacgtttctcatcaaagaggggaaagaagggaaactcgagccagcccgggaaggaccctaccttgtgctgctaaccactgagactgctgttctgcttatatccattactattcctaccactagcaactctaaccccactttagaacgcttctgtggtttaggagcagaggtcactggaaaggatcctatgggcttctttaaggtgctcagacagtcgctggatgcagatgagggaacggctgtggacattcagtccttcagaccacaaaaggactttggaaggagaagaaccctggaagaatgccatgttactggcaaaggcggcacaggcaccaagatgtccaaccgagtggtctgccgagaagccagtcacgccgggagctggtacacagcctcaggaccgcagctgaatgcacagctagaaggttggctttcacaagtacagtctacaaaaagacctgctagagccattattgccccccatgcaggatatacgtactgtgggtcttgtgctgcccatgcttataaacaagtggatccgtctattacccggagaattttcatccttgggccttctcatcatgtgcccctctctcgatgtgcactttccagtgtggatatatataggacacccctgtatgaccttcgtattgaccaaaagatttacggagaactatggaagacaggaatgtttgaacgcatgtctctgcagacagatgaagatgaacgcagtattgaaatgcatttgccttatacagctaaagccatggaaagccataaggatgagtttaccattattcctttactggttggagctctgagtgagtcaaaagaacaggaattcggaaaactcttcagtaaatatctagcggatcctagtaatctctttgtggtttcttctgatttctgccattggggtcaaaggttccgttacacgttactatgatgaatcccagggggagatttattgatccattgaacatctagataaaatgggtatgagtattatagaacaattagaccctgtatcttttagcaattacttgaagaaataccataatactatatgtggaagacatcccattgggggtgttattaaatgctatcacagagctccagaagaatggaaatgaatatgagtttttcgtttttggaattatgcccagtcgagccagtgtaagaaactggccaagacagttcagtgagttatgcagcctgggagcactcacgggccactgaagctctgaatcctcagggatgccacctgccacattcttcatactctgtccgggggtccccagcctaggccttttaccacgatacttggtcctggtttgggggggattctgaaaccctcaaactaaattagaacttttcttccctttttttttctaagtaggtgtaagtcccttcccctaatttcaactccattaaaaaaatggctttatagttttaggggccagttggaagggaagggctgggcatcaaaataattttggatccaaaaaaggatgacaatgtaaaaggctccagttggtgggcagacagttttttttgaaagtaacttgtaaagcatttacccatatccctaaatttgcactcttttgcagacttgtgcnacatatattccgctttcagaatagttttgcaaattgtacacaaacaaacgaaaaaggtggaagctttttaataaagaaattgcatttataaatgatctgtatctagaatataataaatctccagttatagtcaattactacccatgttgtacaacagatacgcttctattttgagttgcgtaatagaagggctacacaacctcaaaataataaataaataaataaataatttaaaaaataaataaaaataaactgaatgaaattgaaaacatatcaatgtgagatgccactaaagtcatactaaaagggaatttacaccacttactgcctacattagaaaagaagtctcaaatcaatgcaaatcaatgacttctgcctttacagtaagaaaccagaaaaagagcaaataaaatccagtaagcagaagaaaggaaacaaagatcagaacagaaattaatataatcaggaaaagagagagagagagaatcattgtaaccagaagtttgaggaaaatcaaatcaattggtaaacctctagccagacagatcagaaaaaaacacgaaagacacaaaccagtctcagaaatgacaggtagcatcattac

SEQ ID NO: 153223 - DNA, 2108 bp, Homo sapiens
  misc_feature (1)...(2108): n = a,t,c or g
agcagggtnnnnnnnaaatcgacgttctgatgacttctgcacgagcggctnttctcttccttcgctaacgcctcccggctctcgtcagcctcccgccggccgtctccttaacaccgaacaccacataaatgagcatattctgatgtactctttggatctgaactcatcttcacagatgccttcaatctaaggcgcaaacatctgatggagagatatttgaagttgatggggaaatgcccaaccatctgttgcctattaaggcccatgtggaaagatttgggaaatggatgatgaaggagatgatgacccagttcctcctcccaaatgtgaatgcagcaatattaaaaaaggtccattcagttggtgcaccccccccacaaggatgaccctccttcctcctgaagatgatgaggaacaaaggaaaagcgtaccagatgatatccctgtttggggaccaaggaattcctggaaagtttgaccaaggaacacttttttgaaactcatttctgggcttgcaaacttactttaggacatccaaaggtttgcttgatgttacatgcaagactgtttgccaatatgatcaaaagggaaaactcccttgagagattcgcaagccttttcccaaatcaaaaatgacttttactgaagaggaggaagcccaggtacgcaaaggagaacccagtggtgtgaagagaagtgaaaatgtttgtgccctgacacttgtaaacacttgttagggattgttcccaaatacctagttgcactgctctgtttataattgttaatattagacaaaccagtagacaaatgcagcagcaagtcaattgtattagcaagaatattgtcctcaattgcatgtgtagtttgagcacagattcccaaaccttacggccaagtttcttctagtatgatgggaaagtttcttttttctttgctctggaattaaaactggaactgtgggggttctctataagtggcattttgggctttcctcccttttttgtaaagcaatgtctgcctagtttattgtccaagttaactttaggtgaccttttaaaagttggcgatagtacatacaacaacttgcaaaaaagcttttctgggaataggaattaacaaaatattatctttaattcatgagttgggaaactgggaaaaagggcttcttgaagtaaaatgttcccgagtggggagctactaaggatggtccttccagcctcctggcagtccaaggaagtaccactggaattgattaagcctgtatggtaggccaggggccccccctcatggccacccgagggacctgtttcccctttttctttatttttaaccccccncctagttttaaatatattgcccccagagacctcagttacctacccccagtttgtggttttttggggagaaatgtaacctggacagttagcttttcaattaaaaagacaccttaaccccatgtgggatgtcatctttttataattagtgttcccatgtgggagaaaattattcacactacttgcatgtaaaggataatttaacttttaacattaaaatatgtgggtaaaacccagaaagcatccatcatgaatgcaagatactttcaataaaaagtaagttatatagtaggtagttaagtttgcttttgtggacttaaatgtgtctcttcacttaaatgggttgaatgtgtatatatttgttcagcttgaaaagacttagtttatatcctagctcactggaggctgctgacataaccataacttctgtcccttctaattgtcatttatatgcctaactggagctagtactttaattcttaacacaaaattactctgccattgtttccagcttccctcctacaatagaatgaagtttttttgatggcttgagatggctcacaaattttgatttttttttcttccttgtgctccctttttttctccttgcttttccagttaacatctatattcacatgtaatcttgttttctcttcacattcactgagttgttcaggctcagatcatcccttgacagtagtttgccttcatctcacctttcatttgtcccaaattcaccttatttaataaagtcccatatgttgtctcacttaa

SEQ ID NO: 153224 - DNA, 665 bp, Homo sapiens
  misc_feature (1)...(665): n = a,t,c or g
agtncatgaaggggggtnnngggnaattgaagaccatgattacccctcggnggaancctgggaagtgatccagtgtcatcgctgggagtgggagacagaaatgttacttccaaagatttcgagtcctgtggtactgccaggagaaccgggggctggggtgatgggtaaggagaggcaccattagccccgccaggcagaggcaagatggggtgggggcggcacctgccaattatgccaaagtcttggagtggcagctggcaccatcaccaaggcacaaatgccagcagagacctggcactcacctgggttgtgattccatagggcccctgtctcctgttggtctcccagggctcaaaggctgacctgataattcaagtgaaggatgccctagttcaaggccctcccagttccctcatccccaggccaccctgggtcaggtggtcccaagggacaagctaggtccctcctgaactgcagaggctgcccaataaactggcaacacaggtgttgcaggaagatatagctgggtcctcatcctgggtctgtaatttattagacgtgtggctttggacaaatgacataatttcccagagcctccttagataaaaaactagggctttgcttaccttggcgtattgttaggaaaattaaatgagttgctcaat

SEQ ID NO: 153225 - DNA, 1394 bp, Homo sapiens
gcaacctttccaagggagtggttgtgtgatcgccatcttagggagaaagatgttctcgtccgtggcgcactctggcgcgggcgaaccccttcaacacgccacatcctgcagctggtgcacgatggtctcggggacctccgcagcagctccccagggcccacgggcaagccccgccgcccctcgcaaccatggcagccgccgccgtggaagagcagtatagctgtgactatggatctggcagattctttatcctttgtggacttggaggaattattagctgtggcacaacacatacaagcattggttcctctagatcctggttaaatgcagaatgaaggttggacccccaaaagtacaaagggcatatttaacggattctcagttacacttaaagaggatggtgttccgtggtttggctaaaggattggctccgacttttccttggctactccatgcagggactctgcaagtttggcttttatgaagtctttaaaagtcttgtatagcaatatgcttggagaggagaatacttatctctggcgcacatcactatatttggctgcctctgccagtgctgaattctttgctgacattgccctggctcctatggaagctgctaaggttcgaattcaaacccagcccaggttatgccaacacttgagaggggatcagcttcccaaaatgtataaaggagaaaggccttacaagcattctacaagggggtttgctcttctctggatgagacagataacatacaccatgaattgaagttccccatgccttgaacgtactgtttgaagccactgtaccagtttgggggtccctaagcccccgcagtgaatgattcaaacgccagagcagactggttgtaaccatttggtagcaggttaccatagctcgagtcttttgtgccaattgtttctcacccctgctgattcgtgtggtatctggtgttgaataaagaataaagtgtagcagtgtcttctcttggtcttcagtgtgactttggattttaaaggtgtaatggaagggactgtttgcccgtatcatccatgattggtacccctgactggcactacagtggtttatatattactcagtaaagggttactttaggacttccctcgccctcctccaccccgagatggccagagtctcttaaataataagtttgggttaactccagtagttagatcaaagcaaattgtggactgaatctgcttgttgatccagtgtttgaagaaagtgcaaaaggaacttttatatatttgacagtgtaggaaattgtctattcctcgatacaattactgtaggtactcttgcttaaggcaagaagtttcagatttactgttgtaaataaacccgaactcttcatgaaaaaaaaacaacaaaaa

SEQ ID NO: 153226 - DNA, 2237 bp, Homo sapiens
tttttttttttttttttggatgaaacttggaggcttacaggtatagacagctttcagctacagcacattctaattttttattttgtttagttcttttgtattcacttctgggctctttaagactgttttaaaagaaatcaatttacgcgcgaaccccagttatataatataaactttgtaatcctgagagaaaaaatgtatagtaaatctaagtccttgatttttaactttctattgtaaaaaataataatatacagagtttaatagaagcgtgatgttttggttttgttttccccagaagctggccatatggtcctttgagtacgggggatgtccccaaactgggcccacccaattgagccatgggcggcttccggccaggaaatgccacaagttagcctcccaggctttgcgggtggacatgcctgctcccctgccagcctcccaagtggccctggcccagcccctccccgagcctgtctgccctcccccaggggtgggaggaagtctctgggggccccaggaggattccctcccggagactcgcacggtgctccctgctcacgcgttgtcacagttagtcccggaaatgacttgaaaccagggcattctccccggaccctccagcgtggggggagcctcccaggcagacgctgggtatggagctgtggtgtggtctgtcctgtatggtggccagtgctttctgccagcatttctggatggatatagggactatcattagtatcctaatacacggtgattttaaaacaaccattaaaatttgatttcagagtccactgacccttaacagatgttaggtatacccttactggagagggaactctgatgaggagatgctggtaaattatcattttttaaattgctggtgagtctgacacttggtgagttttcagccagtttgttaaacttttaattaagttttgtttataataaaaatatgagatggatttgaaagtttccatttttgaaagttaccctcgtttttcaaaggtattttctaaacagatctttaatggactatttaaaccgaatttaaggaattcacacacgacagttgacaggtcttcacgcaggctcggttggtaacgtgctgccagcacagggctgggtgatacgtacaccctaagccgggggtgcctggggctggggggcgctccttgcaatgcccctccagccacaagggcagtgaaggtgctgcctgtgtgagccgtcgggggagcggccggctgtgggggcagcgcagcagcgaagcatccgtggggcctttccttctcggctggttctctgtgacggtggcgtcggctcgcctctgctcctttcatctaagaaagaagccacttgaccctgacagcccacggcggggtaacactgagcagctgcattggtgctgtcacttttttaaggctttctgtccagactttcaacactgggtttcttttcagaagtttcgaaggattaatgactttcttcaacgcccttgcttgcgggctgagggtgacagtcacgtccgtttcttctgtattagaaggctgcggtgattcaattagattgtcccactgctgagacctgtaggggcagcttctaacatgcttttttcaaggggagaggagtagtgacaagtcgtgtgtcggaattggatttgagaacactctgaatgaccccctgggaggcccgagggggccaggctttcgggcgtgaactgaactccagacccctctttgtgttgggcagtgtcatcttgcttacaaactgtaagacacatttttttgtgtgtttgtttatgttgttgttcttttgcagcactcacgcctctgaccagtcttttggggaaaggagtaaccacccccacaataacagaaatttgtcaccatccaagagtagccactgtttccttaatactggcataatgcttccaggaagtttttcttttttatatttaaaatgttacttttctgtatgatgtgcatgcaaggtttacccgtaacttttccttaaactttttagtgcccgtttcctagtataatcctgtaaatgtcagttacgtgaaagagtgagtccaatgtaagtagtttagcttgtttattgcaatgctggcctcaacacaacagaataaaaggtggtagaaagtactctttgatgtttctggtaatcatggacccttctcctggggcatttgttttgttttcataataaaaagcaaaaaaaaaaaaaaaaaa

SEQ ID NO: 153227 - DNA, 2358 bp, Homo sapiens
atcccatttcgaagcataggaatgagcagattgggagaagatgttaatggtgaagcaacagaatctcagcagaagccaagaaataagaagtctaagatggatgggatggtgccaggcaaccaccaagggagagaccccagaaaacataaaagaaagcctctgggggtgggctattctgccagcaaaatcacctcttttatgataactgctttctccatgctcctgatggacagcccctctgcacttgtgatagaagaaaagctcagtggtacctggacaaaggcattggtgagctggtgagtgaagagccctttgtggtgaagctgcggtttgaacctgcaggaaggcccgaatctcctgggagactattactttgatggttaaagagaacctgtgtgtagtgtgtggcaagagagactcctacatgtggaatcacgttcttccgaatgagtaccggaagcactttccccattcgagatggaaggaccacaatttcccacgatgtgctgctgctctgcacctcctgccatgccatttccaactactatgacaaccatctgaagcagcagctggccaaggagttccaggcccccatcggctctgaggagggcttgcgcctgctggaagatcctgagcgccggcaggtgcgttctggggccagggccctgctcaacgcggagagcctgcctactcatcgaaaggaggagctgctgcaagcactcagagagttttataacacagacgtggtcacagaggagatgcttcaagaggctgccagcctggagaccagaatctccaatgaaaactatgttcctcacgggctgaaggtggtgcagtgtcacagccagggtggcctgcgctccctcatgcagctggagagccgctggcgtcagcacttcctggactccatgcagcccaagcacctgccccagcagtggtcagtggacccacaaccatcagaagctgctccggaaattcggggaagatcttcccatccagctgtcttgatagctgctttcctcccagttaggacaagtgggaagctggagccaaggttgaagagtcacctcttcccattttagtacatcattaattgtcaaagcctgtgtggacacaactcagaatactaacctaggactaatcccaggggtgctttttgctgggagcaaagatattgtttgaaggagagtttatggttttggatttttaaacgggcagggtcttttttcctctcatttttgtggacaagagaggccttcgccttttatttttacatctccctcttcatgctgtccctgtgcagaggaaaaatgaagaattctcccagaagtgacttgtcaagacttaaaaaaaaatgtttttaatgcatttcttccttgtctagtgcctcggtttatctctaacaggggctgtccagtatatcggtcctgttaggaggggagaaaaagttcttccaaaggctgggagaagtgaacaaggagtcaaatttattttcccaattcaacttcataaattatccatttctttgggcttcatgcttcttcccgttaactcatgtggttgggggatccatcccatctgggtcacttcagtctacttcacgtacttgaaaagggctttcctttacacttccagggaccaaacaggcaacttcctgccacacacttccaccctatcactggggaggaaatccttttctgggacatgaggcctttggactggggtggggggcaggaaaggaaccaccaaacttccatctcccaataggaactttggaaattcaactcagcttttccttttcatgctgtttgttgcctgcttgttggcattcctcctgcccccagaacggcaagatttttaggcctcaccccctgtctgagagtaaggttatcttttatccagaatcagtatcagttcccctggtattctgtgcctccatccgaatttggccaaggacctgaccctcctttaaaggcatttaaattccacctccccagagtcatcctggtccaggttgccaatatgaggaccttcctctgtctccctctgaagccctgggacacttgagcttaccttaatacattagattgttccaaaagaggagcgttgtttccatctttcaaaatgttaggtccattactttgagtataaaatcgtacttattaatgattagtaatttttactaaagtattgggaaaactttacttattttataagatcttaacaagcttaaaaaagaattttatgaccagaatccaacaagagactctattttggcaattgtgcccaagttggtgatgtttactctaaaattaataataagaactacttgtaagcccaaaaaaaaaaaaaaaaaaa

SEQ ID NO: 153228 - DNA, 936 bp, Homo sapiens
atgctgggagccatcatcctcagcaaactaacaggaacagagaaccaaataccgcatgttgtcattcataagtggcagttgaacgatgagagcacatggacacagagcggggagcaacagacaccagggcctgttgggggtgaaattgatcttcaaattctctccaaagttcaggctcaatacccaggagtttgtatcaacaatgaagttgttgagccaagtgctgaacaaattgccaaatacaaagagcttgtagccaagacatcgaacctcgagaacgtaaagtttgcttggcataaggagacatcatctgaataccaaagtagaatgttggagaaaaaggagcttcaaaagtgggactttattcatatgattcaaatgctgtattatgtaaaagacatcccagctaccctgaaattcttccatagtctcttaggtaccaatgctaagatgctcattattgttgtgtcagctcactggtctgtgggacccacccccacctatcccccaggtgattacagtagccttctcgctgttctccccacctctgcccttatgcgccagtactctcttcccatcggaagcagtggctgggacaagctgtggaaaaagtacggatcacgctttccccaggatgacctctgccagtatatcacatcagatgacctcactcagatgctggacaacctagggcttaagtatgagtgctatgaccttttgtccaccatggatatatctgactgctttattgatggtaatgaaaatggagacctgctttgggattttttgactgaaacctgcaactttaatgccacagcaccacctgatctcagagcagagcttgggaaagatctacaagagcctgaatttagtgctaagaaagaggggaaggttctttttaataatactctgagtttcatagtgattgaggcataa

SEQ ID NO: 153229 - DNA, 2120 bp, Homo sapiens
  misc_feature (1)...(2120): n = a,t,c or g
atgaggagagaaggatttaagttcagcagaagtaaggtatttgtccaagatgagatgactaagaagtggcataaatcagatcttcactgggtctccaggattcagtgtacagttctaggagttttgacaaatgccactgagatgagaagtcttctcccaatcgaaagtcttttcttgatccaatgtttcgtggtctcaggggcttcaagaaatgaagccacggactgcagcggcgagtgttacagctcgatgagagaaacacgtggatccaaagagtgtgcggcggcaagatttattaaagtgaaagggaaagtacttcaaaaagttgaatcctacaagttatatcacccatacttccttgccaactggttttcagctagttttagtaaagtgggaaaattggtagagatgaggggtcaggaagaggagacactgggtacttttgcccatgtcctgatgtttcaggcagcatcctcaagagcgcttgttctacctcccactatgcagcttgagctccagaactttggtaacacctgctcctacagaaaaccaaatatggcatcttccatgaggagcttgttttctgaccacgggaaatatgttgaatctttccggaggtttctcaaccattccacggaacaccagtgcatgcaggaattcatggacaagaagctgccaggcataataggaaggattggagacacaaaatcagaaattaagattctaaggcataggcggtaggtgcaggtgaaattgatcttcaaattctctccaaagttcagggctcaatacccagggagtttgtattcaacattgaagttgtttgaggccaagtgctggaacaaattggccaaattacaaagagcttgtagcccaagacatcgaacctcgagaacgtaaagtttgcttggcataaggagacatcatctgaataccaaagtagaatgttgggagaaaaaggagctttcaaaagttgggacttttattccatatgattcaaaatgctgtattatgtaaaagacatcccagctacccctgaaattcttccatagtctctttaggtaccaatgctaagatgctcattattgtttgtgtccagggaagcagtggctggggacaagctgtgggaaaaagtacggatcacgcttttccccaggaatgacctctgccagtatatcacatcagatgacctcactcagatgctggacaacctagggcttaagtatgagtgctatgaccttttgtccaccatggatatatctgactgctttattgatggtaaatgaaaatggagacctgctttgggatttttttgactgaaacctgcaactttaatgcccacagcaccacctgatctcaggagcagagcttgggaaagatcttacaagagcctgaatttagtgcctaagaaaagaggggaaggttctttttaataatactctgagtttccatagtgattgagggcataactatccaatcacaaaagtatattcaaaaattatattttgaacaactcgaatcactcatttatttccatattaaaatcacaaactcatcccattaatgtagataaagcactgtttggatatgagatgtagccaaatcccaataccattattggaccttcccatttgggaatccatatgggataccgccnggtccttatccctgttccctccccccccggtagagagacccacaagcaggctcaacataacataagcctaggaaaattagatgactgaatttcctatggcatattgataataaaattcattccatttgctgattgtctgaaattttctagaatactaataaaatacatactatagattctttattagtgaagtatgcactaatcaatactttgaacacaaagcctgtgttactgatttggccgttttgtgaagaaacatttatctttgtacgttcttctattgtgctttctatctaatttttattaatttgtaagagtaagcacctttagaatattaaaaattaattctttatcacatgttgtcatttcttcccattgtgttttctcttgtaattttatctgtgaattaatagctttttgtttgtctttttgatatactgaagttttctattatattcagcca

SEQ ID NO: 153230 - DNA, 6753 bp, Homo sapiens
atgcccacttctgagagtgagggtgggtcaggcactcaagcctgcagaaagactcagcctaacatccatgactactactggaatgggattggtgttgaagactggattgctgctgagcggtggatcaaatttaggtttcagaccatggatggagactgggaaaatagcgtgtcctgggctgatgatgagaatgaagccagtattgggtcctggagtggggctagtgataaggctgggattattcggtcttgggctgtggcttgtgatgagaccagtgttaagtcctgggctggggccagggctgagaatgtggttggtattgggacttgggctagagctggggagcaggccagtggagggctctgggctgggggtcagactagtgaggggacctgggctggggacaaggccagtggaggagcctggactggggctgagaaccaggccagtggggggtcttgggctctcgctgggaatcaggccattggagagctttgggctgcgggtcaggccagtgatgggtcctggcctgggggacaggccagtggggtgtcctgggttggggaagaggccattggagggtcctggactggggctgagaaccaagccagtgaagggtcttgggctggagctggggctgggaatatgagtagtgtttcatactgggctggggttgtggatcaggccggtggagggtcctgggctgggactaatgatccatttggtgtgaggttacacaggactaggaataaagaagtcatgaaagcagtggcccttttcactattgcaccagttaacctactgaagaaacacagactggcaaattggataaagagtcaagacccatcagtgcgctgtattcaggaaacccatctcacatgcagagacacacataggctcaaaataaaaggatggaggaagatctaccaagcaaatgggaaacaaaaaaaggcaggggttgcaatcctagtctctgataaaacagactttaaaccaacaaagatcaaaagagacaaagaaggccattacttaatggtaaagggatcaattcaacaagaagagctaactatcctaaatatatatgcacccaattcaggagcacccagattcataaagcaagtcctaagtgacctacaaagagacttagactcccacacattaataatgggagactttaacaccctactgtcaacattagacagatcaacgagacagaaagtcaacaaggatacccaggaattgaactcagctctgcacaaagtggacctaatagacaactacagaactctccaccccaaatcaacagaatatacattcttttcagcaccacaccacacctattcaaaaattgaccacatacttggaagtaaagcactcctcagcaaatgtaaaagaacagaaattataacaaactatctctcagaccacagtgcaatcaaactagaactcaggattaagaatctcactcaaaaccgctcaactacatggaaactgaacaacctgctcctggatgactactgggtacataacgaaatgaaggcagaaataaagatgttctttgaaaccagtgagaacaaaggcacaacataccagaatctctgggacacatacaaagcagtgtgtagagggaaatttatagcactaaatgcccacaagagaaagcaggaaagatccaaaattgacactttaacatcacaattaaaagaactagaaaagcaagagcaaacacattcaaaagctagcagaaggcaagaaataactaaaatcagagcagaactgaaggaaatagagacacaaaaaacccttcaaaaaattaatgaatccaggagctggttttttgaaaggatcaacaaaatagatagaccgctagcaagactaataaagaaaaaaagagagaagaatcaaatagatgcaataaaaaatgataaaggggatatcaccaccgatcccacagaaatacaaactaccatcagagaatactacaaacacctctacgcaaataaactagaaaatctagaagaaatggataaattcctcgacacatacactctcccaagactaaaccaggaagaagttgaatctctgaatagaccaataacaggagctgaaattgtggcaataatcaatagtttaccaaccaaaaagagtccaggaccagatggattcacagccgaattctctcagaggtacaaggaggaactggtaccattccttctgaaactatttcaatcaatagaaaaagagggaatcctccctaactcattttatgaggccagcatcattctgataccaaagcctggcagagacacaaccaaaaaagagaattttagaccaatatccttgatgaacattgatgcaaaaatcctcagtaaaatactggcaaaacgaatccagcagcacatcaaaaagcttatccaccatgatcaagtgggcttcatccctgggatgcaaggctggttcaatatacacaaatcaataaatgtaatccagcatataaacagagccaaagacaaaaaccacatgattatctcaatagatgcagaaaaggcctttgacaaaattcaacaacccttcatgctaaaaactctcaataaattaggtattgatgggacatatttcaaaataataggagctatctatgacgaacccacagccaatatcatactgaatgggcaaaaactggaagcattccctttgaaaactggcacaagacagggatgccctctctcaccactcctactcaacatagtgttggaagttctggccagggcaattaggcaggagaaggaaataaaaggtattcaattaggaaaagaggaagtcaaattgtccctgtttgcagacgacatgattgtatatctagaaaaccccattgtctcagcccaaaatctccttaagctaataagcaacttcagcaaagtctcaggatacaaaatcaatgtacaaaaatcacaagcattcttatacaccaacaacagacaaacagagagccaaatcatgagtgaactcccattcacaattgcttcaaagagaataaaatacctgggaatccaacttacaagggatgtgaaggacctcttcaaggagaactacaaaccactgctcaaggaaataaaagaagatacaaacaaatggaagaacattccatgctcatgggtaggaagaatcaatattgtgaaaatggccatactgcccaagggggtgctggggaggagggcgagctcggcggtgacgcgcggtcctcacgtgacccggagctgcagagctacgcagccttcgttgcagtcgtcactcgcatctggctaccagctccccgctgccctgcgctcggcgggctggcatcgggcccggggaaagcggagcagatctgcctgcatgtctgctgcagggcttaagatcactggaagcaaagaaacaaagaggagattgctcctgatcagtatagactggtccagagatctcatgaatttatgtatctactttagggtgtactgccaagagaagcaagaggagaggagggaactgcctcggatcattacaggtccacctccagaggcagctgtagtggcctttgagtggctgaagaccagcaccctcacaggcctacacccacaactaccactctctttaccccagcccgagtgcgctctaccataccttgttcgtgcttttagcaggggtgattacatgggccgcattcaggaagtgggctgggtgactgcaggactggtgatctgggctggcacctgctactacatttacaaatttaccaagggaagagcccagagtgtgaggactcttgccagaaatggatccacagttaagatggagactgtggttggggtacagagccagaccttggccataaatgaagcagagattaagactaaaccccaagtcgagattggagcagaaactggagcaagaagtgggcctagggctgaagtagagaccaaggccactgctatagccatacacagagccaactctcaggccaaggcaatggttggggcagagccagagactcaatctgagtccaaagtggtggctggaacactggtcatgacagaggcagtgactctgactgaggtcaaggccaaagccagggaagtggccatgaaagaagcagtgacccaaactgatgctgaggctggcaaaatagttaagaaagaagcagtgacacagaccaaggctaaagcttgggcgctggttgccaagacagaggccaagagagaagcaatgacccagaccaaagctgaaactcatatattggctgaaaaagagacagagattaacagagtaatggttacacagagtgagaccttggcagtacccagggaagtggccaagatgggggccacgaacaagactggaattgtggatgaaaccaagacaagagctctggaagagactgtgagtgtggctaagactcagtctgaggccaggcctggtgccacagttgatgctaggggaaatcccaatggcatgtccagggaggtggctggagtggacatgaagtcctgtgcacagtctcaggctgtgaccaagatccagggtgatgacatgcctggtactggggttgaggacatggggaattgtaaaaccatgtctagggcagagtctggggcagacacgagggcttctgctcagcctcaaatttttgccaaaacccagactgaggccattcctggggcaaagattgatgccgggggtaacaccaatgccatgtggaaaataccaatgtcatatctaaaggcaataactggagctgacatgagagctgctgctcagcctcaagctgttgccagtactcacgctgaggccatgtctgatgctaaggttaagaacagaggcaatcccaatgccatgactaaagcaggggccaaggcaaacttgagggccaattcccaggttgaggccttgcctgatgccagggataagagcagaggcaatcccaatgttatggctaaggtgggggatgggacagacatgttgtcctgtacacagcctcagcttgtggccagtgttcaggctgataccttgtctgatggcaaaattaaggtcaggggcaatgtcaattccatgcctaaggaaggagctggggtggatatgaaggctcaagatgataacagaagagtaagtcaggtagcctcagtgaagagtacagatggaaaaactgaggacagaacactgaggaagcctagtacatgtggggctttggcagagaatagcgcagaattgaaaccgaggttggaattgccatcaactattaaggcatgtgaagtcaccaccctgacacataaactctgggataattctgtgaaagcaggaacccttataactaaattatttctctccagtgctcagagcatgaaaattttctgctgtctttggaactttgtctacaaacagttagaagatgcagcccaagggctcaccatgggtggcgatgttgaagaacatgagtctaggcttggggctggggaagaggctggtgtagagtcctggaccttggctaggaatgtgggagaggatgagctaagtagagagtccagccctgatattgaggagatcagtttaaggtctttgttttgggctgagagtgagaacagtaatacgttcagatctaagagtgggaaagatgccagttttgagtctggagctggggataacaccagcatcaaggataagtttgaggctgctggtggagttgatatagggtcttggttctgtgctggtaatgaaaacacaagtgaggacaaatctgcacctaaggctaaagccaaaaagtcatctgagtcaagaggcatatatccgtacatggtccctggggcaggaatggggtcatgggatggagccatgatctggtcggaaactaagtttgcacaccaaagtgaggccagcttcccagttgaagatgagtccagaaaacaaaccaggactggggaaaaaactcggccctggtcttgccgctgtaaacacgaagctaatatggatccacgagatcttgaaaaactcatttgcatgattgagatgactgaagatccttctgttcatgaaatagccaataatgctttatataacagtgctgattattcttattctcatgaagttgttcgtaatgtaggtggaatttcagttattgaaagcttgctcaataatccctaccccagtgttaggcagaaggctttaaatgcactgaataatatctcagtggctgctgaaaaccataggaaggttaaaacttacttaaaccaagtatgtgaagacactgtcacctatcccttgaattcaaatgtgcagttggctggactaaggttgataaggcatctgactattaccagtgaatatcagcatatggttacaaattatatttcagaatttcttcgtttgttaacggtgggaagtggagaaactaaagaccatgttttgggaatgcttttgaatttctctaaaaatccatctatgacaaaagacttgctcattgccaatgcaccaacatcactgattaacatttttagcaagaaagagacaaaggagaatattcttaatgctctttcactatttgaaaatataaattaccattttaaaagaagagcaaaagcatttacccaggacaaattcagtaaaaattccctttatttcctattccaacgacctaaagcatgtgccaagaaacttcgagccttagcagcagaatgcaatgaccctgaggtgaaagagagagttgagctattaataagtaaactctga

SEQ ID NO: 153231 - DNA, 404 bp, Homo sapiens
acaaaaaaaatatcaattgagaaatactaaattagaaacaaatggaagagccaacattatatgtaggaaattttcctatccaactcacataagcttccacaaatttgaagatggtgctatcagcagtaaggtcttcatgttcttcaacatcgccacccatggtgagcccttgggcctgcatcttctaactgtttgtagacaaagttccaaagacagcagaaaattttcatgctctgagcacaacatgttttcagaactttttgaagttccagtatggtgctgtcacggttggtgagctgtctgtccttgatccagtagacaatgcgagtttcttccgtcattcgccacgctgaccacttccctaaagctgccacccgctgaagccccagcccggccgcggccgc

SEQ ID NO: 153232 - DNA, 7502 bp, Homo sapiens
ggggtgctggggaggagggcgagctcggcggtgacgcgcggtcctcacgtgacccggagctgcagagctacgcagccttcgttgcagtcgtcactcgcatctggctaccagctccccgctgccctgcgctcggcgggctggcatcgggcccggggaaagcggagcagttttccagatccctctacctacctgaccatcttggtgaaggaaatggtgggcttttggggaaatccctagaaccctacagatctgcctgcatgtctgctgcagggcttaagatcactggaagcaaagaaacaaagaggagattgctcctgatcagtatagactggtccagagatctcatgaatttatgtatctactttagggtgtactgccaagagaagcaagaggagaggagggaactgcctcggatcattacaggtccacctccagaggcagctgtagtggcctttgagtggctgaagaccagcaccctcacaggcctacacccacaactaccactctctttaccccagcccgagtgcgctctaccataccttgttcgtgcttttagcaggggtgattacatgggccgcattcaggaagtgggctgggtgactgcaggactggtgatctgggctggcacctgctactacatttacaaatttaccaagggaagagcccagagtgtgaggactcttgccagaaatggatccacagttaagatggagactgtggttggggtacagagccagaccttggccataaatgaagcagagattaagactaaaccccaagtcgagattggagcagaaactggagcaagaagtgggcctagggctgaagtagagaccaaggccactgctatagccatacacagagccaactctcaggccaaggcaatggttggggcagagccagagactcaatctgagtccaaagtggtggctggaacactggtcatgacagaggcagtgactctgactgaggtcaaggccaaagccagggaagtggccatgaaagaagcagtgacccaaactgatgctgaggctggcaaaatagttaagaaagaagcagtgacacagaccaaggctaaagcttgggcgctggttgccaagacagaggccaagagagaagcaatgacccagaccaaagctgaaactcatatattggctgaaaaagagacagagattaacagagtaatggttacacagagtgagaccttggcagtacccagggaagtggccaagatgggggccacgaacaagactggaattgtggatgaaaccaagacaagagctctggaagagactgtgagtgtggctaagactcagtctgaggccaggcctggtgccacagttgatgctaggggaaatcccaatggcatgtccagggaggtggctggagtggacatgaagtcctgtgcacagtctcaggctgtgaccaagatccagggtgatgacatgcctggtactggggttgaggacatggggaattgtaaaaccatgtctagggcagagtctggggcagacacgagggcttctgctcagcctcaaatttttgccaaaacccagactgaggccattcctggggcaaagattgatgccgggggtaacaccaatgccatgtgtaaggtgggggcaggggcagatgtgagagcttgtatacaacctcagactgtggccaagaaacaggctgaggtgacgtctggtgccagggttgatggtaggggaaataccaatgtcatatctaaggcaataactggagctgacatgagagctgctgctcagcctcaagctgttgccagtactcacgctgaggccatgtctgatgctaaggttaagaacagaggcaatcccaatgccatgactaaagcaggggccaaggcaaacttgagggccaattcccaggttgaggccttgcctgatgccagggataagagcagaggcaatcccaatgttatggctaaggtgggggatgggacagacatgttgtcctgtacacagcctcagcttgtggccagtgttcaggctgataccttgtctgatggcaaaattaaggtcaggggcaatgtcaataccatgcctaaggaaggagctggggtggatatgaaggctcaaggtatggcccagagccagggtgaagccttacctaatactagaggtaaggctaggggcaaagccaaagccaagtgtaagacagggcctgggatggacatgaaaacctgtacacaacctcaggctggggtcaagaccccagctgaggccttgcttgattccagggttgatggtaggggcaatcctaatgccacttctaaagccgggactaaggcagaccagagggtctgtggtcagcccctggttgtggccaatccccagggtgaggccttgcctggtgccaagaataaagtcaagggcaatccccatactgtgcttaaggtgggggctggagaaggtacaacagactctgcccagcctgaggcagtggtcagtttccagggtgaggccttgcttggcaccaagaataaagttaagggtaatcccaatgttgtgcttaaggcagaagttggggaaggtgcaatgggcactgcccagcttcagattatggccagttccaagggtgaggccttgcttgattctaagaataaggtcaagggtaattccaatgctgtgtctaaggcaggggctgggacagatacaacaggctctgtccagccccagattgtggccaattcccagggtgaggtcttgcctggtgccaagaataagatcagaggcaatcccactactgtgcctaattcaggggttgggccatatacaacagactctgcccggctccaggctgtggccaattctcagggtgaggtcttgcctggtgccaaaaataaggtcaaggccaatcttaatgctgtgtctaaggcagaagctgggatgggtgcaacaggctctgtccagccccaggctgtggctaattcccattgtgagaccttgcctggtgccaagaataaggtcaggggaaattggaatgctgtgtctaaggcaggggctgggatggatacaaggggctctgcccagccccaggctgtggccaattcccagggtgaagtcttgcctggtgccaagaataaggtcaagggcaatcccaatgtcgtgtctaaggcaggggccagagaagatacagtgggctctacccagcctcaggttttggccagctcccagcgtgagaccttgcctggtgccaggaataaggtcaagggcaattccaatgttgtgtctaaggcaggggccagagaagatacaatgggctctgcccagcctcaggttgtggccaactcccagcgtgagaccttgcctggtgccaggaataaggtcaagggcaattccaatgctatttctaaggcagaggctggggcaggcataatgggctctgtccaggtccaggttgtggccagttttcagggtgaggtcttgcctggggccaaaaataaggtcaggggcaattccaatgctgtgcctaaggcagaggctggggcagatacagtgggctctgcccagccccaagctgtcgctaattcccagagtgagaccttgcttggtgccaggaataaggtcaagggcaataccattgctgtgcctaaagcagggactggggcaggcacaaggcactctgcccagcctcagattgtggccggttcccagggtgagaccttgcctggggcaagggacaagtctatgtccacttctgaggcagaagccacagcagaagatgaggcctatgcaaagcctgaggctgaggccatgcccacttctgagagtgagggtgggtcaggcactcaagcctgcagaaagactcagcctaacatccatgactactactggaatgggattggtgttgaagactggattgctgctgagcggtggatcaaatttaggtttcagaccatggatggagactgggaaaatagcgtgtcctgggctgatgatgagaatgaagccagtattgggtcctggagtggggctagtgataaggctgggattattcggtcttgggctgtggcttgtgatgagaccagtgttaagtcctgggctggggccagggctgagaatgtggttggtattgggacttgggctagagctggggagcaggccagtggagggctctgggctgggggtcagactagtgaggggacctgggctggggacaaggccagtggaggagcctggactggggctgagaaccaggccagtggggggtcttgggctctcgctgggaatcaggccattggagagctttgggctgcgggtcaggccagtgatgggtcctggcctgggggacaggccagtggggtgtcctgggttggggaagaggccattggagggtcctggactggggctgagaaccaagccagtgaagggtcttgggctggagctggggctgggaatatgagtagtgtttcatactgggctggggttgtggatcaggccggtggagggtcctgggctgggactagtgatcaatctggtggtgggtccaagcctagatttgaggatcaagccagtggagaagggtcctgggctggggctggtggccaggctagtggagggtcaatgttggggcctgaggaccagtccagtggaaggtcttgggctgacactgcagaccaagccagtggagggtctaggctgggccacgtagatcagtccagtggtggggcctgggctgggacacttgatcagtctggtggtgggtccaagcctagatttgaaaatcagaccacagaagaagggtcttgggctggggctggtggccaggctggtggagggtccaaggtggggcctgaagaccagtccagtggaaggtcatgggctaactctggggaccaaatcagtggaggattcttagttgggattgtggaccaggccaatggagggtcctggactggggctgggcatccagctagtgttgggccaaagcctatatttgaggatcaggtcagtggcagagggtcctgggctgatgccagggagcaggttgttggagattctaggctggggcttagggaccagtctagtggagattcctgggctgacactggggaccaggccagtggatggttctgtgtttgccctgggagtcagacgaatggagggtcttggggtggggctagtggccaggatgttggagggtctaggccagggcccacgaaccagtccagtgctgggtcctgggatagccctgggagtcaggtcagtggaagctgctggactggggctggggctgtggatcaggctggtggttgttccaaacctggatttgaggatcaggccattggaggggggttctggcctggtgctggggaccagactggtggaggctccaggccagggtctgaggatcagtccagtggaataggttcctggggtgtggctggtggccaggtccttgggggagctaggccggggcctgcagaccagtccagtggtgggtcctgggctggcactgggaatcagtccagtggaaggtcctggattgggcctggggatcaggctgttgactgttccaagcctgaatttgaggatcaggcttgtggaggaggctcctgggctggtgctgggagccaagccagtggagaatcctgggctggatctaggcctgggaatgaggccattggaggatctaggatgggatctgaggaccaggccactggaggatcctgggctagatctgaggaccaggccagtggaaggttccaggtcagttttgaggtggaggccaatgaaggattctggtttgggcctggagctgaggccgttatagggtcttggtgctggacagaggaaaaagctgatattgtgtccaggcctgatgataaagatgaggccactactgcatccagatcaggggctggggaagaggccatgatttgttctaggattgaggctgagaacaaggctagtagtggctcctggattagatctgaggaggtggcttatatgggctcctgtgtaggggctgaggctggggctggggctgaggctggggctggggctgaggctggggctggggctggggctgaggctggggctgaggctggggctggggctggggctgggcctgggactgagtctggggctgggatttggtcctgggatggagatgcaaccactgtagagtctaggcttggggctggggaagaggctggtgtagagtcctggaccttggctaggaatgtgggagaggatgagctaagtagagagtccagccctgatattgaggagatcagtttaaggtctttgttttgggctgagagtgagaacagtaatacgttcagatctaagagtgggaaagatgccagttttgagtctggagctggggataacaccagcatcaaggataagtttgaggctgctggtggagttgatatagggtcttggttctgtgctggtaatgaaaacacaagtgaggacaaatctgcacctaaggctaaagccaaaaagtcatctgagtcaagaggcatatatccgtacatggtccctggggcaggaatggggtcatgggatggagccatgatctggtcggaaactaagtttgcacaccaaagtgaggccagcttcccagttgaagatgagtccagaaaacaaaccaggactggggaaaaaactcggccctggtcttgccgctgtaaacacgaagctaatatggatccacgagatcttgaaaaactcatttgcatgattgagatgactgaagatccttctgttcatgaaatagccaataatgctttatataacagtgctgattattcttattctcatgaagttgttcgtaatgtaggtggaatttcagttattgaaagcttgctcaataatccctaccccagtgttaggcagaaggctttaaatgcactgaataatatctcagtggctgctgaaaaccataggaaggttaaaacttacttaaaccaagtatgtgaagacactgtcacctatcccttgaattcaaatgtgcagttggctggactaaggttgataaggcatctgactattaccagtgaatatcagcatatggttacaaattatatttcagaatttcttcgtttgttaacggtgggaagtggagaaactaaagaccatgttttgggaatgcttttgaatttctctaaaaatccatctatgacaaaagacttgctcattgccaatgcaccaacatcactgattaacatttttagcaagaaagagacaaaggagaatattcttaatgctctttcactatttgaaaatataaattaccattttaaaagaagagcaaaagcatttacccaggacaaattcagtaaaaattccctttatttcctattccaacgacctaaagcatgtgccaagaaacttcgagccttagcagcagaatgcaatgaccctgagtgtttagaggcggcagaaactgctgcaggcaacagtgctcaaggaaagttttacaaaggagggggacccttaggtgttgatcccaagagcattccctag

SEQ ID NO: 153233 - DNA, 3571 bp, Homo sapiens
gtccacctccagaggcagctgtagtggcctttgagtggctgaagaccagcaccctcacaggcctacacccacaactaccactctctttaccccagcccgagtgcgctctaccataccttgttcgtgcttttagcaggggtgattacatgggccgcattcaggaagtgggctgggtgactgcaggactggtgatctgggctggcacctgctactacatttacaaatttaccaagggaagagcccagagtgtgaggactcttgccagaaatggatccacagttaagatggagactgtggttggggtacagagccagaccttggccataaatgaagcagagattaagactaaaccccaagtcgagattggagcagaaactggagcaagaagtgggcctagggctgaagtagagaccaaggccactgctatagccatacacagagccaactctcaggccaaggcaatggttggggcagagccagagactcaatctgagtccaaagtggtggctggaacactggtcatgacagaggcagtgactctgactgaggtcaaggccaaagccagggaagtggccatgaaagaagcagtgacccaaactgatgctgaggctggcaaaatagttaagaaagaagcagtgacacagaccaaggctaaagcttgggcgctggttgccaagacagaggccaagagagaagcaatgacccagaccaaagctgaaactcatatattggctgaaaaagagacagagattaacagagtaatggttacacagagtgagaccttggcagtacccagggaagtggccaagatgggggccacgaacaagactggaattgtggatgaaaccaagacaagagctctggaagagactgtgagtgtggctaagactcagtctgaggccaggcctggtgccacagttgatgctaggggaaatcccaatggcatgtccagggaggtggctggagtggacatgaagtcctgtgcacagtctcaggctgtgaccaagatccagggtgatgacatgcctggtactggggttgaggacatggggaattgtaaaaccatgtctagggcagagtctggggcagacacgagggcttctgctcagcctcaaatttttgccaaaacccagactgaggccattcctggggcaaagattgatgccgggggtaacaccaatgccatgtggaaaataccaatgtcatatctaaaggcaataactggagctgacatgagagctgctgctcagcctcaagctgttgccagtactcacgctgaggccatgtctgatgctaaggttaagaacagaggcaatcccaatgccatgactaaagcaggggccaaggcaaacttgagggccaattcccaggttgaggccttgcctgatgccagggataagagcagaggcaatcccaatgttatggctaaggtgggggatgggacagacatgttgtcctgtacacagcctcagcttgtggccagtgttcaggctgataccttgtctgatggcaaaattaaggtcaggggcaatgtcaattccatgcctaaggaaggagctggggtggatatgaaggctcaagatgataacagaagagtaagtcaggtagcctcagtgaagagtacagatggaaaaactgaggacagaacactgaggaagcctagtacatgtggggctttggcagagaatagcgcagaattgaaaccgaggttggaattgccatcaactattaaggcatgtgaagtcaccaccctgacacataaactctgggataattctgtgaaagcaggaacccttataactaaattatttctctccagtgctcagagcatgaaaattttctgctgtctttggaactttgtctacaaacagttagaagatgcagcccaagggctcaccatgggtggcgatgttgaagaacatgagtctaggcttggggctggggaagaggctggtgtagagtcctggaccttggctaggaatgtgggagaggatgagctaagtagagagtccagccctgatattgaggagatcagtttaaggtctttgttttgggctgagagtgagaacagtaatacgttcagatctaagagtgggaaagatgccagttttgagtctggagctggggataacaccagcatcaaggataagtttgaggctgctggtggagttgatatagggtcttggttctgtgctggtaatgaaaacacaagtgaggacaaatctgcacctaaggctaaagccaaaaagtcatctgagtcaagaggcatatatccgtacatggtccctggggcaggaatggggtcatgggatggagccatgatctggtcggaaactaagtttgcacaccaaagtgaggccagcttcccagttgaagatgagtccagaaaacaaaccaggactggggaaaaaactcggccctggtcttgccgctgtaaacacgaagctaatatggatccacgagatcttgaaaaactcatttgcatgattgagatgactgaagatccttctgttcatgaaatagccaataatgctttatataacagtgctgattattcttattctcatgaagttgttcgtaatgtaggtggaatttcagttattgaaagcttgctcaataatccctaccccagtgttaggcagaaggctttaaatgcactgaataatatctcagtgggctgctgaaaaccataggaaggttaaaacttacttaaaccaagtatgtgaagacactgtcacctatcccttgaattcaaatgtgcagttggctggactaaggttgataaggcatctgactattaccagtggaatatcagcatatgggttacaaattattatttcaggatttcttcgtttgttaacggtggggaagtgggagaaacttaaaggaccctgtttttggggatgcttttgaatttctctaaaaatccatctatgacaaaagaatttgctcattgccaatgcaccaacattacctgggtaacatttttagcaagaaagagacaaaggagaatattcttaatgctctttcactatttgaaaatataaattaccattttaaaagaagagcaaaagcatttaccccagggacaaattcagtaaaaattccctttatttcctattccaacgacctaaagcatgtgccaagaaacttcgagccttagcagcagaatgcaatgaccctgaggtgaaagagagagttgagctattaataagtaaactctgattggctgtatgttcccaaacaaatttgagtaatattttggttttgcactctggaagtaatgcacattgtaaattgcattataactttgaaactgatgttacctatgatggtctatagctggaaccatttaatggaacaccaaatgaattcaagcttgtactaaaaatacatgtgttgatttttatcttgtctggattgagatatttttagtatgcttcatgagcagaaactgaatggattcttcataagtaaggtaatctttggtcctttgtgtggacttatgtttatacatttaagactatttttatgtcatcaataaagttgtgtgttttaagcagcagaaaaa

SEQ ID NO: 153234 - DNA, 757 bp, Homo sapiens
  misc_feature (1)...(757): n = a,t,c or g
aattattttctttccctgaggtttgattggcacagcagcaaaagttgaggccaccccacttgtgtccactgtttttagaaaaaaatgaatggcttcctgccattgtggggctggactcttgggctttcttggtgggagcggagaaggggcctcccacccttgtccgagttgcctcccactggaggtcaggagtctacactgcagcctcgggcactgtggggagtgcatgcctggggcctctgggtggggaccatggacaggccctggtcactgtcctaacctttgtcaggacaaaggtagcaagaggatttcctggcgggtgggaaggaatggctgggggcggccaagttttgacaacgccccagttgccctggangaaacaaccagggtcaatctgcacttgatgactgctccccgacccacagcccggacacctcatttccctcccactacagggatcaagtgacctgggaagaaccgagtttaacaccaggatgtgtttccttagatgtcctgtcctaggcgagtttccagggagagccctgattggacaatcacatcacagatcacactgcagtttccatgttagcactgtggatgggtttttaatcaataaaaactgggggtttcttctcaccgactctccactggcccaaactgccaaaagctggtgattctgggacaggccttcactttggagcacgggatggggtgggggagcccatgggctgggaaggagggtgctgtggagggggct

SEQ ID NO: 153235 - DNA, 1206 bp, Homo sapiens
ggcacgagcagctcagctcttcagttggtgatcattggctattggtctccaaacagtaaaccagtatttcacactgagattgtcggctgcgggtatattccaattccccgtctcctcatgatatactatgggaagggctctgaccctggaagtggttctaagcagggcaaaatggggtctctggaagtgcggagcgctgcctaagctgtttgctgattccgcttgcactttggagtataatcgagaacatattattgtatatcccgaatgggcacactttctatgcatccagcaataaactcaccaactacgtgtggtattctgaaagaatctgactctcaggcatcatggatgcttatagtaacaacagttcttctggtactggagaataataacaactataaatgtttgccagagtgaaaactgcagcaaaaaatatgtgacactgctgtcaattatcttttcttccctcggaattgctttttctggatactgcctgggtcatctctgccttggggtcttgtccctgagccatatgcccgcacccttgatgggctggggagtatgcttttgaagggcactgctgggacgtttccttacagattctaggcatatgggattcagtgcctgggaacctggcacatgttgtggagtggaacatcattttattttccattctcataaccctcagtggggcttcaagtgatcatctgcctcatcagagtagtcatgcaactatccaagatactgtgtggaagctattcagtgatcttccagcctggaatcatttgaataaggacataaatgttttccattatcaagacatgggcatctatctaaatattatatcaactgtgtggacttgatggcaatattgaattgatggtgctttctgcatttgggtgtttatttgtaaaaaatttgcagtcctcactgcacatgcaaggtatacccaccccttcccatttaggtatggttttttaagtaatatgcatcagaaacttcagaaatacttctgccctttgatcaaacaaatcccatttcccaagaatctgtactagggaagtaaataagaatatgagagaaacctttatgcaaatatgtatattgcaacattatttaatattctggaaaattggaaacaccccaaaattctaaactcagaggaaggattaagtaaagagtggtacatactgtaaatgtttt

SEQ ID NO: 153236 - DNA, 3285 bp, Homo sapiens
atggtctggcgggtgccccctttcttgctccccatcctcttcttggcttctcatgtgggcgcggcggtggacctgacgctgctggccaacctgcggctcacggacccccagcgcttcttcctgacttgcgtgtctggggaggccggggcggggaggggctcggacgcctggggcccgcccctgctgctggagaaggacgaccgtatcgtgcgcaccccgcccgggccacccctgcgcctggcgcgcaacggttcgcaccaggtcacgcttcgcggcttctccaagccctcggacctcgtgggcgtcttctcctgcgtgggcggtgctggggcgcggcgcacgcgcgtcatctacgtgcacaacagccctggagcccacctgcttccagacaaggtcacacacactgtgaacaaaggtgacaccgctgtactttctgcacgtgtgcacaaggagaagcagacagacgtgatctggaagagcaacggatcctacttctacaccctggactggcatgaagcccaggatgggcggttcctgctgcagctcccaaatgtgcagccaccatcgagcggcatctacagtgccacttacctggaagccagccccctgggcagcgccttctttcggctcatcgtgcgggcctgcagagagggccgttttgggcagagctgccaggagcagtgcccaggcatatcaggctgccggggcctcaccttctgcctcccagacccctatggctgctcttgtggatctggctggagaggaagccagtgccaagaagcttgtgcccctggtcattttggggctgattgccgactccagtgccagtgtcagaatggtggcacttgtgaccggttcagtggttgtgtctgcccctctgggtggcatggagtgcactgtgagaagtcagaccggatcccccagatcctcaacatggcctcagaactggagttcaacttagagacgatgccccggatcaactgtgcagctgcagggaaccccttccccgtgcggggcagcatagagctacgcaagccagacggcactgtgctcctgtccaccaaggccattgtggagccagagaagaccacagctgagttcgaggtgccccgcttggttcttgcggacagtgggttctgggagtgccgtgtgtccacatctggcggccaagacagccggcgcttcaaggtcaatgtgaaagtgccccccgtgcccctggctgcacctcggctcctgaccaagcagagccgccagcttgtggtctccccgctggtctcgttctctggggatggacccatctccactgtccgcctgcactaccggccccaggacagtaccatggactggtcgaccattgtggtggaccccagtgagaacgtgacgttaatgaacctgaggccaaagacaggatacagtgttcgtgtgcagctgagccggccaggggaaggaggagagggggcctgggggcctcccaccctcatgaccacagactgtcctgagcctttgttgcagccgtggttggagggctggcatgtggaaggcactgaccggctgcgagtgagctggtccttgcccttggtgcccgggccactggtgggcgacggtttcctgctgcgcctgtgggacgggacacgggggcaggagcggcgggagaacgtctcatccccccaggcccgcactgccctcctgacgggactcacgcctggcacccactaccagctggatgtgcagctctaccactgcaccctcctgggcccggcctcgccccctgcacacgtgcttctgccccccagtgggcctccagccccccgacacctccacgcccaggccctctcagactccgagatccagctgacatggaagcacccggaggctctgcctgggccaatatccaagtacgttgtggaggtgcaggtggctgggggtgcaggagacccactgtggatagacgtggacaggcctgaggagacaagcaccatcatccgtggcctcaacgccagcacgcgctacctcttccgcatgcgggccagcattcaggggctcggggactggagcaacacagtagaagagtccaccctgggcaacgggctgcaggctgagggcccagtccaagagagccgggcagctgaagagggcctggatcagcagctgatcctggcggtggtgggctccgtgtctgccacctgcctcaccatcctggccgcccttttaaccctggtgtgcatccgcagaagctgcctgcatcggagacgcaccttcacctaccagtcaggctcgggcgaggagaccatcctgcagttcagctcagggaccttgacacttacccggcggccaaaactgcagcccgagcccctgagctacccagtgctagagtgggaggacatcacctttgaggacctcatcggggaggggaacttcggccaggtcatccgggccatgatcaagaaggacgggctgaagatgaacgcagccatcaaaatgctgaaagagtatgcctctgaaaatgaccatcgtgactttgcgggagaactggaagttctgtgcaaattggggcatcaccccaacatcatcaacctcctgggggcctgtaagaaccgaggttacttgtatatcgctattgaatatgccccctacgggaacctgctagattttctgcggaaaagccgggtcctagagactgacccagcttttgctcgagagcatgggacagcctctacccttagctcccggcagctgctgcgtttcgccagtgatgcggccaatggcatgcagtacctgagtgagaagcagttcatccacagggacctggctgcccggaatgtgctggtcggagagaacctagcctccaagattgcagacttcggcctttctcggggagaggaggtttatgtgaagaagacgatggggcgtctccctgtgcgctggatggccattgagtccctgaactacagtgtctataccaccaagagtgatgtctggtcctttggagtccttctttgggagatagtgagccttggaggtacaccctactgtggcatgacctgtgccgagctctatgaaaagctgccccaggctgaccgcatggagcagcctcgaaactgtgacgatgaagtgtacgagctgatgcgtcagtgctggcgggaccgtccctatgagcgacccccctttgcccagattgcgctacagctaggccgcatgctggaagccaggaaggcctatgtgaacatgtcgctgtttgagaacttcacttacgcgggcattgatgccacagctgaggaggcctga

SEQ ID NO: 153237 - DNA, 564 bp, Homo sapiens
cccacgcgtccgcccacgcgtccgcccacgcgtccgcttccttcatgtggcccaagtgatttcctgacagtcctggcactgggatctttcacctctccctctgtgtaaccccatggtggcctctgggttccctgacccaggtgtccccacaatctgcccctctcactgtgtccagggctgcaggctgagggcccagtccaagagagccgggcagctgaagagggcctggatcagcagctgatcctggcggtggtgggctccgtgtctgccacctgcctcaccatcctggccgcccttttaaccctggtgtgcatccgcagaagctgcctgcatcggagacgcaccttcacctaccagtcaggctcggccttcctgggctcgggagccagcctctgtctgcacacatctttggctgatgttcttagccctgctgtggccacctgccagtaggccagtcatgctgtcctgtctcctctgagggcttcttcattgtcgtcacttaggatctgaactctgtccttggccttccaggcctggactcttgatatttagagctaagctttg

SEQ ID NO: 153238 - DNA, 3966 bp, Homo sapiens
tttcgtctgaccccaggcccagctcgttctggctggtttgggtcggcctctggagtatggtctggcgggtgccccctttcttgctccccatcctcttcttggcttctcatgtgggcgcggcggtggacctgacgctgctggccaacctgcggctcacggacccccagcgcttcttcctgacttgcgtgtctggggaggccggggcggggaggggctcggacgcctggggcccgcccctgctgctggagaaggacgaccgtatcgtgcgcaccccgcccgggccacccctgcgcctggcgcgcaacggttcgcaccaggtcacgcttcgcggcttctccaagccctcggacctcgtgggcgtcttctcctgcgtgggcggtgctggggcgcggcgcacgcgcgtcatctacgtgcacaacagccctggagcccacctgcttccagacaaggtcacacacactgtgaacaaaggtgacaccgctgtactttctgcacgtgtgcacaaggagaagcagacagacgtgatctggaagagcaacggatcctacttctacaccctggactggcatgaagcccaggatgggcggttcctgctgcagctcccaaatgtgcagccaccatcgagcggcatctacagtgccacttacctggaagccagccccctgggcagcgccttctttcggctcatcgtgcggggttgtggggctgggcgctgggggccaggctgtaccaaggagtgcccaggttgcctacatggaggtgtctgccacgaccatgacggcgaatgtgtatgcccccctggcttcactggcacccgctgtgaacaggcctgcagagagggccgttttgggcagagctgccaggagcagtgcccaggcatatcaggctgccggggcctcaccttctgcctcccagacccctatggctgctcttgtggatctggctggagaggaagccagtgccaagaagcttgtgcccctggtcattttggggctgattgccgactccagtgccagtgtcagaatggtggcacttgtgaccggttcagtggttgtgtctgcccctctgggtggcatggagtgcactgtgagaagtcagaccggatcccccagatcctcaacatggcctcagaactggagttcaacttagagacgatgccccggatcaactgtgcagctgcagggaaccccttccccgtgcggggcagcatagagctacgcaagccagacggcactgtgctcctgtccaccaaggccattgtggagccagagaagaccacagctgagttcgaggtgccccgcttggttcttgcggacagtgggttctgggagtgccgtgtgtccacatctggcggccaagacagccggcgcttcaaggtcaatgtgaaagtgccccccgtgcccctggctgcacctcggctcctgaccaagcagagccgccagcttgtggtctccccgctggtctcgttctctggggatggacccatctccactgtccgcctgcactaccggccccaggacagtaccatggactggtcgaccattgtggtggaccccagtgagaacgtgacgttaatgaacctgaggccaaagacaggatacagtgttcgtgtgcagctgagccggccaggggaaggaggagagggggcctgggggcctcccaccctcatgaccacagactgtcctgagcctttgttgcagccgtggttggagggctggcatgtggaaggcactgaccggctgcgagtgagctggtccttgcccttggtgcccgggccactggtgggcgacggtttcctgctgcgcctgtgggacgggacacgggggcaggagcggcgggagaacgtctcatccccccaggcccgcactgccctcctgacgggactcacgcctggcacccactaccagctggatgtgcagctctaccactgcaccctcctgggcccggcctcgccccctgcacacgtgcttctgccccccagtgggcctccagccccccgacacctccacgcccaggccctctcagactccgagatccagctgacatggaagcacccggaggctctgcctgggccaatatccaagtacgttgtggaggtgcaggtggctgggggtgcaggagacccactgtggatagacgtggacaggcctgaggagacaagcaccatcatccgtggcctcaacgccagcacgcgctacctcttccgcatgcgggccagcattcaggggctcggggactggagcaacacagtagaagagtccaccctgggcaacgggctgcaggctgagggcccagtccaagagagccgggcagctgaagagggcctggatcagcagctgatcctggcggtggtgggctccgtgtctgccacctgcctcaccatcctggccgcccttttaaccctggtgtgcatccgcagaagctgcctgcatcggagacgcaccttcacctaccagtcagggctcgggcgaggagaccatcctgcagttcagctcagggaccttgacacttacccggcggccaaaactgcagcccgagcccctgagctacccagtgctagagtgggaggacatcacctttgagggacctcatcggggaggggaatttcggccaggtcatccgggccatgatcaagaaggacgggctgaagatgaacgcagccatcaaaatgctgaaagagtatgcctctgaaaatgaccatcgtgactttgcgggagaactgggaagttctcgtgcaaattggggcatcaccccaacatcatcaacctcctgggggcctgtaagaaccgaggttacttgtatatcgctattgaatatgccccctacgggaacctgctagatattctgcggaaaagccgggtcctagagactgacccagcttttgctcgagagcatgggacagcctctacccttaggctcccaggcagctgctgcgttttcgccagtgatgcgggccaatggcatggcagttacctggagtgaggaaggcagttcattccacaggggacctggggcttgcccgggaatgttgctggtcgggagagaacctgggcctccaagatttgcagactttcggccttttttcgggggagaggaggtttatgtgaagaagacgatggggcgtctccctgtagcgctggatggccattgagttccctggaactacagtgtctataccaccaagagtgatgtctggtcctttggagtccttctttgggaggatagtgagcttggagggtacaccctaactgtggcatgacttgtgccgaggctcttatgaaaagcttgccccaagggctacccgcatggaagcaagcctcgaaactggtgacgatgaagtgtacgagctgaatgcgtcagtgctggccgggaccgtccctatgagcgaccccccttttgcccagattgcgctaacagctaggcccgcatgctgggaagccagggaaggccctatgtgaaaccatgtcgctgtttgaaaaactttcacttacgcgggcaattgaatgcccacagctgaggaaggccctgaagctgcccatcccagcccagaaccttgggttctgctggccgggagcaaaactctgctgtcctaaacctgtgacccagtcttgaccccttacaggcctcttgacttaagctgcctcaaaggaatttttttttaacttaagggagaaaaaaagggatactggggatggggtgggcttaaggggaactgggttcccatgactttgtaggtgtctcatagctatccctgggcatccttctttcctagttcatgctgccccacagggtgtgtttcccatcccactggcttcccccaacacaaacccccactccagctccttcgcttaaagccagcactcactccacttaacatgccctgttcagctactcccactcccggcctgtcattcagaaaaaaataaatgttctaataagactccaaaaaaaaaaaaaaaaaaagat

SEQ ID NO: 153239 - DNA, 508 bp, Homo sapiens
  misc_feature (1)...(508): n = a,t,c or g
agctctcgaggctcctcccgctgcgggtcggcgctcgccctcgctctcctcgccctccgccccggccccggccccgcgcccgccatggagaagactgagctgatccgcaggtccgcctggagggtcatctctagcatcgagcagaagaccgacacctccgacaagaagttgcagctgattaaggactatcgggagaaagtggagtccgagctgagatccatctgcaccacggtgctggaattgttggataaatatttaatagccaatgcaactaatccagagagtaaggtcttctatctgaaaatgaagggtgattacttccggtaccttgctgaagttgcgtgtggtgatgatcgaaaacaaacgatagataattcccaaggagcttaccaagaggcatttgatataagcaagaaagagatgcaacccacacacccaatccgcctggggcttgctcttaactnttctgtattntactatgagattcttaataacccagagcttgcct

SEQ ID NO: 153240 - DNA, 2335 bp, Homo sapiens
aaagccaaaagcagatcaaaagaggtgggactcgcgtcgcggccgcggagacgtggaagctctcgaggctcctcccgctgcgggtcggcgctcgccctcgctctcctcgccctccgccccggccccggccccggccccgcgcccgccatggagaagactgagctgatccagaaggccaagctggccgagcaggccgagtcgcatacgacgacatggccacctgcatgaaggcagtgaccgagcagggcgcccgagcttgtccaacgaggagcgcaacctgctctccggtggcctacaagaacgtggtcgggggccgcaggtccgccttggagggtcatctctaagcatccgagcagaaagaccgacacctccgacaaagaagttgcagctgattaaggactatcgggagaaagtggatttccgaagctgagatccatctggcaccacggtgctgggaatttgtttggataaatattttaattagccaatggcaacttaattccagagagtaagggtcttctatcttgaaaatgaaggggtgatttactttccgggtacctttgcctggaagttgcctgttgttgatgatcgaaaaacaaacgatagataattacccaaggagcttaccaagaggcattttgatataagcaagaaaagagatgcaacccacacaacccaatccgccttggggctttgctcttaactttttctgtattttactatgagattccttaataacccagaagcttgcctgcacgcctggctaaaaacggctttttgatggagggccattgcctgacttgatacactgaatgaaagactcatacaaagacagcacccctcatcatgcagttgctaagagacaaccctaccactttggacatcagacagtgcaggagaagaatgtgatgcggcagaaggggctgaaaactaaatccatacagggtgtcatccttctttccttcaagaaacctttttacacatctccattccttattccacttggatttcctatagcaaagaaacccattcatgtgtatggaatcaactgtttatagtcttttcacactgcagctttgggaaaacttcattccttgatttgtgtttgtcttggcttcctgggtgtccagtactgctgtagaaaagtattaatagcttcatttcatataacataaagtaactccaaaccacttatggaagaggactaaaaatgtatctggtatttaagtaatctgaaccagttctgcaagtgactgtgttttgtattactgtgaaaataagaaaatgtagttaattacaatttaaagagtattccacataacttcttaatttctacattccctcccttacttctacggggatttcatttaagatagcaacgtttcccatgctctaaatgaattcctattctagtaggaatccgggaggtattagattggaatggaaaggcacttgcccatctctggtctagggggtcaccaaatgaaaatggcctccgtaatcacaatacggaaggtcttgtgtaacctgtggccaaccagggagtttccttaattaactctttattttgctgctggtttaagttgacaacccacccttctcaaataaaaaatacactatacacctacctgccattagtagtttctggtattccactttactatgtgatagaagtagcatgttgctgccagaatacaagcattgctttgggccaaattaaagtgcatgtcatttctttaatacactcgtaaggggagattaaattaaggtacacaaggtcccaaggtctaaaacctttagtactttttccatgtcggatttgttcacatgtgagagggatgtcccagttttttctagtgattgttatttagagagttggaccactattgtgtgttgctaatccattgactgtagtcccgaaaaaaagccttgtgaaaatgttatgccctatgtaacaggcaggagtaacataaaataaaagtacattttataaacccatttactatggctttggtaacaaattgccatacccatattttaagggacaggtgaaatttactactttctaaagtttattgatacttcccttttatgtaaaatgtagtagtgatacctatatttaccacattgtgcattgtgacacactttgtctagggatgcctggaagtgtataaaattggactgcatttcttagagtgttttactatagatcagtctcatgggccatctcttcctcagatgtaaatgatatctggttaagtgttatatggccataaagtggacattttaaaactagcaaagttaaaaaaaaaaaaaaaaaaaaaaggcggccgct

SEQ ID NO: 153241 - DNA, 363 bp, Homo sapiens
  misc_feature (1)...(363): n = a,t,c or g
cataaaactgatgaccgtcatcatactgttgcagttagcacactttctcctgacataagtgcacagagcttcagtgtccaccaactgaccatgaaatagagtatgctgtaatcttaaggcataggttattagtgggaagagagtaataggttgctagtgtctgattatatggtagaaataatgcaaggaaaaaggtagccaccttctccattgaacagcagtacctgctgtttagcaaagactgatgagaagtagacnnnnnnnnnnnggnnnnnnnnnnnnnnnnnnnnnnnnnnnnnnnnnnnnnnnnnnnnnnnnnnnnnnnnnnnnnnnnnnnnnnnnnnnnnnnnnnnnnnnnccttg

SEQ ID NO: 153242 - DNA, 2904 bp, Homo sapiens
  misc_feature (1)...(2904): n = a,t,c or g
cagggacccttgaaattcatggatgcgggcatagaggttctctcaggatgagtggaaatgcctggaccctgcgcagaggactttatacagggacgtgatgttggagaattataggaacctggtctccctgggaatctgtcttcctgacctgagtgttacctccatgatagagcaaaagagagatccctggactctgcagagtgaagagaaaatagcaaacgatccagacggcagggagtgcatcaaaggtgtgaacacagagaggagctctaaattgggaagtaatgcaggaaacaagccttgtaaaaatcaacttggattcacttttcagttacatctgagtgatctacagctatttcaagctgaaaggaaaatttctgggtgtaagcattttgaaaaacccgtcagtgacaattcctcagtttcaccgcttgaaaaaatttcttccagtgtcaaatcccaccttttaaataaatatagaaataattttgatcatgctccattacttccacaagaacagaaagcacacattagggaaaaagcttataaatgtaatgagcacggccaagtctttagagcatctgcaagccttactaaccaagtaatccataacgcagataatccttacaaatgcagtgaatgtggcaaggtctttagttgcagttcaaagcttgtgatacatcgaagaatgcatactggagagaagccttacaaatgtcatgaatgtggcaagctcttcagtagcaattcaaacctttcacaacatcaaagaattcatactggagagaagccttacaaatgtcatgaatgtgacaaggtctttcgaagcagttcaaagcttgcacaacatcaaagaattcatactggagagaagccttacaaatgtcatgaatgtgacaaggtcttcaatcaaattgcacaccttgtacgacatcaaaaaattcatactggagagaaaccttacagttgtaataaatgtggcaaggtctttagtcgccattcatatctagcagaacatcaaacggttcatactggtgagaaaccttacaaatgtgaagaatgtggcaaagcattttcagtgcgttccagcctcataacccatcagttaattcacactggaaggaaaccttacaaatgtaaagaatgtgacaaggtctttgggcgcaagtgtttcctgacctctcatcagagaattcatactagagagagaccttatggatgcagtcagtgtggcaagatctttagtcagaaatcagacctttatacgacatcgaaaaactcatactgatgagaagccttacaatggtaataaatgtggcacagcgtttagagagttttcagaccttactgcccattttctaatccatagtggagagaaaccttatgaatgtaaagaatgtggcaaagtcttcaggtacaagtcttctctaaccagtcatcatagaattcatactgggagagaagccttaccaaatggtaacagatgtggcaaggtcttcagtcgcagttcaaacctggtatgccatcagaaaattcatacaggagaaaagccttacaaatgtaatcaatgtggcaaggtctttaatcaagcatcataccttacaagacatcaaataattcatactggagagaggccttacagatgtagtaaatgtggcaaagcatttcgagggtgttcaggccttactgcccatcttgcaatccatactgaaaagaaatctcatgagtgtaaagaatgtggcaagatcttcactcagaagtcttccctcaccaatcaccatagaattcacattggagagaaaccttacaaatgcaccctgtgcagttaaggtctttcagtcacaattctgaccttgcacagcttcagagggttccatcatgagggtccctacaaactgtgtatggcaaaaccatcatcatgagttctagcattaatcaacatcagtgagtccatactaagtggaaatcatataaatgaaatgtatgtgacacaggctttatcaaggcctgccaaatcactggacatcaccacatcactgtggaggatgaaagcacacagatgaattgtgtgtacttgggctattattcaaggaccattgctatagaacacgataggatttacacaagaagtaactctgtctctggttctctgatactaatctatgatattgcatgatgcagaataatgctaagtcaaaatatgttgaatctcatgacctgatgtatatcaaaggtgcaacggcttgtaaatgaccagttttattcaggctataaagcattcaattatttggggcttatagaaaaggctactttactctttgtgacttcgaaatcttttcatgtgccttccatacaggccattcactgtggtccctgggaaagaatcagtaggatgacagggctgacttcattagctgaggattatttctatccaatttcctgatgaaggacattgccttttgagattaaatattgtctgatttaaagagcatggaggtgggcagagtaacataaaactgatgatcgtcatcatactgttgcagttagcacactttctcctgacataagtgcacagagcttcagtgtccaccaactgaccatgaaatagagtatgctgtaatcttaaggcataggttattagtgggaagagagtaataggttgctagtgtctgattatatggtagaaataatgcaaggaaaaaggtagccaccttctccattgaacagcagtacctgctgtttagcaaagactgatgagaagtagacnnnnnnnnnnnggaaaaaaaagtttaatttttttccccagcctgaagttaaggggggtgttttgggttaattgccccttccccttcttggcttaagccgccctttttgcttaaccctcttaggaagctggaacactac

SEQ ID NO: 153243 - DNA, 423 bp, Homo sapiens
tggtgttcagttgtggcggttgctggtcagtaacagtcaagatgctgcggaatctgctggctcttcgtcagattgggcagaggacgataagcactgcttcccgcaggcattttaaaaataaagttccggagaagcaaaaactgttccaggaacagcatatgccatatatgagctggctgtggcttcatttcccaagaagcaggagtgacttcagtcatcccagcaatcgcttggttcagtttcattcagctctctatggaccagtaatctgataaataaccgagctcttctttggggatcaatatttattgacttggagtaactgccaccaataaagcagtctttaccatgatcaaaacactttacctgcgaggtaagggttcatcgtcgcaaataatttctcccctctctaacacatcctgc

SEQ ID NO: 153244 - DNA, 693 bp, Homo sapiens
  misc_feature (1)...(693): n = a,t,c or g
atggatgaatgtagaaaaaaggagcgcaagcctctcttcggcccggaaagatttaagttcgtgaatgcatacgcaagactcggaggtagttccggttccggcgtggccattttcgttggtggtgttcagttgtggcggttgctggtcagtaacagccaagatgctgcggaatctgctggccgttactgggtagatgtaaggagtggagaggctggggaagtgaccagagactcgtgggctcttcgtccagacttgggccagaggaccgattaagccactgcttccccgcagggcatttttaaaaataaagttcccggagaagccaaaaactgttccccggaggatgatgaaattcccactgtatctaaagggtggggtaggctgatgccctcctgtatagagccaccnaccatgattcttacagttgggtggaacaagcatatgcccatattatgagctggctgtggcttcattttcccaagaaagcagggagttgacttcaggtcatccccagcaattcgctttggtttcagttttcatttcagctcttctatgggaccaagtaaatcctggataaaataaccggagctccttcctttgggggatccaataatttaatttggacttggtagtaacttgccacccaataaaagcagtctttaccatgaaaaaaaaaaagaaaaaagtcgacgc

SEQ ID NO: 153245 - DNA, 769 bp, Homo sapiens
  misc_feature (1)...(769): n = a,t,c or g
gggaaaagggaaggggctccattgagaacccatcccggttacccccgatcaccgcttggtcaccatgacccacattgttgcaaaccttctctcctgtcaacagcggcccaggcttcccaactacgagatgctcaaggaggagcaggaagtggctaagcctgggggcgccccaaaaaccgtgcttacccgaatgtccacctgtgatccactatccgcaacgagaacctcgtggcctgaccatgttcgtctggtccctgttcaaacaccctcttcatgaacacctgcttngcctgggcttcataagattcgccctactccgtgaaaagtctaagggacaggaaagatggttggcgaagtgaaccggggccccaaggcctaatgcctccaccgccaaagtgcctgaaaaatctggggccctgattttggggcatcttcatgaaccaattcttgctcatcaatcatccccccccaagttttgggtcgtcccaggcccagcgatagaatagagaggcatcattgaaggccaggagctctgcccgtgacctgtaatcccacgtactctaatcttccattcctcgccctgcccccagaggccaggaagttctgcccttgacctgtattccacttactccaccttccattcctcgccctgtccccacagccgagtcctgcatcagccctttatcctcacacgcttttctacaatggcattcaataaagtgtatatgtttctggtaaaaaaaaaaaaaaaaaaaaaaaaaaaagtttt

SEQ ID NO: 153246 - DNA, 2732 bp, Homo sapiens
ggcacgaggccagacactgggtcatggcagtggtcggtgaagctgcagttgcctagggcagggatggagagagagtctgggcatgaggagagggtctcgggatgtttggctggactagattttacagaaagccttatccaggcttttaaaattactctttccagacttcatctgagactccttcttcagccaacattccttagccctgaatacatttcctatcctcatctttcccttcttttttttcctttcttttacatgtttaaatttaaaccattcttcgtgaccccttttcttgggagattcatggcaagaacgagaagaatgatggtgcttgttaggggatgtcctgtctctctgaactttggggtcctatgcattaaataattttccctggacgagctcaagtgctccctctgggtctacaatccctggcggctggccttcatcccttgggcaagcattgcatacagctcatggccctccctctaccataccctccacccccgttcgcctaagctcccttctccgggaatttcatcatttcctagaacaagcccagaacatttggtggtctatttctctgttagtgtttaaccaaccatctgttctaaaagaagggctgaacttgattggaagggaatgcttgttagccctgagactcaggaagacaacgttcttgcagggtcactccctggcttctggaggaaagagaaggagggcagtgctccagtggtacagaagtgagacataatggaatcaggcttcacctccaaggacacctatctaagccattttaaccctcgggattacctagaaaaatattacaagtttggttctagggcactctgcagaaagccagattcttaagcaccttcttgaaaaatcttttcaaggatattctgcctaggacggtgttgaaggggagacctgcttgatttgacatcggcttctgggccccacttatcttatccagctcctcttcttgctttgtggaatccttttaagggaggatcgttcgttcactggactacttcaggacccaggaacctggcagggagcttgggaggaagtgggcttgaaggaaaggaggccagaggcctttttgactgggtccccccaatggtgacccctatgtgtttgaatcttgaaagggaaacagaagtcaaaggtcccagaagaaggaggaagaagttgaaaacaggcggtcaaagcaaggtgcctgaaaatgtgaatgtgaactcaaaagccaagccacttgggggccgtcccccttaccccccggctgaactgccgtgcctcaagcacacttgtgtttgggatgcccgccttgccccagacctccccaacctacttgcaagggcgcctcaggaacgctcggccagccctacctgaaacccagggggccttccctggtgatcatggatgcggctcaagagcagcctacctacatgattggtgagcagaagttctcccagcctcccccctgggccgggaggcagtaaaggcttgctgtgaaagaggctggctacacaatcgaatggtttgaggtgatctcgcaaagttattcttccaccatggccaacaaccgaaggacttttctccctggtggcgaggaagctgagcagacccctgtgatgcctgtgaccatcaattaaagcaattcctttgacctgtccagatgactttagtccttgtttctaactgccaagtcatgtgctgaagtagaggcctcagtgggtggggcccaatggttcatctaggacgggactagagaggtcagtctacaagcaatccattgaccacttacttggtgctgcacacaaatgttggtgctatgggacccaaagatgagcaattagtattccagtcttcattgcctgtgcttacaaaagaagacctcacttggctaaacatctagttatggcgggtcaagcccgtacctgcctacagagaagggtctgcagttactcactattagtttcctaagggggcactgctggctccttctctcccaggaaagggcttctcctattctttaactcttgccttctccctggagaggctaccaaaccctggcctctgccgctgttcaggctgccatgtgggtatagctgtttgctagactccactctggcctcaggggccagagaacagctgtccagcatttctgttcatcccagcaatccaaaaaaaaatttttttaagctacaaagatcactccattttcaaattcagactctgccacttattagctgtttctcattaggcaagttatataaccttgcagtgcctcactttcctcatctataaaatgagattaaaatagtctttttattaagagaattaaagtgaattgtgggccagggcactgtgggcttcatgcctgtaaatcccagcgctttggggaggctgaggcaggacaggatttgcttggggcttcaggaagtttcgagactggcctggggggaacatggcaaaaaccctgttcttgttatttaaaaaatacaaaaaaattagctaggtgtggcggcatatgcctgtggtcgcgcgagctactcaggaggctgaagtgggaggatggcttgagcccgggaggcggaggttgcaatgaactgagatcgcaccactgtgttccagacagagtgcgatgctgtctcgaaaaaagtaaaataataaataaataataaataaaataaaataaagtgaattgttacatgtaaaggaaaaaa

SEQ ID NO: 153247 - DNA, 1540 bp, Homo sapiens
atggagaatcctattgtaaaatcacttgctaaggctcgtgagaggctagaagattccaaactagaagctgtcagtgacaataacttggaattagtcaatgaaattcttgaagacatcactcctctaataaatgtggatgaaaatgtggcagaattggttggtatactcaaagaacctcacttccagtcactgttggaggcccatgatattgtggcatcaaagtgttatgattcacctccatcaagcccagaaatgaataattcttctatcaataatcagttattaccagtagatgccattcgtattcttggtattcacaaaagagctggggaaccactgggtgtgacatttagggttgaaaataatgatctggtaattgcccgaatcctccatgggggaatgatagatcgacaaggtctacttcatgtgggagatataattaaagaagtcaatggccatgaggttggaaataatccaaaggaattacaagaattactgaaaaatattagtggaagtgtcaccctaaaaatcttaccaagttatagagataccattactcctcaacaggtatttgtgaagtgtcattttgattataatccatacaatgacaacctaataccttgcaaagaagcaggattgaagttttccaaaggagagattcttcagattgtaaatagagaagatccaaattggtggcaggctagccatgtaaaagagggaggaagcgctggtctcattccaagccagttcctggaagagaagagaaaggcatttgttagaagagactgggacaattcaggacctttttgtggaactataagtagcaaaaaaaagaaaaagatgatgtatctcacaaccagaaatgcagaatttgatcgtcatgaaatccagatatatgaggaggtagccaaaatgcctcccttccagagaaaaacattagtattgataggagctcaaggtgtaggccgaagaagcttgaaaaacaggttcatagtattgaatcccactagatttggaactacggtgccatttacttcacggaaaccaagggaagatgaaaaagatggccaggcatataagtttgtgtcacgatctgagatggaagcagatattaaagctggaaagtatttggaacatggggaatatgaaggaaatctctatggaaccaaaattgattctattcttgaggttgtccaaactggacggacttgcattctggatgtcaacccacaagcactgaaagtattgaggacatcagagtttatgccctatgtggtatttattgcggctccggagctagagacgttacgtgccatgcacaaggctgtggtggatgcaggaatcactaccaagcttctgaccgactctgacttgaaggaaaacagtggatgaaagtgcacggattcagagagcatacaaccactattttgatttgatcatcataaatgataatctagacaaagcctttgaaaaactgcaaactgccatagagaaactgagaatggaaccacagtgggtcccaatcagctgggtttactga

SEQ ID NO: 153248 - DNA, 2017 bp, Homo sapiens
gaattcgttctcaactacgagccacgagtttgcagatggggctgctcggcggcgcctgtggctgagggagagcagcggcggcggggagcgaccgggagcggcggcagcggcggcgcggaggcggctgaggtgcgagccgcaatgcagcaagtcttggaaaaccttacggagctgccctcgtctactggagcagaagaaatagacctaattttcctcaagggaattatggagaatcctattgtaaaatcacttgctaaggctcatgagaggctagaagattccaaactagaagctgtcagtgacaataacttggaattagtcaatgaaattcttgaagacatcactcctctaataaatgtggatgaaaatgtggcagaattggttggtatactcaaagaacctcacttccagtcactgttggaggcccatgatattgtggcatcaaagtgttatgattcacctccatcaagcccagaaatgaataattcttctatcaataatcagttattaccagtagatgccattcgtattcttggtattcacaaaagagctggggaaccactgggtgtgacatttagggttgaaaataatgatctggtaattgcccgaatcctccatgggggaatgatagatcgacaaggtctacttcatgtgggagatataattaaagaagtcaatggccatgaggttggaaataatccaaaggaattacaagaattactgaaaaatattagtggaagtgtcaccctaaaaatcttaccaagttatagagataccattactcctcaacaggtatttgtgaagtgtcattttgattataatccatacaatgacaacctaataccttgcaaagaagcaggattgaagttttccaaaggagagattcttcagattgtaaatagagaagatccaaattggtggcaggctagccatgtaaaagagggaggaagcgctggtctcattccaagccagttcctggaagagaagagaaaggcatttgttagaagagactgggacaattcaggtgatgagctcgacacaataaaatttgatcgtcatgaaatccagatatatgaggaggtagccaaaatgcctcccttccagagaaaaacattagtattgataggagctcaaggtgtaggccgaagaagcttgaaaaacaggttcatagtattgaatcccactagatttggaactacggtgccatttacttcacggaaaccaagggaagatgaaaaagatggccaggcatataagtttgtgtcacgatctgagatgaaagcagatataagagctggaaagtatttggaacaatggggaatatgaaggaaatctctatggaaccaaaattgattctattcttgaggttgtccaaactggacggacttgcattctggatgtcaacccacaagcactgaaagtattgaggacatcagagtttatgccctatgtggtatttattgcggctccggagctagagacgttacgtgcccatgcaccaaggctgtggtggatgcaggaatccaccaccccaggctctgaccgaactctgacttgaagaaaacagtggatgaaagtgcacggattcagagagcatacaaccactattttgatttggatccatccataaatgataatcctagaccaaagccctttgaaaaacctgcaaactgcccatagagaaacctgagaatggacccccacagtgggtcccccaatcagcctgggtttacctgatgattcagtaaggtttaccaatgaaaattaaactcttaaaaagtgacctgcaacaaataaaccttcctacctgagaaaatacatcacagatagaagattatctgcctaagtcccaggcatttttatggtgtagattgaaataatagtacacttctgaatttttatataaaatgtggttggaaggtgtactaatatataatttatcttaatttttctaactttgtatggataatctttctattcatatcacataaagaaatgcgttgaagcaaaaaaaaaa

SEQ ID NO: 153249 - DNA, 747 bp, Homo sapiens
  misc_feature (1)...(747): n = a,t,c or g
cgtatgcgggtagtttgccaccttataccccttaaaaatttttattttccccaaagcctttaacccttggagggaggtgggcccactatgtcccccccccaaagtaagggtccctccccaaaatccccaggttgggtttaaatcggccccctatagggaaaaaactaattccttgcaagccccggttaacttgggcccccccaaggattctttaaaacggcccccccnnnnnnnnnnnnnnngacaggcttaattttactgcagaaacgggttggctgaagggaacaggccagcgaggtgggctcaggacacccccaacagccaggatgggggcacggcaggatctggcgcccagaagtcagagggaggcccaggaaatttgcgccagttttcctgccttgtggctgcctgaggagccctcactcccagttctgtgggtgcccagggtcacccagagttcaagtcagggctgtgccaagcctgcgagcccccacaaagacggagcaggcggaatagggtggcagctcacagccctgaacatacagggggattcctgcggccccacatgggcacagccttctcacagcacccctcaacacgcacagcggtgggcttgtgggaggtgctggtggtggcactgtctcagctcctggtggcctctggcacgggctctggccctacacgtctgtgctcctggccctgaagatggatgctggggtgggatgggcaggcattgggggccgagag

SEQ ID NO: 153250 - DNA, 1059 bp, Homo sapiens
ctacggcgcggtttccgcggcagagacatgttttccggtcgtccttggctcgattttcttccggggcgggacttcctttccatcattgataggcgcgggcagctgagctgaggctctccgcttcctctttccccccccaggtccgccccccagcgtcccgtggccatgacgaccgctcagagggactccctgttgtggaagctcgcggggttgctgcgggagtccggtgagtggacttccggttggctgggctcggacctcggacgaggtgggggtggtgctttcagccaggatgacattgaaggtgatggcctcatgccgggtctcacacacatactccccggcgtcctcaggctgggcgtggggcagggtcagggtgcgggtgggcccctcggcacccagctgcagggcatctgatgcctccacttccagcccgtccttgtaccagcgcacctgtgacagtgacagtgaagaaggccgagtcatctccagcatcacatacaaactcgcccccgtcctcgggctgagcagcaggtagcaccaggcgcagcgtggcccatccctctccagcaccagggcctcgctctcctccacttccagcccatccttgtaccagcgcacaggggcatcctcccgagacagttcacacatcagcaccacacactccaaggtcacggcgatcaaggtcacctcatcgcgagggtatatgatccgcactgggggttcttccgtgtgggagtccccctcagctgtcaccctccactgcaccagaacgcccatcaggctgagcaggggccagagtgccagcagggccccagcaggcagcagtgcgagcagcaggccgagcagcagccccaccaggaagaggcccacgctgcgcactagcatggccaccagcccgcagagcagcccgatgcccagagcgatgcccgcgctcgccccagcactcagctgtgtctctagcacccgctctcggtagcagaggaggaagatgaccaccgagccaaacagcaacccagtgagaaagagcactgccttgaagcagcggtaaccctccat

SEQ ID NO: 153251 - DNA, 547 bp, Homo sapiens
cgccgggcagctgagctggtaggaggaccagacggggatgttcggctccgccccccagcgtcccgtggccatgacgaccgctcagagggactccctgttgtggaagctcgcggggttgctgcgggagtccggggatgtggtcctgtctggctgtagcaccctgagcctgctgactcccacactgcaacagctgaaccacgtatttgagctgcacctggggccatggggccctggccagacaggctttgtggctctgccctcccatcctgccgactcccctgttattcttcagcttcagtttctcttcgatgtgctgcagaaaacactttcactcaagctgggccatgttgctgggcctggccccacagggcccatcaagattttccccttcaaatcccctttcggcacctggaagctccgaggtgttcccctccactgtctgcatggcctccgaggcatctactcccagctggagaccctgatttgcagcaggagcctccaggcattagaggagctcctctcagcctgcggcggcgacttctgctct

SEQ ID NO: 153252 - DNA, 468 bp, Homo sapiens; identical to SEQ ID NO: 145868
  misc_feature (1)...(468): n = a,t,c or g

SEQ ID NO: 153253 - DNA, 427 bp, Homo sapiens
aagcccttgtcctggggcagttaatgtgcaggtttcatgatggagcctggagggtgttgactggagaagggtctctggggtgggcttggcttggctgggctgtagatgcagccgccagcctctggtgggaggccgggcatcaggagcaacgctctgtccagcctggggccagctggtaatgacatggcctgttttctgtcgaggagaatgaggaaaatggggagcaggaggctgacaatgaggtagacgaagaagaggaagaaggtggggaggaagaggaggaggaagaagaaggtgatggtgaggaagaggatggagatgaagatgaggaagctgagtcagctacgggcaagcgggcagctgaagatgatgaggatgacgatgtcgataccaagaagcagaagaccgacgaggatgactagacagc

SEQ ID NO: 153254 - DNA, 1458 bp, Homo sapiens
  misc_feature (1)...(1458): n = a,t,c or g
cccccccccgccccactggctgctctgaaaagccatctttgcattgttccttcatccgccttccttgctcggccgcaagccgcctccgccgcgcgccttcctccgccgccgcggactccggcagctttatcgcccagagtccctgaactctcgctttctttttaatcccctgcatcggatcaccggcgtgccccaccatgtcagacgcagccggtagacaccagctccgaaatcaccaccaaggactttaaaggagaagaaggaagttgtgggaagaggcagaaaatgggaagaagaccgcccttgcttaacggggaatgctgagaatgagggaaaatgggggagcaggaggcttgacaattgaggtaggacgaagaaggagggaaggaaggttggggagggaaggagggagggagggaaggaaggaaggttgattggttgaggaagaggatgggagattgaagattgaggaagctgagtcagctacgggcaagcgggcaactgaaagatgatgaggatgacgattgtcgataccaaagaagcagaagacccgacgaggatgacttagacagcaaaaaagcgaaaagttaaactaaaaaaaaaaaaggccgccgtgaccgtattcacccgtccacttcccgtctcagaatctaaacgttggtcaccttccgagtagagaggcccgcccgcccacccgtgggcagtgcccaccccgcagatgacaacggcgctctccaccacccaaacccaaaccatgagaatttgcaaccgggggaggaaaaaagaaccaaaaacttcccagggccccggctttttttcttaaaaggtactttaaaaaggggaaatttggtttgtatttttttattttacattttatattttttggtacataattgttaaggggtcagccaattttttaaatgattctcggatgaccaaaaccaagccttccggagcgtttctccttgtcctactttctggaccttttacttgtgggtgtggaccatgttcattattaatctcaaaggagaaaaaaaaaaaccttgtaaaaaaaagcaaaaatggaccaacagaaaaacaatctttattccggaggcattccagtaacttttttgtgtatggtacttagccggtactataagtagttgggtttgtatggagatgggttaaaaaggccaaagataaaaagatttttttttttccttttctttctgtctatgaagttgctgtttatttttttttggcctgttttgatgtatgttttgaaacaatgttgtccaacaataaacaggaattttattttggctgaatttgttctaacnnnnnnnnnnnnnnnngggggggccgttttaaaggatcctttggggggcccaagtttacgcgggcatgcaaggccatagttttctccttatagggaggcgaattataagctatctggggatttttgggaaggaactg

SEQ ID NO: 153255 - DNA, 381 bp, Homo sapiens; identical to SEQ ID NO: 140800

SEQ ID NO: 153256 - DNA, 444 bp, Homo sapiens
tagtgtaaaggttttttaattgtgtatatgtagcattagacaaaattatttaaagtcaataaattgttattcgaggaattccatgttgtgatttcttccactgtccatcaaggtcactttagatcctctaaagagctggagtcaaaagatttatcttcaagtttgccctttttaatgaaactgatccagttgtcctgtcagccctttaactccagacaccatgttctcaagaaaaagcctttgacattcatgatcctgtcacattttcaggcctctctgtccagtatttttggcttttgtagctctctttttagacaaagcagcttcttcagtaatatcctcttcttctaagtatacactcagtcttacagggaattcagaacttactatgaaactatcccctgccaatttgatatcacattcgttatcttcaagatgtgttgc

SEQ ID NO: 153257 - DNA, 408 bp, Homo sapiens
gagggatagttctgatttttcatgccttgggaagaatctcttgcttcaatgctaaaaatacttggtagatcagcatgctggctctcctcctgtgaagaatattctggctgaagctgttcaaaacattgttcagatcctgcattaagaaattcaaaaatcagttaatcatcgttacatgttgtaaaagttggatactgacagtctctaatagtttatcatccaattgcaagtaacctacaattttaggcataaaagttgatgtgtataaacatgaatacaaagataaggatggtcacagtgatttctcaaactacagctcacaccaagtattttttctttttctattaatatttaataaggacaatatggctataaactgaggatgttttcctctataagaactgaata

SEQ ID NO: 153258 - DNA, 202 bp, Homo sapiens
gtggggattgcaggcttgacccattgcacctggcctggaaccaacctttatggctatcaatactcccatcaatcaactgtctcaggtatcataatatcccttcttatatgtatcaaaactcatactgaacaatgagttctgggttgcaaaagaggatttattttttgcacctatctgtaagtctttgtccacgttaaacaaa

SEQ ID NO: 153259 - DNA, 3780 bp, Homo sapiens
ctacaaataccgctcattatttagttcactgtttgcatagggtttcctatggctgctataccaaattaccacaagttgatggcttagaacaacagaacttcttctctcacagttctggaagctggaaagaagttgcagatcaaggtgttggcagggccagcctccctccagaggctccaggggagaacccgttccttgccgcttcagccctggtggctgctggcattccttgacttgcagctgcgtgactctagtctctgcctctgtggccaccttgccttcttttttgtcagtgtcacatctccctctgcttccctcccaatcttttcctttgtgccctgaatccagctggggggttgtgcttgccatgtgctgtgggaaaaagttaaggaggtggccaaatccccttgtaacctctgcaattaacttgtacaaaatatgggcagttttgacatagtggagagtacatgatcttcggcagactctaaatgcacactgaccatagggaagcctgctaagtccagagttcagctttgccacaaagaggaaacttttccgaaccaaaccaatgcttatcgtacatgtgttgattgatgtctcatgtctcccactttgcttggcactagtatcttctgaagccaaatgattatcatcagagttgttcctatctgcatgcctaatattttcttgatcatttcctgctaggtcttgtgtattaggaaaccagtctctgagctgccccatcttctgggtttttaaatcattttcaactgtgggcttacttatctgactgtctttaaagaaatccttcaaagtctcttcatgtttctgtatctgctgctgcaatgctgtttgtctctgtacaagcaatttttcctgggctttctggctataatgcagaacttctctttgtagatccaactgtttctgaagtcccaagttatcttgctgggatacaaatgaagaggagcaaacttgttcagatgatacccttttctccaattcacttaatctttgcaaaagcaattcttcttggacttcctgtatagatcgaatggctttcttctgtgtatctaactgctgttgaagtgcctgcaaatcaccatggtgagactggataaaatgctcagaagataccttttcctcaaatttacatggttttgacaaaaccaattctttctgggttttctcaatagaaggaaggaaatctgtctgtgcatgcaagtgttcttcaagtgcaatcaaattatcttgttgaggtaaaacaagatgtgataaacccaacagcccatcaggcaatgttggtatctctgagtgacctgaggatactatattatcactgttaattgaacatggttcttggtttctttcagattcattaagaggtaatgaggcgaatgaatgctgtggtactaggggtaaggaagaggtgtcaacctgctcgggagatattcttccctcccattcactctgatgtaaaagtaattcttcccgagcttcttgtctagctagaatgatggcttctctctgtgtagctaactgttcttgaagtgccttcaaattatcttgttgaggctggataagttgcgatatcctcaaaagcctatcctgcaattgtgggatctgaaggtggcttgaaaaaattttactttcactctctgtaaaaagaggttccaggattgtgccagactcagctgaagctaacgaagtaaatgaaagctgtaccaactggggtatgaatgaagatgaaccagtttgttcagaagatgtattttcttgggttttctggctgaaatgaaaggcttctttctcagtgtctagccatgcttggtgttcctccaaattatcttgtagaggtagcatatgttgtgaaactctcaaaagtctttcctgacatcttgggatcttaggatggcttaagggaatggtactgtcactcttgattgatatacattcctggaatctctcagattcatccacattctccttctcagataaataaagctcctgaattctcctaggctcagctttagcagaagcttgtgaagcaactgaatgctgaacaaccactggtgaggatgaagagctcaccagcccagacttactgtcccccaaatctctttgtctatgtaaaagtaattccacctgagcttcatgcctagcctgaagagtatccctctgtttagtcaactgttcttggagcaacttcaaactatcatgtagaggtaggaactgctgtaggaaactcaaagacccatcctgagatatggggatgtcagattggcatgaaacaagtcctttctcgctcttagatgaatgttgctcctgtatttttccagattttgtatcagcagatggtagtgaagtaaatgtatgctgagctacctgaaatgggaaagagggctcagcctgttcggaacatactcttctatccaattcactctgtttatgtacatacaatacttcctgggcttctcgcctagcctgaaggctatccttctgaatattcaactgctcttggagaaatttaaaattattttgctgtgataggataggctgtgaaagactcaaacgcttatcctgaagttgtgagatcacatgatggtctgaggaaactgcaatattattcttggttggtgaagattcctggattctccccaaatctgctttggcagaaggcaataaagcagatgaatctggagttaccaagggaaggaataccgagaggcccgtttgctgttccacttctttctgtttgcacaaaagcaactgttcctgagcttcctgagttgcctgaagaactttcttctgtaggtctaactgttcttggagggccttcatattaccttgctgggctgtgatattctctgacggcagcaaaggcctatcatgcatttggctgattatagaatggcttgtggaaactgtacttttgctcatggctgaaaagggttcttgaatttttcctgactcaactttaacaggcagagaactaaaagaatgcaaatgatttatgtagtgatgagattttctgcatcctaccccagtcggttgagttttttttcttttttcttcttccagctgagccctgaagcagtcagtttctaatcttaatttctgctgttcaatttgttcaagtaattccaattgcttttgcttctgctcttctatttccattatctgtttctgccttgctgacattctaatcctggctgctgcttcttgaggatgaagtagaactgaactctgagctacagttgtgataggcagagtctcatttatttcttgttcttttccagagtttgtaccacacgaaagtggtttatcttcactagcaagtggtccagactcaattgttagtgtatcactttcaacaactggttttaacttcatatcgctgacagaggcactgaagaggatagcaaagacagtcttgaaatgccaacaccacccttccctcatctccaggcagtggccacatggtgcggagagagaatctgtatgcttgggggaaggagagctcagccattctgggactttgcattggaactcagtgtggccagcaccaagtagaactctgccagtgcccttaggtgtttctcctaatgctatccctcccacgtcctcccaccccacgacaggccccagtttgtgatgttccccaccctgtgtccaagtgttctcattgttcagttcccacctatgagtgagaacatgtggtgtttggttttctgtccttgtgatagtttgctcagaatgatggtttccagcttcatccat

SEQ ID NO: 153260 - DNA, 659 bp, Homo sapiens
aactctactacaaactgcttggttattagcaacccacaagggttacaatataaaggcaaagcaaatttgcatgattcaagagatctaggagaattttcaaatctcactgattttaaagaaaaatcacatgtggttcacattttatttgtattgcatttctattacagttaatcaactgttcccaataagctgattgctagcaaagtagcagatagaaaacctactgggaaatttttttatggtcatgtccacagcaaatgagaaactgcattctaaaagccttggtaatgaccattacacccttgagcaaataacttatagttaagataaaaaccattacttgccataattactttggcttctgtcatctcgttttaatatggatatactgatgaagacttcaaaattcacctgtggaaaaatgtgtatttcaaatttatatttactattaagtacagaaatctatctttcaagaatgaggttgcttaggttccaaagtatcctgaaacccggcaccccaagtaaggtattgaaaattctatgcttaaaatagctatttaaactaataggtatttttaaaaatcaatgatcccatgcccattcatatccgaatttgctctatgcggacgcgtgggcgaacgcgtgggcggacgcgtggg

SEQ ID NO: 153261 - DNA, 5598 bp, Homo sapiens
atgggatcccaggaaggcgccttgttgcgaacgcaggtacggctcgcgtttctcaggctccgcaggccgtgggccctgcccgcggtcgggctggcggctgtaaggagtgtccggaccagacccgaactgtcatacataaagtacacagaaatgaagagaaaagtcgtgaatactcacaagctgagattgagtcctaatgaggaagccttcattttgaaggaagattatgaaagaaggcgaaaactaagattgctacaggttcgagaacaagaaagagatatcgccttacagataagagaagacataaaacagaggagaaatcaacaatttacacgtttggcagaggagctaagggcagaatgggaagaatcacaaactcagaaaatacagaacttggaaaaactgtatttggcaagtttaagaagtatgggagagggacatcgacaggccaaagaaaataatcaggagaaactaatgaaagaactcaaacagctacagcaagaggacctggcacgtaggagacagactgtagcacaaatgccaccacaactagttgaacttccatacaaacgcagtgaaatgaaagaagactggcagagagaattggaatttgcctttgaagatatgtacaatgcagacaggaaggtgaaagggaatctgattctgcaccttgaaccagagcccttgcccactgtgactaatcagatccaagatgaagagctggacctttcaatggaacaagaaaatttgggtgcagctgaagaccttccagtgacagaagctgaaatatgttctagtgaaacagatgttcccttggtaatgaagacccaacagattccttcaaaagttctttttaaaaaattattaaataagatccgaagccaaaaatctctctggacaattaaatctatgtctgaggatgaaagtgaaatgattacgactgttagtgaaattgagagtaaagcaccaacggttgagtcaggaacaattgccagcaaagagagaacgttatcctctgggcaggaacaagttgttgaaagtgatacactaacaattgagtctggaccacttgctagtgaagataaaccactttcgtgtggtacaaactctggaaaagaacaagaaataaatgagactctgcctatcacaactgtagctcagagttcagttctacttcatcctcaagaagcagcagccaggattagaatgtcagcaaggcagaaacagtattttgttacctagataatggaaatagaagagcagaagccaaagcaattggaattacttgaacaaattgaacagcagaaattaagattagaaactgactgcttcagggctcagctggaagaagaaaaaagaaaaaaaactcaaccgactggggtaggatgcagaaaatctcatcactacataaatcatttggttggcattgctccagcatcatgccctgtaatttctgatgaagatagtcataggcagatgattcgtaactatcaacatcagcttttacaacaaaacaggttacacaggcagtctgttgaaacagccaggaaacaattacttgaatatcaaactatgttaaaaggaaggtgcccatcggtgtcagctccatcattgataactgattctgttatatcagtgccatcatggaaatctgagagaccgactgctatatcagagcattgggatcaaggtcagagactcaagttgagtcctaacaaataccaacccatacaacctatacagacctccaaattagaacaagatcattttcaggtagcgagacaaaatcactttccacaaagacaggtggaaacaacagaaacattacgcgcttcagatattttaaccaatcaagctttagaatcacaagaacatctaaggcaattctctcagactgaaacacaacagagagactataaattggtccccaaagattctgagacactttcaagggctttgtcacatgacaggcagctaatatcacaggatgctagaaaaatatctgaaacatttggggcaacaacttttcaaagtttagaatcccaacaattgttctcagagaatagtgaaaatatatcttaccatttaactgaaccttcttcatttgtaccactggtacctcagcattcttttagttctctgcctgttaaagttgagtcaggaaaaattcaagaacccttttcagccatgagcaaaagtacagtttccacaagccattctataatcagccaaatgcatgataggcctttgctgccgtcagagaatatcacagcccagcaaggtaatatgaaggccctccaagaacagttagacctacagaagaaagttcttcaggcaactcaggaagctcaggaacagttgcttttgtgcaaacagaaagaagtggaacagcaaacgggcctctcggtattccttcccttggtaactccagattcatctgctttattgccttctgccaaagcagatttggggagaatccaggaatcttcaccaaccaagaataatattgcagtttcctcagaccatcatgtgatctcacaacttcaggataagcgtttgagtctttcacagcctatcctatcacagcaaaataattttaaatttctccaagagcagttgaatattcagaaggatagccttcaggctaggcgagaagcccaggaagtattgtatgtacataaacagagtgaattggatagaagagtatgttccgaacaggctgagccctctttcccatttcaggtagctcagcatacatttacttcactaccatctgctgatacaaaatctggaaaaatacaggagcaacattcatctaagagcgagaaaggacttgtttcatgccaatctgacatccccatatctcaggatgggtctttgagtttcctacagcagttcctacctctacatgatagtttgaagttgctccaagaacagttgactaaacagagggatactcttcaggctaggcatgaagctcaggtggaattacttttacatagacaaagagatttgggggacagtaagtctgggctggtgagctcttcatcctcaccagtggttgttcagcattcagttgcttcacaagcttctgctaaagctgagcctaggagaattcaggagctttatttatctgagaaggagaatgtaggtccctcctgtcatttgataatcccaacatttcaggataagtctcttagttttccacagcatagcctggcacagcaagaaaatttgacaatactccaagaacagtcacaaatacaaagggtaatacttggtgctaaagaaggaactcaggaatttgtacacacagaaagtgaattggagaaaagaatttcttctgaacagactggcacctcctcatccctttcccaggtggatgaatctgagagattccaggaatgtatatcaatcaagagtgacagtaccattcccttaagccatcctaagatcccaagatgtcaggaaagacttttgagagtttcacaacatatgctacctctacaagataatttggaggaacaccaagcatggctagacactgagaaagaagcctttcatttcagccagaaaacccaagaaaatacatcttctgaacaaactggttcatcttcattcataccccagttggtacagctttcatttacttcgttagcttcagctgagtctggcacaatcctggaacctctttttacagagagtgaaagtaaaattttttcaagccaccttcagatcccacaattgcaggataggcttttgaggatatcgcaacttatccagcctcaacaagataatttgaaggcacttcaagaacagttagctacacagagagaagccatcattctagctagacaagaagctcgggaagaattacttttacatcagagtgaatgggagggaagaatatctcccgagcaggttgacacctcttccttacccctagtaccacagcattcattcgcctcattacctcttaatgaatctgaaagaaaccaagaaccatgttcaattaacagtgataatatagtatcctcaggtcactcagagataccaacattgcctgatgggctgttgggtttatcacatcttgttttacctcaacaagataatttgattgcacttgaagaacacttgcatgcacagacagatttccttccttctattgagaaaacccagaaagaattggttttgtcaaaaccatgtaaatttgaggaaaaggtatcttctgagcattttatccagtctcaccatggtgatttgcaggcacttcaacagcagttagatacacagaagaaagccattcgatctatacaggaagtccaagaagaattgcttttgcaaagattaagtgaattggagaaaagggtatcatctgaacaagtttgctcctcttcatttgtatcccaggtgcctgttgctgactctgaaagaacccagaagtctttcccaaccaaaagtaatgatactcttccctcaagtcatcgtgagattccaagattacaggatagacttttgagtttatcaaagcctattctgcctcagcaagataatatgacagcacaattggatgcacaaagggaagtgatgtattcttatgagaaaccccaggaagaactgtctttaaacaaacaaagaaagttgaacaaaagtgaatctgctgagcatactatcccctctttgtttctacccaaggaaacagagcattcgtttattccactaccttttgcagaagctaaacctaaaagcacttgtgaattgtattcatcccagaatgaacatgcagcccccccaagtaatcctgtgatcccagggtttcaagatagacttttgagtttttcacagtctgtcttaactcagcaagataacttgggacttcagaaacagttggatctacaaagagaagttctgcattatagccagaaagcccaggaaaaattgcttgtacagagacaaacagcattgcagcagcagatacagaaacatgaagagactttgaaggatttctttaaagacagtcagataagtaagcccacagttgaaaatgatttaaaaacccagaagatggggcagctcagagactggtttcctaatacacaagacctagcaggaaatgatcaagaaaatattaggcatgcagataggaacaactctgatgataatcatttggcttcagaagatactagtgccaagcaaagtggtgagcatctggagaaagatctggggagaagatcctcaaagccacctgtagcaaaagtcaaatgtggtttggacttaaaccagcatgaacttagtgctatacaagaagtagagtcaccagcaattggcagaacttctatactagaagagaacctgctgccttcaagggaaggacccagtcctggcaggattcatcacctgctgattaaagagcccttgggtcctagcagtggtagccaagtagtatatgccatgggccttagacagatccccagctttagtaaagtgtttggtataatcatccgagtggctactttgctagcagttaaaggcactagtgctacagtcgtgaacaaggcccttgcccacatgaagtgtacactccagagagaagggtag

SEQ ID NO: 153262 - DNA, 3724 bp, Homo sapiens
ataatggatgacaattaattttgagccaagaattaaaatttgctgaaatctctcgaattgggaaaacaacatcctctgttgcatactgaagttcataacaacagttagactttaaacttaaatcttaagtttaaatctttttcctttggttcatgtaaaggagctacttgatgttaccttttatttatcattcctctggctcctaagcacaacgtgattgtgaaattattgtttttgtgattaacgtagtaggaagtttctgcagttggcacatattgtaagagcatattgcagtttctgctcataatttctttcctatggagtgttagactttgttatttatgtgtataaatactagctggacacagtggtgcctgtggtccccagctactctggaggctaaggcaggagaaacacttgagtccagcggtttgaggctacagtgagatgtgatcctgccacatctcactgtagcatcgaacccctgggctcaagtgattcagcaagaatcacacgatttttaaaggacatggcagatcctgtgtctttaaaaaaaaatcaaaaccttgtaaatagtggttgaggtctatcccgatggggcttttcctgtagcctgcacatcgttggaaacgcctcatagagtaactctgtggttttactttactcacaggactattgttagatctgtgggaaggaattacaagacagttgctaaaagtttgaaaaagacggttgctaaacgttatgaaaaaccagataatctacttttttaccttaggtattggcatactccacacatctgtaccattcttgagtgatcgcttaggaatgaatgtgatttgaactcattcatgttgagagggtgtcaaattgagaaccaggtagatccccaccacctacagtaaaaaggaccctaaagtaaattggttgaagaaattagatcccaaagattcttggtgaattttgaagtcttcatcagtatatccatattaaaacgagatgacagaagccaaagtaattatgggctgacaggacaactggatcagtttcattaaaaaggtatgtatgcattagaaaagacatttgtatgggttcatttcaaagagggcttatgaggctgtgaaacccagagctcttaacgctgtgaccaaagatggaagttctctataggaagccctatagccctcctaatgtttgggtgctatgttttcctgaggagatataaaacgtaataatccatgattgttgccatgtgagagttttaaaggttaatcaaaatttctcttcttcagggcaaacttgaagataaatcttttgactccagctctttagaggatctaaagtgaccttgatggacagtggaagaaatcacaacatggaattcctcgaataacaatttattgactttaaataattttgtctaatgctacatatacacaattaaaaaacctttacactatttctagaaagtcagcatgtatttttggctcgaagtttctctagtgttttcttatggaatccttttgcccttgcctctgttttcgggcataagcttcttgttttgttttttcttccttttgttgtttcacttcagctagttgattgtataaccttagacccctttgggtgccttagagcctgtgtaggtctttctgtcttcagggaaaagatgctctgactttattcacggccctttaggacggactcacaggatggaacttatagatggtttctctttaactgttttgatttgagaattttcagagacatgaattttattccttatttctttctgcctctggtgggatctctccataaatgattttttcctctttataaatgcttcttgtaagctccctggtacaggtgtaagcctgcgaggggtttctgtagatgctgtccttggtttttctatggaaagttctgatacagctggataatctgaggcttctgttgctaatggcaagaaagttgcatgttttactctttttaaacgctttaagcgggtcttgctctgctgaaagaagcattttgcttcattctcgctcttctcttctagggttaaatttgcaaaatccatttcagcaatactggtatcagtggtgcttattaaagtaagttctggttcttccattataccatggccagtttctggtttcccagactggtatagagctctgtaatgaaaatgatccagaacttgcaaaaagctctgattctcctagttgagatagttttttggtgatttttggaatgtctgtttcagctgaattctcaaaatatttttcattttgagtagttaaggaatatggtgcctgaattgaagttcccatctccactgttcttacacataatcgagagtcagtttcctctacctgtggatttatgtctaaaaccgtacaggtttcatttttattatcttcaatgagtccgggactttgtaacattgtaacaacccctctttttgatagttcttcaaagcccatactttcctttctgctttctagttggtgttttgttgagcactcactagagttagaaccacatggagtgctatagagtacattcacatgatcgaagtaagtagcctcatcagatggtaagtagagtgatatgtaagtttcctatagaaagctggaaatgaacaatttttttcttgttttgtaatatttcagtatgttcttcagagggatagttctgatttttcatgccttgggaagaatctcttgcttcaatgctaaaaatacttggtagatcagcatgctggctctcctcctgtgaagaatattctggctgaagctgttcaaaacattgttcagatcccccaataatattttctgtagcaaaactgtgagctccaacatgagccaagttagtgtcaggttgttgattcggacttgtgttaagagaagaatgcatgctggtcctcctcagtgctgtgaaataaactgtacttttggataatccagtagcacagtggctttcagatgaagaatctgatctctggtaaaagtctctgttgtctggagaaatcccagaggatgatgatgataagtcaaaatctggatgtggttgtaagggtttaacacagctgatgatgcaaattaggaaaaatgtgttccaattcttgcaaatctgttttttcaggtatcaaatttgcttcattaatgtacttgtctatcatttgctgaaagtgtgtgtgaccacatgtagtttcatccactgcaggcaacagagatttatgaacgtctgaagagttctgccgctgataaatatcttgtgttgaaggaactatggaacttataatatttgtttcctcttctttactggtggtagattcttgcttgctatcatccatgtgctctgaaaatgactctggatctgtaaggctcaaatctgtgttttcataacttaaaaggctcccagtggaaacagttgctgaagataatggttcataagacagtgttttagccttatcatctggcttcacagttggacccaaatatgcatgttcttcctccacagcataacttaacactgcatgattttcaacaacagattccttcagcttaactgggcctggcggcttgatgacattagattgtgaagcccttagctctttaataaagctcgaattgtaatccccacatgttgagggagggacctgcaattcccatgtgtcgaaggagggacgtgactggatcatgggggtggtttttcccat

SEQ ID NO: 153263 - DNA, 3603 bp, Homo sapiens
  misc_feature (1)...(3603): n = a,t,c or g
ttattagttcaagaaaaggcatacacatttattcaacatgtatacctggggagaaccagtcattaccccgatgttcattattttgatcaccacgatagagctgactactctgctatgtagtgcattttgggactgcacttatgtatgtttttgtttaacttgtggacaaagacttacagataggtgcaaaaaataaatcctcttttgcaacccagaactcgattgttcgagtatgagcttttgatacatataagaagggatattatgatacctgagacagttgattgatgggagtattgatagccataaaggttggttccaggccaggtgcaatgggtcaagcctgcaatccccacaccaaggtgggagtattgcttgaaaccatgagttcaagaccagcctaggcaagaaagcttttatcttgagaaccatggtgtctggagttaaggatatctacttttttcccttaggtattggccatactccacacatctgtacccattcttgagtgatcgcttaggaatgaatgtgatttgaactcattcatgttgagagggtgtcaaaattgagaacccaggtagatcccccacccccctaccagtaaaaaggacccctaaagtaaattggttggaggaaattagatccccaaagattctttggtgaatttttgaagtcttcnatccagtatatcccatatttaaaacgaagattgaccagaagcccaaagtgatttaatgggctgacaggacaactggatcagtttcattaaaaagggcaaacttgaaggttaaatcttttgactccagctctttagaggatctaaagtgaccttgatggacagtggaagaaatcacaacgatggaattcctctgaataacaatttattgacttttaaataattttgtctaatgctacatatacacaattaaaaaacctttacactatttctagaaagtcagcatgtatttttggctcgaagtttctctagtgttttctgtggaaggaataaaaatttgagtttcagttgtgtacttcatgcttgaaaaattaagtccttccccctcagttatactcaccttatggaattcttttgcccttgctctgttttgggcataagcttcttgttttgttttttcttccttttgttgtttcacttcagctagttgattgtataaccttaagacccctttggtgccttagagcctgtgtagtcttttctgtcttcaggaaaagatgctctgactttattcacgccctttagacgactcacagatgaacttatagatggtttctctttaactgttttgatttgagaattttcagagacatgaattttattccttatttctttctgcctctggtgggatctctccataaatgattttttcctctttataaatgcttcttgtaagctccctggtacaggtgtaagcctgcgagggggtttctgtagatgctgtccttggtttttctatggaaagttctgatacagctggataatctgaggcttctgttgctgatacaagaggcagaaacacactcacctgaaagaagcattttgcttcattctcgctcttctcttctaggggttaaatttgcaaaatccatttcagcaatactggtatcagtggtgcttattaaagtaagttctggttcttccattataccatggccagtttctgtttcccagactggtatagagctctgtaatgaaaatgatccagaacttgcaaaaagctctgattctcctagttgagatagttttttggtgatttttggaatgtctgtttcagctgaattctcaaaatatttttcattttgagtagttaaggaatatggtgcctgaattgaagttcccatctccactgttcttacacataatcgagagtcagtttcctctacctgtggatttatgtctaaaaccctacaggtttcatttttattatcttcaatgagtccttgactttgtaacattgtaacaacccctctttttgatagttcttcaaagcccatactttcctttctgctttctagttggtgttttgttgagcactcactagagttagaaccacatggagtgctatgctgtacatttaactgatcaaatacattagcttcatcagatgaactgtagactgaacttaagtttcctatagaaagctggaaatgaacaatttttttcttgttttgtaatatttcagtatgttcttcagagggatagttctgatttttcatgccttgggaagaatctcttgcttcaatgctaaaaatacttggtagatcagcatgctggctctcctcctggtaaaagtctctgttgtctggagaaatcccagaggatgatgatgataagtcaaaatctggatgtggttctaagggtttaaacagctgatgatgcaaattaggaaaaatgtgttccaattcttgcaaatctgttttttcaggtatcaaatttgcttcattaatgtacttgtctatcatttgctgaaagtgtgtgtgaccacatgtagtttcatccactgcaggcaacagagatttatgaacgtctgaagagttctgccgctgataaatatcttgtgttgaaggaactatggaacttataatatttgtttcctcttctttactggtggtagattcttgcttgctatcatccatgtgctctgaaaatgactctggatctgtaaggctcaaatctgtgttttcataacttaaaaggctcccagtggaaacagttgctgaagataatggttcataagacagtgttttagccttatcatctggcttcacagttggacccaaatatgcatgttcttcctccacagcataacttaacactgcatgattttcaacacagattccttcagctgtacctcggttggtcacaatggcaatggaaacaagaactgcgatttgtccagtctgggtcacatgcctaccccggtagcctagaggtctgggtctctctccattctcattgctattatctttcactttctgtagtagtatacggccttctgtcttcactctctctgaccttttccccactgtgcagccagatctgatcgtgtcagcaacttcccatccccaccccccatttttaatcctttgattcctgatgtttaacccccatgacccagactgcaaaatcaggctggcttgctctgagctgcggttactgtgtccaggccccgggttctcaggtgagtcagggatgcactggcttcccagtcgccccgtaggagcatgactccccgaggcccaagagctgggattgtattccggaggaatgggatcccaggaaggcgccttgttgcgaacgcaggtacggctcgcgtttctcaggctccgcaggccgtgggccctgcccgcggtcgggctggcggatatcttaatctcctgcattctgaaatctccatttgcactgaggccatgcttcccatgggctgctcctagccactgacagtggcaggcctgttcctgagaatctccccacgggttcttgctgaacatttcttatactgcatggctgtctaagaggggtctacccattggtacttccctccattcagtgttagacttacactgaagtctgaggcgcttgtt

SEQ ID NO: 153264 - DNA, 1106 bp, Homo sapiens
tgaaaaatcgatgaccctagtccagtttggaggacttccggcgccgccactgtccggccacagcctaacgctcttcgctgtcgtttgtggtctcgcgcagggcggccccggttctggtgtttggcgtcggaattaaacaaccaccatgtcgagcaaaaaggcaaagaccaagaccaccaagaagcggccctcagcgtgcaacatccaatgtgtttgccatgtttgaccaggtcacagattcagggagttcaaagagggcctttcaacatgattgatcaggaacagagatgggtttcattcggacaagggaaggttttgcatgatatgcttgccttctctagggaagaatccccactgatggcattaccttgatgccatggatgaatgaggccccagggcccattcaattttcaccatgtttcctggaccctgtttgggtgaggaagtttaaatgggcaccagatcccctgaaggtgttcattcaggaaacgccttgcttttgctttggatgaaggaggcaaccgggcacccattccgggaagattacctaaggaggagctgctgaccaacccatggggggatcgggtttaccagattgaggaagttggatgaacctgtacaggagaagcacctatttgacaaaaaggggggaattccaattaccatcggagtttcacacggcatcctaactggaaggcccccaaagcacaaagatgactgaaagaactttagcctaaaatccttcccagttacaattgtcttactctcttttacttctcagacactttcccccaccctcatagaaccgtgttgcatggcactttagtttcacaggcttttgccctcttccttttttgatgtatttattccagacctttctgccactttagcacttggtataatcagactgggaaatgggggatgagggtggtaaattgtattgaaaaagatcgcgaataaaaaatccacaaatgtgaaagcccagaaaaatatattcgtatttcctgggttttgctgggatttttacatttttatataataaaaatgttattttgaaataaagattatgctgactcaaatgcaatgtaaaaaaaaaaaaaaagggc

SEQ ID NO: 153265 - DNA, 588 bp, Homo sapiens
gctggtcatcattgagagcgacctggaacgtgcagaggagcgggctgagctctcagaaggccaagtccgacagctggaagaacaattaagaataatggatcagaccttgaaagcattaatggctgcagaggataagcaaatgtgccgagcttgaagaagaattgaaaactgtgacgaacaacttgaagtcactggaggctcaggctgagaagtactcgcagaaggaagacagatatgaggaagagatcaaggtcctttccgacaagctgaaggaggctgagactcgggctgagtttgcggagaggtcagtaactaaattggagaaaagcattgatgacttagaagataagtttctttgcttcacttctcccaagactccctcgtcgagctggatgtcccacctctctgagctctgcatttgtctattctccagctgaccctggttctctctcttagcatcctgccttagagccaggcacacactgtgctttctgttggacagaagctcttcgtttcagtgtcaaatcccccctgtgtaagctttctgaaaaactataagaaaaaaaaacctcgggggggggccggggc

SEQ ID NO: 153266 - DNA, 1330 bp, Homo sapiens
ggcagccgggtccgcagggcagcagccggcctctcccactgcagccctcccgcccgcctaccgtccggcgcgatggcggggagtagctcgctggaggcggcgcgcaggaagatccggagcctgcaggagcaggcggacgccgctgaggagcgcgcgggcaccctgcagcgcgagctggaccacgagaggaagctgagggagaccgctgaagccagacgtagcttctctgaacaagacgcatccaagcttggtttgaggaagaatttggattcgtgcccaaggagcgtctggcaacagctttttcagaagcttggaggaagctgagaaggcagcagatgagagtgagagaggcatgaaagtcattgagagttcgagcccaaaaagatgaagaaaaaatggaaattcaggagatccaactgaaagaggcaaagcacattgcttgaagatgccgaccgcaaatatgaagaggtggcccgtaagctggtcatcattgagagcgacctggaacgtgcagaggagcgggctgagctctcagaaggcccaagtccgacagctggaagaacaattaagaataatggattcagaccttgaaagcattaatggctgcagaggataagtactcgcagaaggaagacagatatgaggaagagatcaaggtcctttccgacaagctgaaggaggctgagactcgggctgagtttgcggagaggtcagtaactaaattggagaaaagcattgatgacttagaagagaaagtggctcatgccaaagaagaaaaccttagtatgcatcagatgctggatcagactttactggagttaaacaacatgtgaaaaccttcttagctgcgaccacattctttcattttgttttgttttgttttgttttgtttttaaacacctgcttaccccttaaatgcaatttatttacttttaccactgtcacagaaacatccacaagataccagctaggtcagggggtggggaaaacacatacaaaaaggcaagcccatgtcagggcgatcctggttcaaatgtgccatttcccgggttgatgctgccacactttgtagagagtttagcaacacagtgtgcttagtcagcgtaggaatcctcactaaagcaggagaagttccattcaaagtgccaatgatagagtcaacaggaaggttaatgttggaaacacaatcaggtgtggattggtgctactttgaacaaaaggtccccctgtggtcttttgttcaacattgtacaatgtagaactctgtccaacactaatttattttgtcttgagttttactacaagatgagactatggatcccgcatgcct

SEQ ID NO: 153267 - DNA, 1289 bp, Homo sapiens
  misc_feature (1)...(1289): n = a,t,c or g
cggaattnccggatcgagccacgcgtccgcgaccgcgcgctcgccccgccgatcctgctttagttttagggcccctcgccgccgtcaccatgggcgccggcaagaagaagatgcggatgctgaagctcgacaaggagaacgccttggatcgagctgagcaggcggaggccgacaagaaggcggcggaagacaggagcaagcagctggaagatgagctggtgtcactgcaaaagaaactcaagggcaccgatagatgaactggacaaatactctgaaggctctcaaagatgcccaaggaagaaacctggaactggcaagagaaaaaggccaccgatgctgaagccgaccgtagcttctctgaacagaccgcatccagctggttgaggaagagttggatcgtgcccaggagcgtctggcaacagctttgcacgaagctggaggaagctgagaaggcagcagatgagaagtgagagaggcatgaaagtcattgagagtcagagcccaaaaagatgaagaaaaaatggaaattcaggagattccaacttgaaagagggccaagcacattgctgaagatgccgaccgcaaattatgaagaggtggcccgtaagctggtcatcattgagagcgaccctggaaccgtgcagaggaagcggggctgagctctcagaaggcaaatgtgccgaagcttgaaaggaagaatttgaaaacttgtgaccgaacaactttgaagttcacttggagggctccaggctgagaaagtactcgcagaaggaaagaccagatatggaggaagagatcaagggtccttttcccgacaaagcttgaaggaggctggagactcgggcttggagttttgcgggagaggtcagtaacctaaaatttggagaaaagcattgatgactttagaagaccgagctgttacgcttcaggaaactgaggtacaaagccatcagcgaaggagctgggaccacgctctcaacggatatgacttccatataagtttctttgcttcacttctcccaagactccctcgtcggagctggatgtcccacctctctgagctctttcatttgtcttattctccagctgaccctggttctctctcttaagcatcctgccttaagagccaggcacacactgtgcttttctattgttacagaaactccttcgtttccagtgttcaaataaacactgtgtaagctatttctgtttgctattctttttacttcttatttattgacattttagtttcaacattgaataaaactacaaagctgcttcacacaaat

SEQ ID NO: 153268 - DNA, 572 bp, Homo sapiens
agtctggcaggtgctgtgagtgccgaattgggaccgtgatctccaagtctggaattggaggaaagagggataagctgtcaagataccagactgtcacctgccaagctgctcagcagcttccctccacctgcctctctcacaggagcctgcatgggaaggggaaggggaagggaaaagacgatgggagagggaggggccctgggttggtggccccctccccttcagcactgaaactactgaatcctgtgtggctgtcactgagagactgaagagaggaatagaataatgtgagaaagggacagagaagcgcttctgcatcagggagtggaaagaacaaaccataagagaaaggtttgggctctcagccctgccacttagcatctgtggaactccagcaagacagttctcctctctgaatcactccccttatctgaggaggggtatctccatccttgactgtaataacaggctgccctatgcaccaagcagagttctgagagctatggtatttttcattcatttaacccccacaacacccaagaaataaatattattatcatcaatgccagcag

SEQ ID NO: 153269 - DNA, 1143 bp, Homo sapiens; identical to SEQ ID NO: 120876

SEQ ID NO: 153270 - DNA, 3209 bp, Homo sapiens
atggcatcatcagctattcctgttctagaaagggcactctggctgcaatgtggaggagggagtgactggaggaagggagccactggtccctggatcaagctagacacatgtcccaaattgggccaacttggaatggggcctcaacctaaagcagcaacttactccctgctcggaggcctagtggactcaggggactgtggagaagcagaaggcagaggcaggtgctgtgagtgccgaattgggaccgtgatctccaagtctggaattggaggaaagagggataagctgtcaagataccagactgtcacctgccaagctgctcagcagcttccctccacctgcctctctcacaggagcctgcatgggaaggggaaggggaagggaaaagacgatgggagagttacatggcaaaggagaattaagattacagatggaatcaaggttgctaatcagctgacttcaagatatggagaaaatcctggatcaccttgccgtgcctcggatcgtctggctttaggctctgtcctgaaggttggcctctcgctatggtcctggtggcacggagtggtgccagcaggggtgaaagagctgttggaattgccccttggtgttcacttttgggccaccaataaagagtgtgataggtgtcagggaagtgacatgaggtttttcaccagcgtggcctgctatggatcttgtctctttgcatctgagttgctgatcagatgcaaggactggctcaaaggaagaccagctctcttcactgccctgctagcttgtgtcctttatctttgggtgtctgacccgagcatgtcttcccttggggatgttgaaatgcttcaggccagtacatctaacccaatccctggagatggtttctctcgggccactaaggactctatgatccgcaagtttttagaaggcaacagcatgggaatgaccaatctggagagagatcagtgccatcttggtcaggaagaagatgtttatcacacggtggatgacgatgaggccttttctgtggacctggccagcaggccccctgtcccagtgcccagaccagagaccactgctcctggtgctcaccagctgcctgacaacgaaccatacatttttaaaggcaacctgagggcttcctctggcacctggcaccttctctgccctcttataggacaggttgaaagcactggggaattaacacacggagttgctgccctcaaccagtgcctgacaggaggtatggatgagtgccccagcttacttgcatcctccgggaggtgtttggacaggggcacaggtgattcctcaagagccctgatggacttgctaggaaactgtggagaagcgaaggaaaggagagaggcaggagatgacaaaaggggcaatggcttggatgccagaacacctgggttcatctctcagctcttgcattttccagctgttcagcataggatattggtttttgcagaaaaaagtcaagagcggcctgggaatttctacgtttcctcagagagcatcaggaaaggacacacccacacagtaaggaattacctggcccaaaatgtcaatagtgccaaggttgagaaatacttgtctaaaggcgtctcaataattaaggcttggctgcttcttcaagaaaacaccaaatggtggatgatgctgatgcagtgggagggcctgggggtcctggaatggcaggctgcgatggcctccctggaggctttggcagtgacatcaggccaaggttgtggctgtggctggggccaaggctctggagctcatagaggggcactaagcatcatcttggcctctgtgcccaagaagctgctgctgatggctgctacgccttggccagggaccgcactgccaccctgggccacctttgatgccatctctaagactgctagcaactggatccctgacctctggaaagagactgtattcaccaagtttccctaccaggaattcactgaccatctctcaagacccacaccagagtctctaagcagaagacgcaggttccagctgtggctacaacggccgcccgtcagaccatggagggacaggccccagtcgagtatatatgacccttttgcgggaatgaaaacgccaggccagcggcagcttatcaccctccaggagcaggtgaagctgggcattgtcaacgtggatgaggctgtgctccacttcaaagagtggcagctcaaccagaagaaacgatcggagtcctttcgtttccagcaggctgcttccttcaaagtactagccaggcccgaccctgcttaccctcagagatcagatgggattgggcgcgttcagggtgttatggctatagaccctggtgacttggagatcacggtcccaattcggcactcacagcacctgcctgcaaaagtggagtttggagtctatgagagtggccccaggaaaagtgtcattccccctaggacggagctgagacgaggagactggaaaacagacagcacctccagcacagcaagtagcacaagtaaccgctccagcacccggagcctcctcagtgtgagcagcgggatggaaggggacaacgaggataatgaagtccctgaggttaccagaagtcgcagtccaggccccccacaagtggatgggacacccaccatgtccctcgagagaccccccagggtgcctccgagagctgcctcacagaggcctccgaccagggagaccttccatcctcctccacctgttccacccagaggacgctgattccacctcctaaaacctgcctacttcaggactttaagactcacagtcttcagcctgttaatgatgtcttcatgttgagttttatagcatgactgttgaccttaagatccattctcattgctgataatgctgcagccctgctggtttgggcttgcctcgaagattttattaaggcacgaagaagtgaaaaactaagggcttcattcaccatcaccaagtatatcgaaccatatacttgtttgccaaaaggatgaagacttaatcgaaatacttacctctaatttgccatatcagaagcctaaaaagaatgatcataaatgtacttcaccagtgattttactgaaatgcacttatattagtctttatgtatttgctagttcagcctgatttctagaagaggttatagtgtgagacttgtagtattcaagtaagataagtgacctaattttaaaataattctt

SEQ ID NO: 153271 - DNA, 691 bp, Homo sapiens
tcaaaaagcacttcccttctttccatggcgctcaggggcatccagtcctcctgagccatggcagaagatcatggcttgagcaatggtgatggccccgtagaggttacacaaggcctggaacttctcgtctctgctgctgcacaggacatagtactgcttgatggtatccagggtctcttcctcacgcttcagtttgataacatttgggtctgggaccactttctgggcaaacttccacacagagtcttcaaaggtggcggagaaaagcagcatctggcagttcctgggcagcatcctctggatgcggatgctctgatcttggtggccctgagtggctatcatgacatcagcctcatccagaacaaacaccttgattttcttgggatcaatgaacttgagcttggagcaccagtccagcacggtcccaggggtgccaatgacaatctgctcactgatcttctggcctctttccaatttattgcctcgaacggcataggcaagcttcagttctgggtaaaatttgcccatctgctcaatcacttttcctgtttgaagcgccagctcatatgttggggagaggcacagacactgggggtatctgtctgatggctccactcggctgagcatggctaagacaaaggcagctgttttaccagtgccagactgagactgggcaatcagattctgtggg

SEQ ID NO: 153272 - DNA, 563 bp, Homo sapiens
gtctgtgcagcagcagagcgagaagttcaaggccttgtgtaacttaccgggcccatcaccatggctcaagccatgatcttctgccatactcgcaaaacagctagttggctggcagcagagctctcaaaagaaggccaccaggtggctctgctgagtggggagatgatggtggagcagagggctgcggtgattgagcgcttccgagagggcaaagagaaggttttggtgaccaccaacgtgtgtgcccgcggtgagcagaggacgtgtcccacctggtctgccaggctcggggtcccaggcccaattagagccagaaatccttgtatacagggaagtcggatggtctcagggagatgggtggggttggtgacactattcctttctaggagagactgtttggatttccctgaggtggtaagaactcacacatgccaggtgcggtggctcatgcctgcaatcccaaggcaggaaaattgcttgaaccctggagacagaggttgcagtgagccgagaatgtgctatagcactccatcctgggtgacagagtgagactctgtctccaa

SEQ ID NO: 153273 - DNA, 879 bp, Homo sapiens
atgctgaagaatgaagagccccgacgaagacccatcatgagcaaccacacagctacgcacattctgaacttcgccctgcgctcagtgcttggggaagctgaccagaaaggctcattggttgctcctgaccgcctcagatttgactttactgccaagggagccatgtccacccaacagatcaagaaggctgaagagattgctaatgagatgattgaggcagccaaggtcacaggaagctgggagcgggaccctgaaagaactcgagttctgtccttagatgttgggcatgcagcaggcaaagggagaatgagaggagacaaggacctggcttcccatctacagactgttcagccaaggccatgctcagagtgggatctgctaaatgggcacagcagaacattggaagaagcacctttgagccagtgctgctggggtctccgtggattagagccaggagccctgatgaggcctgtggggggggcttcactttcgaccctgagaagccaactccacatctccttccctctcacccttgagccgtgggtagttcagggaggccacagccttgctttctgtgccatggcctatcccaaagtcacctccactcacaacgtcgtgactttaggcattgatgttgaacaagtgtctgtcgtcatcaactttgatcttcccgtggacaaggacgggaatcctgacaatgagacctacctgcaccggatcgggcgcacgggccgctttggcaagaggggcctggcagtgaacatggtggacagcaagcacagcatgaacatcctgaacagaatccaggagcattttaataagaagatagaaagattggacacagatgatttggacgagattgagaaaatagccaactga

SEQ ID NO: 153274 - DNA, 482 bp, Homo sapiens
  misc_feature (1)...(482): n = a,t,c or g
gaaaagaagacacatctcccaaccttttatttacgtctggcagaattttacggagtgaatgatttacgcgaagcaggtaaatggaaaatgtgattgacagctatctctgattctaattgggccagcagagctaggagggccatctggcagagcttttccttatgggcccagtggggagggggaatttgggactctctttgccctgtagctcttgagtctaaggtaatccattgtcgtcctattccttctgctccatgtgtctcacagaactggaccccatcctgactgaggtcaccctgatgaatgcccgcagcgagctatacttacgcttcctcaagaagaggattagctctgattttgaggtgggagactccatggcctcagaggaagtaaagcaagagcaccagaagtntctggacaaactcctcaataactgccttttgagctgtaccatgcaggagctaattggcttatatgttacc

SEQ ID NO: 153275 - DNA, 471 bp, Homo sapiens
tgtctctatttcaattaaaaacaaccaaaacacaatctagggtgatgggtgcaatctatgattcttcctggttccaggaagacagacaggcagctgagcgctttaccgataggagcactcacctgcgcttacgtaacgcggaggcggctgcgtaaacaaagccagctcagggtccaggctccatccctatcctccccgccaccccatccagcctttaatcaacctgggaaacattctttcccagggaccaagtctccgaccagaactagtcccctgacccttttagggctgaagccaactcaccgactcagccgcagcttcctgctcgtccaccgccagggcccatgagtcagtggccatggtcccaggcgcgggtgggacgctcgtgctggtgcattcgagggatggcacgaggaatcgtgggctccagaggttcgcggcaggctctgcagaaatcgggaccgggaacca

SEQ ID NO: 153276 - DNA, 701 bp, Homo sapiens
ttcaagtgctaataacatcagcatactgggtgccttcaggtctgttaccaaatggctctcctaaactcatcctttatgatttttctgtcagtgtctgtgcctctccccaacatatgagctggcgcttcaaacaggaaaagtgattgagcagatgggcaaattttacccagaactgaagcttgcctatgccgttcgaggcaataaatgtgagtacggcaggcgacaactgaacagtgagcagggtagggggttgggcgtttgaattttgaagatgcgatgaccgtattcaactttctaattcagtctgaccctggagcctaactgtgttgctctatttgaatctatttgaatacctgctaatttgttaacagtctttttcagtcttaaaataagattttcgggttgattaaaaaaaaaaatccccgcatgtctcacagagttcttaatatctagagttcttcgctcagaaggtagagttttgaatttagcgtccagagttctgggacctgctaccaaagagggattaacaggactgaggatggaaggttggggtcagctccctttctttaaaagtaagcaaaaccaggtacagtggctcacacctgcaatcccagccctttgggaggccagggtgggaggactgcttgagcacatggttcgagaccagcctgggcaacatagtaagacaaaaaaaaaaaaaa

SEQ ID NO: 153277 - DNA, 5758 bp, Homo sapiens
  misc_feature (1)...(5758): n = a,t,c or g
ccttccaaaggttgtgtaaataattttttttctaccatcccccatcatttgcatacatttttgtcaagtccaaacataaatttgaagtgaggtaaggtagtttctctctacttgtgccgttgtccttggggtgatgtcggggcctgtgccctgaacggcacttgtctcctgtgcaggggcagtgccagggctggcatcaagtggctggtggagcttctcaagttggctaattttctcaatctcgtccaaatcatctgtgtccaaatctttctatcttcttattaaaaatgctcctggattctgttcaaggatgttcatgctgtgcttgctgtccaccatgttcactgccaggccccttcttgccaaagcggcccgtgcgcccgatccgggtgcaggtaaggtctcaatgtcaggaattcccgtcccttgtccacgggaagatcaaagttgatgacgacagacacttgttcaacatcaatgccgcgggcacnacaagttgggtgggtcaccaaaaccttctctttgccctctcggaagcgctcaatcactgcagccctctgttccaccatcatctccccactcagcatgaccacctggtggccttcttttgacgagctctgctgccagccaactagctgttttgcgagtatggcaaaaagatcatgccttgacccatgtgattggccccgtagaggttacacaaggcctggaacttctcgtctctgctgctgcacaggacatagtactgcttgatggtgtccagggtctcttcctcacgcttcagtttgataacgtttgggtctgggaccactttctgggcaaacttccacacagagtcttcaaaggtggcggagaaaagcagcatctggcagttcctgggcagcatcctctggatgcggatgctctgatcttggtggccctgagtggctatcatgacatcagcctcatccagaacaaacaccttgattttcttgggatcaatgaacttgagcttggagcaccagtccagcacagtcccaggggtgccaatgacaatctgctcactgatcttctggcctctttccaatttattgcctcgaacagcataagctagcttcagttcagggtaaaatttgcccatttgttcaatcacttttcctgtttggagggcgagctcatacgttggggagagacatagacactgggggtatttgtttgcaggttctacttggctaagcatggccagcacgaaggcagctgttttaccagtaccagactgagattgggcaattaagttctgtgggggctcagcaagcatcagtggcaatgcgttctcttgtatcttggatggacgattgaaacccatggcatagactccttggagaagctgtggtttcaagccaaagctcttcaaaagctatcaccgagtccagaggggagtttggatccagctgcaggaattccacttggtttgtgttatcaacaaggttgcttctgatcagcttgttgagtaaggactgggcagctcagtcctctttctcttcttcatcagtcttctatgcatgggcattggtcttgacaacaggcaccattggtatctggtttgattttctcttccttaagatgcaagttgctcaacgactcagccgcagcttcctgctcgtccaccgccatgggcccatgagtcagtggccatagtcccggacaagggagacccacttgtgaaaatatgcgctgcaccacgtcgcaacgcgggccctaacctcgccaccggcgcgagaatgcacctcacgcggaccggaagcggcggtgagcacagcacctacgccccagtgaagtccttccttcgagtggataaagaaaaggtccagatctacaacccagccttcttcaagtatatccacgacaggtggacagagcatcacgggcgggataagttcttccagaaagatggtataagccctgaacttcagagactggtgaagaagcccacgttttaccacatcaacctgtggctgttagatctggcaggcctttcccctctgcaggtggtgtcactcgtggtgtttaaacccattttcctgaacacaattgacccatctcaccccatggcaaagctgagcagagctgccaatacccagaagtgcatccgggctgggggcaaacataatgacctggacgatgtgggcaaggatgtctatcatcacaccttcttcgagatgctgggctcttggtcttttggagattactttaagggctggacgctgctgcacgcctgtaatcccagcactttgggaggccaaggtattatcaaaaccagtaccactgccgagaaaacagatgaagaggagaaaggtaactacttttggatgcccttggcaagagacgaggacagagctgcccagtccttactcaacaagctgatcagaagcaaccttgttgataacacaaaccaagtggaagtcctgcaacgggatccaaactcccctctgtactcggtgaagtcgtttgaagagcttcggctgaaaccacagcttctccagggagtctatgccatgggcttcaatcgaccctccaagatacaagagaacgcattacccatgatgcttgctgaacccccacagaatctgattgcccagtctcagtctggcactggtaaaaccagcctgcctttggtcttagcccatgctcagccggagttgagcccatcagaccagataccccccagtgtctgtgcctctcccccaacatatgagctggcgcttcaaacaggaaaagtgattgagcagatgggcaaattttacccagaactgaagcttgcctatgccgttcgaggcaataaattggaaagaggccagaagatcagtgagcagattgtcattggcacccctgggacccgtgctggactggtgctccaagctcaagttcattgatcccaagaaaatcaaggtgtttgttctggatgaggctgatgtcatgatagccactcagggccaccaagatcagagcatccgcatccagaggatgctgcccaggaactgccagatgctgcttttctccgccacctttgaagactctgtgtggaagtttgcccagaaagtggtcccagacccaaatgttatcaaactgaagcgtgaggaagagaccctggataccatcaagcagtactatgtcctgtgcagcagcagagacgagaagttccaggccttgtgtaacttctacggggccatcaccattgcccaagccatgattttctgccatactcgcaaaacagatagttggctggcagcagagctctcaaaagaaggccaccaggtggctctgctgagtggggagacgacggtggagcagagggctgcggtgattgagcgcttccgagagggcaaagagaaggttttggtgaccaccaacgtgtgtgcccgcgttattgatggtgaaacaagagtctgtcgccatcatctttgatcttcccgtggacaaggaccgggaatcctgacaatgagacctacctgcaccggatcgggcgcacgggccgctttggcaagaggggcctggcagtgatacatggtggacagcaagcacagcatgaacatcctgaacagaatccagggagcattttagcccctggtactcagtcacggcagccaggagaccccaggtggccagtaaagctgaggagaatctgctcatggtgctggggacagacatgagtgatcggagagctgcagtcatctttgcagatacacttactcttctgtttgaagggattgcccgcattgtggagacccaccagccaatagtggagacctattatgggccagggagactctataccctgatcaaatatctgcaggtggaatgtgacagacaggtggagaaggtggtagacaagttcatcaagcaaagggactaccaccagcagttccggcatgttcagaacaacctgatgagaaattctacaacagaaaaaatcgaaccaagagaactggaccccatcctgactgaggtcaccctgatgaatgcccgcagtgagctatacttacgcttcctcaagaagaggattagctctgattttgaggtgggaggactccatggtctcttaggaagtaaagcaagagcaccagaagtgtctggacaaactcctcaattaacttgcctttttgagctgttaccatggcagggagctaattggcttatatgttaccatggaggagtacttcatgagggagactgtcaataaggctgtggctctggacacctatgagaagggccagctgacatccagcatggtggatgatgtcttctacattgttaagaagtgcattgggcgggctctgtccagctccagcattgactgtctctgtgccatgatcaacctcgccaccacagagctggagtctgacttcagggatgttctgtgtaataagctgcggatgggctttcctgccaccaccttccaggacatccagcgcggggtgacaagtgccgtgaacatcatgcacagcagcctccagcaaggcaaatttgacacaaaaggcatcgagagtactgacgaggcgaagatgtccttcctggtgactctgaacaacgtggaagtctgcagtgaaaacatctccactctgaagaagacactggagagtgactgcaccaagctcttcagccagggcattggaggggaagcaagcccaagccaagtttgacagctgcctttctgacttggccgccgtgtccaacaaattccgagacctcttgcaggaagggctgacggagctcaacagcacagccatcaagccacaggtgcaggcttggatcaacagctttttctccgtcttccacaacatcgaggaggaagaattcaatgactatgaggccaacgacccttgggtacaacagttcatccttaacctggagcagcaaatggcagagttcaaggccagcctgtccccggtcatctacgacagcctaaccggcctcatgactagccttgttgccagtcgagttggagaaagtggtgctgaaatccaccatttaaccggctgggtggtctgcagtttgacaaggagctgaggtcacttcattgcctaccttaccacggtgaccacctgggaccatccgagacaagtttgcccggctctcccagatgggccaccatcctgcaatctggagcgggtgaccgagatcctcgattactggggacccaattccgggcccattgacgtggcgcctcacccctgctgaagtgcgccaggtgctggccctgcggatagacttccgcagtgaagatatcaagaaggctgcgctggtaagctagcctggatgagcacacctgggctcatcacactttgcagggcctgtttccctaaaggggccccagccaaggaagctgagcgaggctgtcgggccttgggggaagatctgaacagccccagaccttttctacggctggcagcagagaaacaaagtctggacccactcccatgctctgccctcagacctggccaaggtaatgctttgggggcagcatctcccccccgaaagaagcgggctcctaattagggtgggaaagccccggcaggcagcgagcagcccaggccagctttttgcatggatggtcagtctcttgccctcaaacactacagcaaacaagctacccctgccagtcctagacaacttgggtacatctggggacctagcagttaggcttgactttgaggagaggctgtgatgtttatgatccctgaataaagctactccttggagagaaaaaaaaaaaaaaaaa

SEQ ID NO: 153278 - DNA, 1029 bp, Homo sapiens
  misc_feature (1)...(1029): n = a,t,c or g
cccccccccacgganaagggntaaaaagatacaaaaagaagaaanggccaaacaaaataacggggacccttggaattccaaantgcggcccaaaagtnaggtttgaaccganttganctgtttantacggtctgctgtgcctgaaagatacngttccaatgtctccctgcccncagtgttaactaatgaaaaaaacctggctgttagtcctgagccctccttaagtttgtaggtagtaacccttacaggtagtaatctatatttttactgttctctctttatcttcagtgtgttgccagatcaggatgtgtccctagtgtagatttgttatttatccctgcccctagacatagtgtgcttctgtaatgtgaagattcagttttttttcttcaagtctggaaagttattattaatttttaaccatcttcccccattgtttctattttcttctaaaaactccttttaaacatagggagctttttattcttgtcttcggtctcttaaaaatctttcaatttgctaattcttttacttaatcctcctactgagattttatttcatcaacttttgttttcttttggatttgtttctattttggatttttatttggtattttgtcattttcgcgtgttcttggtttattggtgtttctttaaagttcttgttagttccattagctcctttttcctgcggtgtcggcattctcccttattttagggagcaagttgaacagacttgtatattttgggctgcataccttttccctaagtgtgtcttttgtgggagttctgtggaggtttatagagacttccctgtaggatagtttgacatttgcattttcctggcttcccattctgtgcaaggagcatagttcaaactccctgccttccatacctgggttctgaagcctcagcttccagtactgttgactgttgaaaatccttgccctaaaatcccacatacagtttttatgactgttggatatctttatatgaatttcattatagtttctttcacttatgaggtttt

SEQ ID NO: 153279 - DNA, 494 bp, Homo sapiens
ttggcccctgacttaattcgtagcaaggcaggctgccgtcttttggctttgaagggtccgtttgctgtacctccagggtgaattctgtggtcagctcacaccatgtcactcggcttttttcgcatggcggtgaccagtagtgctgtctacctggctgacaaatgattagctgtgttctctcacaggtcagagtggtgctgggaacaactgggccaaggggcactacacagaaggcgcggagctggtggactcggtgctggatgttgtgagaaaggaggctgagagctgtgactgcctgcagggtttccagctgacccactccctgggtggggggactgggtctgggatgggtaccctcctcatcagcaagatccgggaggagtacccagacaggatcatgaacacgtttagtgtggtgccttcgcccaaagtgtcagacacagtggtggagccctacaacgccaccctctcagtccaccagctcgtaaaaaaca

SEQ ID NO: 153280 - DNA, 1633 bp, Homo sapiens
cgcgcccgctcttctgctgctgtttgtctacttcctcctgctttaccgacgtcggcggcgggattatgaagggaatcgggcacttggcagcccggcaaggccggaacccaaacgggggccaagttttgggaggtgatcagcgatgagcacggcatcgaccccacgggcacctaccacggggacagcgacctgcagctggaacgcatcaacgtgtactacaatgaggccaccggcggcaagtacgtgccccgcgccgtgctcgtggatctggagcccggcaccatggactccgtgcgctcggggcccttcgggcagatcttccggccggacaacttcgttttcggtcagagtggtgctgggaacaactgggccaaggggcactacacagaaggcgcggagctggtggacttcgtgcttgaatgtttgaagaaaagaagcttgaaagctgagactgcctggcagggtttccagctgacccactccctgggtggggggactgggtctgggatgggtaccctcctcatcagtaagatccgggaggagtacccagacaggatcatgaacacgtttagtgtggtgccttctcccaaagtgtcagacacagtggtggagccctacaacgccatcctctcaggccactcagctcgtagaaaacacagacgagacctactgcattgataacgaagctctctacgacatttgcttcaaaacccttaagcttgaccaccccccccttttggggacttgaaccacctggtgtctgctaccatgagtggggtcaccacctgcctggcgcttcccaggccagctcaatgctgacttgcggaaagtggctgtgaacatgggtcccgtttcccccggctgcacttcttcatggtgcggctttgcccccactgaccaagccggggcaagccaagcaagtacccgggcgctgaccgtgccccgaagctcacccaagcaagatgtttgatgcccaagaacatgatgggctgcctgcgacccccgcgcatgggccgcttaccttgacggtttgccgccgtgtttcaggggcccgcatgttccattgaaggaggtggatgagccaaatgcttaaatgtccaaaaacaaaaacagccagctatttttgttgagtaggatcccccaacaatgtgaaaaacgggctgtctgtgacattccccaccttcgggggctaaaaaatgtccgcccaccttcatttggcaaacaagcacggcccatcccaggagctttttcaaagccgcatctcccgaagcagtttcacggcccatgtttccgccgcaaggcccttccctcatttataaccgggggcgagggcatggacgagatgggagtttcacccgaggcccgaaagcaacaagaatgaccctggtgtccgagtaccagccagtacccaggatgccacagccgaggaaggagggcgagttcgaaggaagaagcttaggaaggaaggtggcctagagcctttcagtcactggggaaagcagggaagcagtgtgaactctttattcactcccagcctgtcctgtggcctgtcccactgtgtgcacttgctgttttccctgtccacatccatgctgtacagacaccaccattaaagcattttcatagtgtgaaa

SEQ ID NO: 153281 - DNA, 388 bp, Homo sapiens
cttaggctgtggttgctattgaaggctatggtggggctttgttggggacaggagaaccaggcaggctggtccatggacaccagtggtagggacagctggctaaacatcaggttcgtgaaccccctggcagcctacatgggcactagtagtagcaggtctgggtagaccaattcttgggcctccaggtggcttgcttgagtgctggcagcggcagcagtgggccagatgggtgtcaggtccgcaggccccttggcagcattcattgcataagcagtggcagtagcagcaggaggccaacccttcagcccccttgcagcacgtgagtaccagcaattgcagtggtgggctgaattggccaatcctcaggcctccaggtggcacacagatg

SEQ ID NO: 153282 - DNA, 556 bp, Homo sapiens
tgactgtagttaaatagttgctatttatcataattttattaaagttcagactgaatgtgattagcttatttaatgaaagagtcctattttccagcacatttcatttaatggctgagcattggctagaatactaatgacttttatgtctgctttatatagttgctcaggagaattagaaggcttaggatcaatatggtaaagattttttttaaataattatgtaattcttaaattctcttactattctaaattaggtatatttaatcttgcttttaactggattcaaatctgtagtattataaaagaataccagaggctaaaaggttgactaacactgtgtttaatttttcaatttttagtcatagcacacatcggacatttggaaaacagcagtggcaacaactgtatgacacacttaatgcctggaaacaaaatctgaacaaagtgaaaaacagccttttgagtctttctgatacctgagtttttatgcttataatttttgttctttgaaaaaaaagccctaaatcatagtaaaacattataaactaaaaaaaaa

SEQ ID NO: 153283 - DNA, 1170 bp, Homo sapiens
atggtggaattgctcggaagttacacagaggacaatgcttcccaggctcgagttgatgcccacagttgcgccagcagcgtcgcgcggcccagttcccttttccggtcggcgtggtcttgcgagtggagtgtccgctgtgcccgggcctgcaccatgagcgtcccggccttcatcgacatcagtgaagaagatcagcagcaaaacgaaaaataccgagtgcctcaattcgatcaatcaacgattaaaaatattgagtctgcaaaaggacttgatgtgtgggacagctggccgctgcaaaacgctgacggaacagtagctgaatacagcggctatcacgttgtgtttgctcttgcgggaagcccgaaagacgctgatgacacatcaatctacatgttttatcaaaaggtcggcgacaactcaatcgacagctggaaaaacgcgggccgtgtctttaaagacagcgataagttcgacgccaacgatccgatcatgaaagatcagacgcaagaatggtccggttctgcaacctttacatctgacggaaaaatccgtttattctacactgactattccggtaaacattacggcaaacaaagcctgacaacagcgcaggtaaatgtgtcaaaatctgatgacacactcaaaatcaacggagtggaagatcacaaaacgatttttgacggagacggaaaaacatatcagaacgttcagcagtttatcgatgaaggcaattatacatccggcgacaaccatacgatgagagaccctcactacgttgaagacaaaggccataaataccttccgaaccgcgggcatgcaagatccagtcgcagaagacaagaaatatctaagatcagagaagaactgaaggagatagagatacaaaaaccccttcaaaaaattaatgaatccaggagctggttttttgaaaagatcaacagagtagatagactgctagcaagactaatgaagaaaagagagaagaatcaaatagtcgcaataaaaaatgataaaggggatatgacgactgatcccacagaaatacaaactactgtcagagaatactataaacacctatacgcatataaactagaaaatctagaagaaatgggtaaattcctggacacatacacccttccaagactaaaccaggaagaagttgatctctga

SEQ ID NO: 153284 - DNA, 1403 bp, Homo sapiens
ggtccggaattctggggacgacgactccgtcttttccggtcggcgtggtcttgcgagtggagtgtccgctgtgcccgggccctgcaccaatgagcgtcccggccttcatcgacatcagtgaagaagatcaggctgctgagcttcgtgcttatctgaaatctaaaggagcctgagatttcagaagagaactcggaaggtggacttcatgttgatttagctcaaattattgaagcctgtgatgtgtgtctgaaggaggatgataaagatgttgaaagtgtgatgaacagtgtgggtatccctactcttgatcctgggaaccagacaagcaaggaagcttttgattgaaagcctatgttgaaaagctgggtccaaatttccgcgaaggtgaaccgccccgtctcttgagactgcagtttgttaaggcaaccttttccacgggaatggattaggaaatactccctgtaaagatacacagtgttatttgcagcctttattaaagtgggcagcatcttgtgggggccatccagtaccatccccaactggagcctgggatcaagtttagaaaatgggatttcctgaactggaatcctaaccactggaaaaaaaagcacaccccttttaaagactacctttatgaaggcacttgtggattgtaagaagagtgatgctgcttcaaaaggcatgggtggaattgctcggaagttacccaggagggcaatgcttcccaagggctcgagttgatgcccacagggtgtattgtaccgagcattgaaagatccaaattgcatttccttttgacccaccttcttactttaaaaccacgtcaagttttttggaaaggcgagcttattccattgttcctttttaaccaaattttgtgagtgcctaaatgggccatcatatgtccaggttttatccggattaattaaggaccttccattgaattccacttggccctgttaccatggacccaggaatatggccaaaaatgaggcttcttttccttttatggggaatgggccagtaggaaaataggggaaatttccttttggaccacaatgccagcaaggaacttcaggattggagcctgatgatggttgaagcatttgttattgacgccggtaaggaactaaaaatggtctactgccaaaattggtccagaccccagagaaaagtagttgtcagtcatagcacacatcgggacatttggaaaacgagcagtggcaacaaactgtattgacacacttaatgcctggaaacaaaatctgaacaaaggtgaaaaacagccttttgagtccttctggatacctgaagtttttatgcttataatttttggttctttgaaaaaaaaggccctaaatcataggtaaaacattataaactaaaaaaatttgaaaaaaaaa

SEQ ID NO: 153285 - DNA, 2656 bp, Homo sapiens
gcgatctcggctcactgcaagctccgcctcctgggttcacgccattctcctgcctcagcctcccaagtagctgggactacaggcacccgccaccacgcccggctaaattttttgtatttttcagtagagacggggtttcaccatgttagccaggatgtccacttttttcttaaatgaacatattgtcttataaccagcaaatgaagttttacttttttgatcagcaaagaatttggtcatagagctatatttttatatttttaaaattgatacagttagataccttcagattacctaagttaagtttttgccaaaatgctattttatgccctttttgtaaagttatgatttattttgtaaatatagttccttatagttttctcttgagtgtttgggacatgagaatagataagattaaattacaatttacaagatcacttcattaggcacaggaaaagtatttaacaaaattcaacaccctttcacaataaaaaataaaaaataaaaaaccctcaacaaactaggaatagaaggaaacttcctcaacctgataaagggcatctatgaagaacccatggttagcatcatacttaatggtgaaggactggattatttccccctgagatcagaaacaagacaaggatgtctgctttggccatttctattcaacttgtactggacagtcaagaaagggcaattaggcaagaaaataaaataaaagtcatctaggttggaaaggaagaagtataactaaatagagatgggagacgatatggtggttttgtgcatagtaatccaagggaaaactatagaaaatccaaaggcatgatttattaataaataaattcagcaaagttacaggatacaggattaaatatgcaggaaattggttatctttcacatatagtatcaactgaataaatcacaaaatgatgttaagaaaacaatttaattttcaacaatggtcaagcttggtggcttgtgcctgtaatcccaacactttgggagtctgaggcagaaagactgctagaggccaggagaccagcctgggaaacagtgagatcccatctctacaaaaacaaacaaacaaaaaacaacaagcaaacaaaaaacagctggatgtgatgacactcatctgtcgtctcagctactcagaggctgaggtgtaaggatggcttgagccccaaagttcgaagctgcaatgagctataactgggtcactgcaatccagcctggatcgacagagttagaccttgactcaaaaaaaaacaaaaaagaaaagaaaaaaattgacagcatcagaaagagtaaaataccaatataattgagggtccagaaatattgatcacatttatcatccaactgacttttggaaaatagtgcttaaggacaattccaatgggggggcaaaatagtctttttcattaaatgatgcttggaaacatggatatccacatggcaaaataatggaaattgggactcctacctcatattgcatataaaaattaactcagagttgacctaagatctaaatgtaagagctaatattgtaagtatcttcaaagaaaacatggcgtaaatctttctgactttgaattaggcaatgatttcttaaataaatgacactaaaaacacaagcaacaaaagaagaaaataggtaaattaaaattaaaaccatttgtgtttccaaggacaatatcaagaaagcaaaaatacaacccacagaatgagataattttttttaaaatcatgtattagttaagggaggaatttgtatttagaatatgtaaagaactgttacaataataattaaaaggcacataattcaatttttaaaaattcaacaaggggtctggaattaacagttctccaaaggaggatacacaaaagggccattaaggcacatggaaaaggtttctcaaccttcactagccatcagggaaatgcaaatgagatctacaatgagatatcacttaacactcactggaatagatatataatcaaagtgataatatcaagtgttggtgaggatgcagagaaattggaaccctcatgcactgttggtggatacccacgtgatataaaaacaaatgtctacacaaaaacttgtgcacagatgttcttgccggcattatttatataggcccaaaaatgaaacggcccctaatttctatcaactaacaagtgcattaaccaaaacgtggcatatccatacaaggaatattattccagccaataaaaaaaagagatgaaagtactgatatggccccccacaaccatggaaaaacccctggaaaaaccatatccaagtgaagaatgccccagacatgaaaggcccacatattatatgatttccatttatatgaaatgtcccagaacaggcgaatatatatagagagaaggcagattagtgggtgccttaggctgaagggttggggaggacaaaggggtgactgctaattagtatggggtttcttttttggggtgatgtaaacgttgtaaagttgattgtggtaatggtggcacaactctgaatatactaaaaaccactgaattgtatactttgaatgtttgaactgtgtggtatgtagattttatctcaagttgttataaaaaattaaattacaaatgcaaaaaaaaaaaaaaaaaaaaaatt

SEQ ID NO: 153286 - DNA, 445 bp, Homo sapiens; identical to SEQ ID NO: 146232

SEQ ID NO: 153287 - DNA, 1622 bp, Homo sapiens
caatcccccctcccccggcagcttggagcacggaggagggatgagggaggagggtgcagcgggcgggtgtgtaaggcagtttcattgataaaaagcgagttcattctggagactccggagcggcgcctgcgtcagcgcagacgtcagggatatttataacaaaccccctttcaagcaagtgatgctgaagggataacgggaacgcagcggcaggatggaagagacaagcactgcactgcggaatgcctgggaggaaaagggggagacctttcatccaggatgagggacatttaagatgaaatgtccgtggcaggatcgtttctcttcactgctgcatgcggcactgggaactcgccccacctgtgtccggaacatgctcgctcacgtcggctttccccttctgttttgttctaggacttctgcacggacctggccgtctccagtgccaacttcattcccacggtcactgccatctcgaccagtccggacctgcagtggctggtgcagcccgccctcgtctcctctgtggccccatcgcagaccagagcccctcaccctttcggagtccccgccccctccgctggggcttactccagggctggcgttgtgaagaccatggacaggaggccgagcggcagagcatttggcaggagggggcaaggtgggaacaggtgaggaacttctagcgtactcttcctgggaatgtgggggctgggtgggaagcagccccggagatgcaggagcccagtacagaggatgaagccacttgatggggcttgcttgcacatccgtaactgggagccctggctccaagcccattccatcccaactcagactctgagttctcaccataagaagtactctcatagtttcttccctaagtttcttaccgcatgctttcagactgggctcttctttgttctcttgctgaggatcttattttaaatgcaagtcacacctagtctgcaactgcaggtcagaaatggtttcacagtggggtgccaggaagcagggaagctgcaggagccagttctactggggtgggtgaatggaggtgatggcagacacttttactgaatgtcggtctttttttgtgattattctagttatctccagaagaagaagagaaaaggagaatccgaagggaaaggaataagatggctgcagccaaatgccgcaaccggaggagggagctgactgatacactccaagccggtaggtactctgtgggttgctcctttttaaaacttaaagggaaagttgggagattggagcataagggcccttgagtaagactgtgtctttatgctttccctttatccctctgtatacagggagacagaccaactagaagatgagaagtctgctttgcagaccgagattgccaacctgctgaaggagaaggaaaaactagagttcatcctgggcagctcaccgaccttgcctggcaagattcccttgatggacctggggctttcccagaagagatgtctgtggcttcccttgatctgactgggggcctgccagaggttgccacccggagtctgaggaggccttcacctgcctctcctcaatgaccctgagcccaagccctcagtggaacctgtcaaagcatcagcagc

SEQ ID NO: 153288 - DNA, 2153 bp, Homo sapiens
  misc_feature (1)...(2153): n = a,t,c or g
aaccgcatctgcagcgagcaactgagaagccaagactgagccggcggccgcggcgcagcgaacgagcagtgaccgtgctcctacccagctctgcttcacagcgcccacctgtctccgcccctcggcccctcgcccggctttgcctaaccgccacgatgatgttctcgggcttcaacgcagactacgaggcgtcatcctcccgctgcagcagcgcgtcccccgcccgggatcagcctctcttactaccactcaccccgcagacctcctttttcagcatgggctcgcctgtcaacgcgcaggacttctgcacggacctgggccgtctccagtgccaacttcattcccacggtcactgccatctcgaccaagtccggacctggcagtgggctggtgcagcccgccctggtctccctctgtgggccccatcgcagaccagagccccttcaaccttttcggagtccccaccccctaccgctggggcttagctccagggctggcgttgtgaagaccatgacaggaggccgagcgcagagcattgggcagcaggggcaaggtggaacagttatcttccagaagaagaagagaaaaggagaatccgaagaggaaaggaatatagatggctgcagccaaatgcccgcaaccgggaggaggggagctgactgatacactccaagcgggagacagaccaactagaagatgagaaagtctgctttgcagaccgagattgccaacctgctgaaggagaaggaaaaactagagttccatccctggcagctcaccgcacctgcctggcaagattcccttgattgacctggggcttcccaggaaggagaatgtctgtgggttccccttgatctgactgggggcctgccagaaggttcccaccccggagttctgaggaggccttcacccttgcctctcctcaatgaccctgaggcccaaggccctcagtgggaacctgttcaaggaggcatcagcaggcatgggagctgaaaggaccgaggcccttttgatgatttcctgtttcccagcattcatccagggcccagtggcttcttgaggacagcccgttccgtggccagacatgggacctatcttgggtcctttttatggcaggcagattnggggagccttttngcacagtggctccctggggatgggggcccatggccacagaggctgggagcccctgtgcactccggtggtcacctgtactcccagctgcaactgcttacacgtcttccctcgttttcacctaccccgaggctgactccttccccagctgtgcagctgcccaccgcaagggcagcagcagcaatgagccttcctctgactcgctcagctcacccacgctgctggccctgtgagggggcagggaaggggaggcagccggcacccacaagtgccactgcccgagctggtgcattacagagaggagaaacacatcttccctagagggttcctgtagacctagggaggaccttatctgtgcgtgaaacacaccaggctgtgggcctcaaggacttgaaagcatccatgtgtggactcaagtccttacctcttccggagatgtagcaaaacgcatggagtgtgtattgttcccagtgacacttcagagagctggtagttagtagcatgttgagccaggcctgggtctgtgtctcttttctctttctccttagtcttctcatagcattaactaatctattgggttcattattggaattaacctggtgctggatattttcaaattgtatctagtgcagctgattttaacaataactactgtgttcctggcaatagtgtgttctgattagaaatgaccaatattatactaagaaaagatacgactttattttctggtagatagaaataaatagctatatccatgtactgtagtttttcttcaacatcaatgttcattgtaatgttactgatcatgcattgttgaggtggtctgaatgttctgacattaacagttttccatgaaaacgttttattgtgtttttaatttatttattaagatggattctcagatatttatatttttattttatttttttctaccttgaggtcttttgacatgtggaaagtgaatttgaatgaaaaatttaagcattgtttgcttattgttccaagacattgtcaataaa

SEQ ID NO: 153289 - DNA, 541 bp, Homo sapiens
  misc_feature (1)...(541): n = a,t,c or g
atggcagaaggcaaccacagaaaaaagccacttaaggtgttggaatccctgggcaaagatttcctcactggtgttttggataacttggtggaacaaaatgtactgaactggaaggaagaggaaaaaaagaaatattacgatgctaaaactgaagacaaagttcgggtcatggcagactctatgcaagagaagcaacgtatggcaggacaaatgcttcttcaaaccttttttaacatagaccaaatatcccccaataaaaaaggatatggagtcagcgctgagggcatttgctaccagaccagagcacaagtcctctgacagcacattcttggtactcatgtctcatggcatcctggagggaatctgcggaactgtgcatgatgagaaaaaaccagatgtgctgcttatgacaccatcttccagatattcaacaaccgcnactgctcagtctgaangaccaaccccaggtctcattgtccaggctgcagaagtgcaaacnttgggaactgttggtcagagatctcagcatccttgaaattgc

SEQ ID NO: 153290 - DNA, 1245 bp, Homo sapiens
atggggtctctggaaggcaaccacagaaaaaagccacttaaggtgttggaatccctgggcaaagatttcctcactggtgttttggataacttggtggaacaaaatgtactgaactggaaggaagaggaaaaaaagaaatattacgatgctaaaactgaagacaaagttcgggtcatggcagactctatgcaagagaagcaacgtatggcaggacaaatgcttcttcaaaccttttttaacatagaccaaatatcccccaataaaaaagctcatccgaatatggaggctggaccacctgagtcaggagaatctacagatgccctcaagctttgtcctcatgaagaattcctgagactatgtaaagaaagagctgaagagatctatccaataaaggagagaaacaaccgcacacgcctggctctcatcatatgcaatacagagtttgaccatctgcctccgaggaatggagctgactttgacatcacagggatgaaggagctacttgagggtctggactatagtgtagatgtagaagagaatctgacagccagggatatggagtcagcgctgagggcatttgctaccagaccagagcacaagtcctctgacagcacattcttggtactcatgtctcatggcatcctggagggaatctgcggaactgtgcatgatgagaaaaaaccagatgtgctgctttatgacaccatcttccagatattcaacaaccgcaactgcctcagtctgaaggacaaacccaaggtcatcattgtccaggcctgcagaggtgcaaaccgtggggaactgtgggtcagagactctccagcatccttggaagtggcctcttcacagtcatctgagaacctggaggaagatgctgtttacaagacccacgtggagaaggacttcattgctttctgctcttcaacgccacaaatattcttggtgctgccacctagaggaagtatttcggaagcactgttcacaatagcaaagacgtggaatcaacctaaatgcccatcagtgatagataggaataagaaagggtggtatgtatacatcatggaatactgtgcagctacatcatggaacatcatgctggaatactatgcagccataaaaagaaatcagatcatgtccttcccaagaacatggatggaggtggaagccattatcctcaacaaactaatgcaggaacagaaaagcaaacacctcatgttctcacttaaagtgggaactgaacaatga

SEQ ID NO: 153291 - DNA, 5365 bp, Homo sapiens
tttgactctgaggctctttccaacgctgtaaaaaaggacagaggctgttccctatggcagaaggcaaccacagaaaaaagccacttaaggtgttggaatccctgggcaaagatttcctcactggtgttttggataacttggtggaacaaaatgtactgaactggaaggaagaggaaaaaaagaaatattaccgatgctaaaactgaagacaaagttcgggtcatggcagactctatgcaagagaagcaacgtatggcaggacaaatgcttcttcaaaccttttttaacatagaccaaatatcccccaataaaaaaaggtgataaattggggtcacagaggcagaaatcacaatttatgttctgcaatatcctgcagctcatccgaatatgggaggcttggaccacctgagtccgggagaatcctaccagattgcctcaagcctttgtcctcatggaagaattcctgagactatgtaaagaaagagctgaagagatctatccaataaaggagagaaacaaccgcacacgcctggctctcatcatatgcaatacagagtttgaccatctgcctccgaggaatgggagctgactttgacatcacaggggatgaaggagctacttgaggggtctggactatagtgtagatgtagaagagaatctgacagccagggatatggagtcagcgctgagggcatttgctaccagaccagagcacaagtcctctgacagcacattcttggtactcatgtctcatggcatcctggagggaatctgcggaactgtgcatgatgagaaaaaaccagatgtgctgctttatgacaccatcttccagatattcaacaaccgcaactgcctcagtctgaaggacaaacccaaggtcatcattgtccaggcctgcagaggtggtgagtgctgagactgaacatctaacagttatgaaggtgtatgcagaggattgtgatgtttggtttatatttaggggcaacattcttaaacctcatccagtgtaaagaaagtacattgaattctaaagaaactctacctaagggtctggtataacaagaaattgtctcatcaaaattagtggagaaatttctgttcaattttatccacagtaagtggtgaaggagatcatcagaatccctaaatcaaagttaaacagaaatactcaaactttggaatggaatcattttcatgatagcttgatttgtaaatgttttacagaaattttgacattgtgtggtttgagaagaatttcatttgaaactggggccattatgtaaaacagcatccctttttcttataattattgagggggaaattagtaaagagatcaggggactgtagaatgttgcagtgccactttgctccaaagattcaattgcctcatggctggctgaggatggtggctcatgcctataatcccaacactttgggaggccaagacaggaggatggcttgaggccaggaatttgagaccaattgtctgatagctcttgggagctatttttcaaaagaaaacagattttttttctagaaaatggtaaattcaagatgatttcactatcagtaggcacattgttgaatgacactggagagaaagaaaagtggtgtgtgtgtgtgtgtgtgtgtgtctgtttctctgtgtgtgtttgtatgtgtgtgggtctgtatgtatgaaactagtaagaatgaacattcaaaaagaacaaggtgggcaactgtgacagccattctgtgggaggcacagcagtgtgcagaaagttaatgtctccatagcaaaccgtggggaactgtgggtcagagactctccagcatccttggaagtggcctcttcacagtcatctgagaacctggaggaagatgctgtttacaagacccacgtggagaaggacttcattgctttctgctcttcaacgccacgtatgtatctttcagtggcagtaagggatttgtgggcctgaggccatctttgaatgaatctagaaaatcaagaatccctatgaaacaatgatctgatagaatgttgtgtgctctccacatattttacatgatcttatgtgtgccgtgagaacagattcctaaagcaacccgatacatggaaacccattcaccactcaccatttaaacagatgatgaattctgttttttttattaagcccatttaacattttacatagtgtttttatggattccaggaatggcttctctttctcaaatgatcaacttcaagtcttctttccatatttcacatctgattatacaatgagcagtgccattgcatgccctgctagaactgtggataccctttaaaacaagtagaaaatgatagggtggggctgattaggtctaatctcagggaacactggttagtatttcatgtctaggtaattatcttaaggagcgtacatttaactgtttttgatttgtatatttttaaatcttattttttaaaaccactttattgaggtatgattgacatacataatgttacatatttaatgtatacaacttaatgagtttggagatttctatgtactcctgaaatcatcaccactatctatgccataaacatatctctcttctccaaaagattcttacacttctctgtttattattatcatcattccgtgactgcgtgtgagaagtatacttagcataaaatctactctcttaacaaatttcaagtacataacacaatgttggttactactggcaccatcctgtacaatagatttttatcacttttttcagcttctatcactgaaacttgtcatgtgttcatctatttctattatacggtgaaagacagtgtggcataatctgcaaacaactttggagcctggtggcaattttttgttgcttactcactgtgtgaacatggggaagttccttcatctttctgtgcttctatttcttcctctgtaaagtgggataattctagttatttctcaagcccctataaaagctgagagaatgaacatgagttttgtagtagaaagccaatcccaagaatcaaaatttcttcaatacacaatctcttgcaatgcttaccaactgcaacttttgatcaccttttgctaggttttctgtttacgttctgtggaaagtaggtaaatgtcaggttgtaagtgcttcctacaaatctgtaaagataattcccaagctatgcttttctttttaaaaacattctcaaaacaaaaatatgaacaaaaacatagtgaaagtcatagcccaaggcatacccatctgtatcattatagacaacgtgtcctggagagacagcacaatgggctctatcttcatcacacaactcatcacatgcttccagaaatattcttggtgctgccacctagaggaagtatttcggaaggtacagcaatcatttgaaactccaagggccaaagctcaaatgcccaccatagaacgactgtccatgacaagatatttctacctctttcctggcaattgaaaatggttaagtattgagagttgttggtggtatgtgaaataaataagagagtgatattggtggttaagttcaatgacaaatgacagctgagtacttggatggtcaaattggtgtttttgttgatatagtctggtgattatctgctacttctttccgacttacatgtatttggattcctccaactctacaattaatcaggcaatcaatcaatcaatcaaggaggtaaggaaaaccgcagcagaatgtgatgatgaaaaaccaaggatagtaattattaaaatagaaacatgctcatgcttccattactatttatattcatttatctctcatagtctttctcttttattcccctttcttacacacacacacacacacacacagagagagagagagagagagagagacactaagtagccaaacattgcatcaaaccctaaacaaaacagagtaaacaaaggagctaactctggagaaagcagcattttgatcctctgagtgaggatgtcacagcaaataccacattactgacatccagataccattaccagatggtacagaatacatcctacactgtagagtttgtgttgatccaggctctggttctcagactgttctcacaatgcagatcaccaatcactcagggttggcttttgaatcttcaatcacagtccagaagttccttcaagctcccatgtaacttttgttattattttgaccaaaatattatagaatgggtacattgagtctggactaaatgattactttcttcactcataatagctttatttaacactagactataagactattatcaatctccctctaagatacatacttaaaattatattttatagtgaaatgtataaagttgttctcaatacttccaacatttaccacataatttttactcttggtttctgacacttcagtcacaatattgcatcatttcagcataacagctttcagtgcctaatccatccagtggggctgcatttggacattgaattgtttgttgactaatatttgccaacactaactgtgcaccaggttttgttctagatgcttggaatatgccaattaacaacgtaaatagatttcttacactctgaaagcttatattctagtgagtagaaacagactctgaagacataaagtggtaaatatatcacaggccagagagcaaaaaaaggtaaaaggaaaaataaaggaagacaaaggaaaacacagaatgatggatgctgtactcctatagatatttcactcaaaagcttttcttgaaataatgaaatcagaacaaagaatggacagagttggggagtgaataatgtggttcttatgcaggaaaagtgttccagcacagaatacagccagtgcaaatgccctgggatagcaatgcactaaacatgtttaaagaactgcaatgagacagtgtgaccaaaagagaacgtgagtggagaaaatggcagagacaaattaggagaagcagtgagaagccagatcgcgtggttctatgttatcacatggtaaacctttaaaaattattatctgagcgagacaggaagcctttctagtgctttagaaaaaagaaataatatgctttaaattaggttttacaaagatcacattttggtgaatagactaagatgtcacagatggaagtcaagggaagtggcaagagcacatggaagaggatgcaagaagaatcatgatgagggatgggatgaaggcagcaaggggtaaccatcttgaccttctgttttttctctcccctgcaggaagccacaagcagcccagccctccttaatcaacttcaaggagcaccttcattagtacagcttgcatatttaacattttgtatttcaataaaagtgaagacaaaaaaaaaaaaaaaaa

SEQ ID NO: 153292 - DNA, 1611 bp, Homo sapiens
  misc_feature (1)...(1611): n = a,t,c or g
tttgactctgaggctctttccaacgctgtaaaaaaggacagaggctgttccctatggcagaaggcaaccacagaaaaaagccacttaaggtgttggaatccctgggcaaagatttcctcactggtgttttggataacttggtggaacaaaatgtactgaactggaaggaagaggaaaaaaaagaaatattacgatgctaaaacctgaagacaaagttcgggtcatgggcagactctatgcaagagaagcaacgtatggcaggacaaatgcttcttcaaacctttttttaacatagaccaaatatcccccaattaaaaaagctcatccgattatggaggctggaccacctgagtcacggggaatctacagacgccctcacgctttgtcctcatgaagaattcctgagactatgttaaagaaaggagctgaaggagatctatcccattaaagggaggaggaaacaaccgcacacggctgggctcttcttcatatggcattacagagtttgaccatctgcctccgagggaatgggagctgactttgacatcacagggatgaaggagctacttgaggggtctgggactatagtgtaggtgtaggaaggagattcttgacagccaggggtatgggattcagcgctggagggcatttgctaccagaccagagcacaagtcctctgacagcacattcttgggtactcatgtctcatgggcatcctggagggaatctgcggaactgtgcatgatgagaaaaaaccagatgtggctgctttatgacaccatcttccagatatttcaacaaccgcaacttgcctcaggtctgaagggacaaaccccaagggtcatcaattgtccaaggcctgcagagggtgcaaacccgtcggggaactgatgggtcaagagactctccaagcatcccttggaaagtggccttcttcacagtcatctggagaaccctggaggaaagatgctgtttaacaagacccccacgtggaagaagggacttcattggctttcctggctccttcaaacggccacacaaccgtgccccctgggagagaccagcacaatggggctctatcttcatcacacaacctcatcacatgccttcccagaaatattccttggtgctgcccaccctagaggaagtatttcgaaagggtacagcaattcatttggaaactccaaggggccaaagctcaaatggcccaccatagaacggactgtccgatgacaaggatatttctacctctttccgggggaatttgaaaattgggaaggccacaagcagcccagcccttccttgaatccaactttcaaggaggcacctttctttgttacagcttgcatattttaacattttgtatttcaataaaagtgaagacaaacgnnnnnnnnnnnnnnnnnnnnnnnnnnnnnnnnnnnnnnnnnnnnnnnnnnnnnnnnnnnngggggggcccctttaaaaaaacccccgggggggcccaattttcccgggggttgggaactaaaaaccttcccccaaagggggggtgtaaaaaaccccccggggggattttgggaaaaacccctttttttggggggggaaaaaatgggggcaacccccccaaaa

SEQ ID NO: 153293 - DNA, 708 bp, Homo sapiens
tcagacagtggaaggagcccaggtccaggccagggaaagcctggacagtggccccatgtctctgagcccagtgtcttctgctccagagcccgggttttgaacctccatgggttttggcagctcatccccgagctctgcaaagcctgcagaggaaacacggccgctcagactgtggaggaactggtgaggaggcatctggaagcagtctggagtcagacgcaggctttggccctccaggacccgggggatgtgccgttcctcaggttttccaggactgtcctgtttgcttgggaaaccatcactctcaggttctcggaggatactgcacagaaggtccagggctcgctgctgggagccaagcctgttctccgctcggcagggtagcgccctgaatccccggcccttaccccacgcagctccagccccaggttctggggccccaggggtgggacgaggagaggactctgtcctgcaggaccagctcagcgtggcagggggctggctgtcagcagcacagaggagccgcagaactggcctttctgaacttccagatatatgacgtttccctggagttccgggaggccacacggagtcggacggtcctctgtgcgccacaccctttctggagaagtccacatggcaggtgaggtcggtgtcgtggcctgggggccgcccccagcacggcagcagcaggggcagcagcagcat

SEQ ID NO: 153294 - DNA, 664 bp, Homo sapiens
  misc_feature (1)...(664): n = a,t,c or g
caaactgaggtgnnnnnnnnnnnnnnnnnnnnnnnnnnnnnnnnnnnnnnnnnnnnnnnnnnnnnnnnnnnnnnnnnnnnnnnnnnnnnnnnnnnnnnnnnnnatttattttcgtttcacaagtctataaaagattaggggggttagctgcccttcagcacccaaatcaggtgagcagacgggtcagcatcacaatatcaacaccgggttccatcctctgccccttggggcagtgaccagtccagtgcctcagggtcctggcgaccgcttgtgtcctcctccctcatctcctgaaccagcacagccagcccaggctgaccctgctcagacagtggaaggagcccaggtccaggcccagggaaagcctggacagtggccccatgtctctgagcccagtgtcttctgtctccagagcccgggttttgaacctccatgggttttggcagctcatcccccgagctctgagaggagggcgtcatcatcaggattagatgatgatctcccagcacaggagactgggaatggctcaggtgctaccaggacgtgcagctgatggtggctggagcccgttctctgtccaccacacccacaccctgccccttgccccaaaatggaaccgtggcttagatttaatcaggaattccaccacactgcactaatggtc

SEQ ID NO: 153295 - DNA, 1109 bp, Homo sapiens
gggggagaaagataagttgaggacggggctttatcgtttgttaatcagaggtggtgatagagtggaaaatataacacgtttcggcattcaggagacctaccttccaatgtaaataagcccttgcgggcttgatattttattccttttgtaccttcatctcataatctgtatgaagactttagagttccaagctcttaagatccctattagctctcaaattgtgggataaaaataattgttaaggcatgcctaatactcttatacagactttgtaaactgatttcacagaagcgattaaggaattgtactgtctttaaacaatatttagaatgcttcagtaaaagccttttttaaaaaatttttctaatgatgtagtaaatgtacctaatataaagttaagtggttttatttaatacttttcacctgaccatgattatgttatatataagaggatttatagtttgcatgcctgatataatctatttaatttcctttacgagatttttgtactatgaagataagtggtctcattttaccaattaactcgttccagagtgatatggttctgtgcactttgattttcaaattggctatttattttttaatgtaattaacctttcacaatttaaattgaaggatattctgatccttaggttataaatatgtgacttgatggtttatgtaacattcgaggaatcatgttttctattacaaaatgattaaaagttttgatacataccttgtatgttgcttgacagatctgttttagaaaacattcctctgcccttttgaaatgaagccatgtatttgaaattatttcccaaacaattatatcttaagcgtgtgctacatagtaatcatagtcattttaatttagattataaagctatattttaactttgaggtttgtgaattttcttagacatattaatgactttatagttaatggtgctctcagattttatttttaagttaaaaatttgccaggcgcggtggctcacgcctgtaatcttagcaccctgggaggccgaggcaggtggatcacgtgaggtcagcagtttgagaccagcccagccagcatagtgaaacccccatctctactaaaaatt

SEQ ID NO: 153296 - DNA, 2677 bp, Homo sapiens
cctaggcggtttaagcagccgcttttctgtcatgcgcattgcggagagtcgttcttccctctttcccgacttcaccactcactgggataagacccctgtcatgcgcattgagagtcctctagacaggcgctcctcgcaaaaccgctaagcgcttgcgctgagcagcccgctagggcggaagtgggagctgcgaccgcgctccctgtgaggtgggcaagcggcgaaatggcgccctccgggagtcttgcaggtcccctggcagccctggtgctggtgctttggggagctccctggactcacgggcggcgggacaaacgttcgcgtcatcacggacgagaactcggagagaactgctggaaggagactggatgatagaattttatgccccgtggtgccctgcttgtcaaaatcttcaaccggaatgggaaagtttttgctgaaatggggagaagatcttgagggttaatattgcgaaagtagatgtcacaaaagcagccaggacttgagtggacggtttatcattaactgctcttcctactatttatcatttgtaaagatggtgaattttaggcggttattcagggtccaaggactaagaaggacttcataaactttataagtgataaagagtggaagagtattgagcccgtttcatcatggtttggtccaggttctgttctgatgagtagtatgtcagcactctttcagctatctatgtggatcaggacgtgccataactactttattgaagaccttggattgccagtgtggggatcatatactgtttttgctttagcaactctgttttccggactgttattaggactctgtatgatatttgtggcagattgcctttgtccttcaaaaaggcgcagaccacagccatacccatacccttcaaaaaaattattatcagaatctgcacaacctttgaaaaaagtggaggaggaacaagaggcggatgaagaagatgtttcagaagaagaagctgaaagtaaagaaggaacaaacaaagactttccacagaatgccataagacaacgctctctgggtccatcattggccacagataaatcctagttaaattttatagttatcttaatattatgattttgataaaaacagaagattgatcattttgtttggtttgaaagtgaaactgtgacttgcttgtatattacagcgttcagtcctagattgtcattaaattgaagactcctacattcagaacataaaagcactaggtatgtaagtttgaaatatgatttaaggacagtatggtggtttaactagttctctaatttttgaaaaatcttgccaaacaataagatttatgtatatttgtttaataataacctgtttcaaatctgagtttttgaaaatttacatttccccagtattgcattattgaggggtttaaggaggattattttagagaaaaatatttctcatttgatataatttttctctgtttcactgtgtgaaaaaaaggaagatatttcccataaatggggaagtttgcccattgtctcaaggaaatgtgtatttcagtggaccaatttcgtgggtctttttggggggtatattccaaaatttccttgtatttttaggttatgcaactaataaaaactaccttacattaattaattacagttttctacacatggtaatacaggatatgctactgatttaggaagtttttaagttcatggtattctcttgattccaacaaagtttgattttctcttgcatttttcttacttactatgggttacattttttatttttcaaattggatgataatttcttggaaacattttttatgttttagtaaacagtatttttttgttgtttcaaactgaagtttactgagagatccatcaaattgaacaatctgttgtaatttaaaattttggccactttttttcagattttacatcattcttgctgaacttcaacttgaaattgtttttttttttttttctttttggatgtgaaggtgaacattccctgatttttgtcctgatgtgaaaaagccttggtattttacattttgaaaattcaaagaagcttaatataaaagtttgcattctactcaggaaaaagcatcttcttgtatatgtcttaaatgtatttttgtcctcatatacagaaagttcttaattgattttacagtctgtaatgcttgatggttttaaaataataacatttttatatttttttaaaagacaaacttcatattatcctgtgttcctttcctgactgggtaatattgtgtggggatttccacggggtaaaagtccagtagggtgggaacattttaggtgtatttttacctcccttaaagagcctagaataccataggttttcacccttaaaagaaggggggaaaatccataaaatacaatggattccaactgacccattacgtagtaggacaatttctgttaatgtccccttctttctagggctctgttggctgtgtggaatccattaggtttacagtattcgtaatatacaagttttctttaaagccctctcctttagaatttaaaatattgtaccattaaagagtttggatgtgtaacttgtgatgccttagaaaaatatcctaagcacaaaataaacctttctaaccacttcattaaagctgaagaccagtaaaaaaaaaaaaaaa

SEQ ID NO: 153297 - DNA, 448 bp, Homo sapiens
catcgcggtggacttcctgggctcaaacttccagattttcaggattccatttttgagtatttcaacactgcttttcttttacatgacctgacatttagaaccagctcagctagtgagcaagaaacacaagctccgaagccagaagcgtccccgtcgatgtctgtggctgcatcagagcagcaggagccaaaagctcaccagttcagcatcaagtccttctccagccctactcagtgcagccactgcacctccctgatggttgggctgatccggcagggctacgcctgcgaggtgtgttcctttgcttgccacgtgtcctgcaaagacggtgccccccaggtgtgcccaatacctcccgagcagtccaagaggcctctgggcgtggacgtgcagcgaggcatcggaacagcctacaaaggccatgtcaaggtcccaaagcccacggggg

SEQ ID NO: 153298 - DNA, 641 bp, Homo sapiens
ataatcagtccacacattaacaaagatgaggatgtgcagcgggacctggagcacagcctgcagatggaagcttacgagaggaggattcggaggctggaacaggagaagctggagctgagcaggaagctgcaagagtccacccagaccgtgcagtccctccacggctcatctcgggccctcagcaattcaaaccgagataaagaaatcaaaaagctaaatgaagaaatcgaacgcttgaagaataaaatagcagattcaaacaggctggagcgacagcttgaggacacagtggcgcttcgccaagagcgtgaggactccacgcagcggctgcgggggctggagaaacagcaccgcgtggtccggcaggagaaggaggagctgcacaagcaactggttgaagcctcagagcggttgaaatcccaggccaagtcggcactgagtggcccagcaccgcctagccctgccaccccactgccctcctgggccttttgctggatgggcacctggggggttctggtttttacttttttaatgtaagtctcagtctttgtaattaattattgaattgtgagaacatttttgaacaatttacctgtcaataaagcagaagacggcagttttaaagttaaaaaaaaaaaaaa

SEQ ID NO: 153299 - DNA, 5196 bp, Homo sapiens
atggctgctgcaggcacggggacatgctggctgcttgccattggcagccagaaggtatggaagccgctgtcactgccagttgctgttgtcaaaatgaagaatactgaacgaatttatgcaatgaaaatcctcaacaagtgggagatgctgaaaagagcagagaccgcgtgcttccgagaggagcgcgatgtgctggtgaacggcgactgccagtggatcaccgcgctgcactacgcctttcaggacgagaaccacctgtacttagtcatggattactatgtgggtggtgatttactgaccctgctcagcaaatttgaagacaagcttccggaagatatggcgaggttctacattggtgaaatggtgctggccattgactccatccatcagcttcattacgtgcacagctggaccccaaaagccttccgggtgaggaaatcagtggcagaccaggaccctgtgggtgcccctcacagagacattaaacctgacaatgtccttttggacgtgaatggtcatatccgcctggctgactttggatcatgtttgaagatgaatgatgatggcactgtgcagtcctccgtggccgtgggcacacctgactacatctcgccggagatcctgcaggcgatggaggacggcatgggcaaatacgggcctgagtgtgactggtggtctctgggtgtctgcatgtatgagatgctctatggagaaacgccgttttatgcggagtcactcgtggagacctatgggaagatcatgaaccatgaagagcgattccagttcccatcccatgtcacggatgtatctgaagaagcgaaggacctcatccagagactgatctgcagtagagaacgccggctggggcagaatggaatagaggatttcaaaaagcatgcgttttttgaaggtctaaattgggaaaatatacgaaacctagaagcaccttatattcctgatgtgagcagtccctctgacacatccaacttcgacgtggatgacgacgtgctgagaaacacgaagtctttgaaaatcactaacctggtgacggcctgtgccactgtcatcatcgaaatcagagtgtgtctcctctgtttttctgatcgaggctctctgaagagcataatgcagtccaacacattaaccaaagatgaggatgtgcagcgggacctggagcacagcctgcagatggaagcttacgagaggaggattcggaggctggaacaggagaagctggagctgagcaggaagctgcaagagtccacccagaccgtgcagtccctccacggctcatctcgggccctcagcaattcaaaccgagataaagaaatcaaaaagctaaatgaagaaatcgaacgcttgaagaataaaatagcagattcaaacaggctcgagcgacagcttgaggacacagtggcgcttcgccaagagcgtgaggactccacgcagcggctgcgggggctggagaagcagcaccgcgtggtccggcaggagaaggaggagctgcacaagcaactggttgaagcctcagagcggttgaaatcccaggccaaggaactcaaagatgcccatcagcagcgaaagctggccctgcaggagttctcggagctgaacgagcgcatggcagagctccgtgcccagaagcagaaggtgtcccggcagctgcgagacaaggaggaggagatggaggtggccacgcagaaggtggacgccatgcggcaggaaatgcggagagctgagaagctcaggaaagagctggaagctcagcttgatgatgctgttgctgaggcctccaaggagcgcaagcttcgtgagcacagcgagaacttctgcaagcaaatggaaagcgagctggaggccctcaaggtgaagcaaggaggccggggagcgggtgccaccttagagcaccagcaagagatttccaaaatcaaatccgagctggagaagaaagtcttattttatgaagaggaattggtcagacgtgaggcctcccatgtgctagaagtgaaaaatgtgaagaaggaggtgcatgattcagaaagccaccagctggccctgcagaaagaaatcttgatgttaaaagataagttagaaaagtcaaagcgagaacggcataacgagatggaggaggcagtaggtacaataaaagataaatacgaacgagaaagagcgatgctgtttgatgaaaacaagaagctaactgctgaaaatgaaaagctctgttcctttgtggataaactcacagctcaaaatagacagctggaggatgagctgcaggatctggcagccaagaaggagtcagtggcccactgggaagctcagattgcggaaatcattcagtgggtcagtgacgagaaagatgcccggggttaccttcaagctcttgcttccaagatgaccgaagagctcgaggctttgaggagttctagtctggggtcaagaacactggacccgctgtggaaggtgcgccgcagccagaagctggacatgtccgcgcggctggagctgcagtcggccctggaggcggagatccgggccaagcagcttgtccaggaggagctcaggaaggtcaaggacgccaacctcaccttggaaaggtgttccccgtggcagcctgacttcctctgtcccctgcacgaagttgctggaattgcaaggctacccgtgcgggtggtgctggtgcttcttggtgcagccaccatcttgccagttatgggaaagatattgatggggctgacggctgagcggcctgggccctgtgtccctgaagaacagaggactcgcctgggaacaagattaggaagcaaactaaaggattccgaagccaaaaacagagaattattagaagaaatggaaattttgaagaaaaagatggaagaaaaattcagagcagatactgggctcaaacttccagattttcaggattccatttttgagtatttcaacactgctcctcttgcacatgacctgacatttagaaccagctcagctagtgagcaagaaacacaagctccgaagccagaagcgtccccgtcgatgtctgtggctgcatcagagcagcaggaggacatggctcggcccccgcagaggccatccgctgtgccgttgcccaccacgcaggccctggctctggctggaccgaagccaaaagctcaccagttcagcatcaagtccttctccagccctactcagtgcagccactgcacctccctgatggttgggctgatccggcagggctacgcctgcgaggtgtgttcctttgcttgccacgtgtcctgcaaagacggtgccccccaggtgtgcccaatacctcccgagcagtccaagaggcctctgggcgtggacgtgcagcgaggcatcggaacagcctacaaaggccatgtcaaggtcccaaagcccacgggggtgaagaagggatggcagcgcgcatatgcagtcgtctgtgactgcaagctcttcctgtatgatctgcctgaaggaaaatccacccagcctggtgtcattgcgagccaagtcttggatctcaggtctgcgtttgggcagcactgtccttgctctgtgaatcttcctcagctatctttagccaaaaggacggtgacggcctctctcttaggtgcaccttctaagaccagctcgctgctcattctgacagaaaatgagaatgaaaagaggaagtgggttgggattctagaaggactccagtccatccttcataaaaaccggctgaggaatcaggtcgtgcatgttcccttggaagcctacgacagctcgctgcctctcatcaaggccatcctgacagctgccatcgtgggttgtgtccttcaggtgtctgaagcaacagcacttccggcggcgctgcagtgcccatctgaaaatcagatgaaggtcacaggtccatttgggtttgtagacagtttctccatgcatgttaagaagcagacgaggccggatgcagacaggattgcagtcggcctagaagaagggctctatgtcatagaggtcacccgagatgtgatcgtccgtgccgctgactgtaagaaggtacaccagatcgagcttgctcccagggagaagatcgtaatcctcctctgtggccggaaccaccatgtgcacctctatccgtggtcgtcccttgatggagcggaaggcagctttgacatcaagcttccggaaaccaaaggctgccagctcatggccacggccacactcaagaggaactctggcacctgcctgtttgtggccgtgaaacggctgatcctttgctatgagatccagagaacgaagccattccacagaaagttcaatgagattgtggctcccggcagcgtgcagtgcctggcggtgctcagggacaggctctgtgtgggctacccttctgggttctgcctgctgagcatccagggggacgggcagcctctaaacctggtaaatcccaatgacccctcgcttgcgttcctctcacaacagtcttttgatgccctttgtgctgtggagctcgaaagcgaggagtacctgctttgcttcagccacatgggactgtacgtggacccgcaaggccggagggcacgcgcgcaggagctcatgtggcctgcggctcctgtcgcctgtagttgcagccccacccacgtcacggtgtacagcgagtatggcgtggacgtctttgatgtgcgcaccatggagtgggtgcagaccatcggcctgcggaggataaggcccctgaactctgaaggcaccctcaacctcctcaactgcgagcctccacgcttgatctacttcaagagcaagttctcgggagcggttctcaacgtgccggacacctccgacaacagcaagaagcagatgctgcgcaccaggagcaaaaggcggttcgtcttcaaggtcccagaggaagagagactgcagcagaggcgagagatgcttagagacccagaattgagatccaaaatgatatccaacccaaccaacttcaaccacgtggcccacatgggcccaggcgacggcatgcaggtgctcatggacctgcctctggcagccatgctggctgagactgtcccaaaggcagtgcctgcgaggctggcgctgtgctctgacctggcgctcctgtcacacaagcccgtctccgctgaagctctgttcacgagcacttaccctgtcacaaggccttgtgcacaggcctcgggccgccctgggcagtga

SEQ ID NO: 153300 - DNA, 356 bp, Homo sapiens
gacccgctgtggaaggtgcgccgcagccagaagctggacatgtccgcgcggctggagctgcagtcggccctggaggcggagatccgggccaagcagcttgtccaggaggagctcaggaaggtcaaggacgccaacctcaccttggaaaggtgttccccgtggcagcctgacttcctctgtcccctgcacgaagttgctggaattgcaaggctacccgtgcgggtggtgctggtgcttcttggtgcagccaccatcttgccagttatgggaaagatattgatggggctgacggctgagcggcctgggccctgtgtccctgaagaacagaggactcgcctgggaacaagattaggaag

SEQ ID NO: 153301 - DNA, 542 bp, Homo sapiens
aggaggtgccagaccgcgtgctttcgagaggagcgcgatgtgctggtgaacggcgactgccagtggatcaccgcgctgcactacgcctttcaggacgagaaccacctgtacttagtcatggattactatgtgggtggtgatttactgaccctgctcagcaaatttgaagacaagcttccggaagatatggcgaggttctacattggtgaaatggtgctggccattgactccatccatcagcttcattacgtgcacagagacattaaacctgacaatgtccttttggacgtgaatggtcatatccgcctggctgactttggatcatgtttgaagatgaatgatgatggcactgtaggtatttttgttggagattttccatttggttttgggtttggcatatagtcagaagggaagttttcaatttgaggtacaattaagaaaccaagtatattaattcagaaaatgaatccattttggagatagttgaaattttctgtttggggagttttgtttcccaaataaaaattaagttggaaagcaaa

SEQ ID NO: 153302 - DNA, 6932 bp, Homo sapiens
  misc_feature (1)...(6932): n = a,t,c or g
gcggccgcgggcggggctgagggcggcgggggcgggccgcccgagctgggagggcggcggcgccgaggggaggagagcggcccatggacccgcggggcccggcgccccagactctgcgccgtcgggacggagcccaagatgtcggcctaggccggggcgcgacgacgcggacggggcggcgaggaggcgccgctgctgccggggctcgcagccgccgagcccccgagggcgcgccctgacggactggccgagccggcggtgagaggccggcgcgtcgggagcgggccgcgcggcaccatgtcggccaaggtgcggctcaagaagctggagcagctgctcctgggacgggccctggcgcaacgagagcgccttgagcgtggaaacgctgctcgacgtgctcgtctgcctgtacaccgagtgcagccactcggccctgcgccgcgacaagtacgtggccgagttcctcgagtgggctaaaccatttacacagctggtgaaagaaatgcagcttcatcgagaagactttgaaataattaaaagtaattggaagaggtgcttttggtgaggttgctgttgtcaaaatgaagaatactgaacgaatttatgcaatgaaaatcctcaacaagtgggagatgctgaaaagagcagagaccgcgtgcttcccgagagaaccgcgatgtgctggtgaacggcgactgccagttggatcaccgcgctgcactacgcctttcaggacgagaaccacctgtacttagtcatggattactatgtgggtggtgatttactgaccctgctcagcaaatttgaagacaagcttccggaagatatggcgaggttctacattggtgaaatggtgctggccattgaccccatccatcagcttcattacgtgcacagagacattaaacctgacaatgtccttttggacgtgaatggtcatatccgcctggctgactttggatcatgtttgaaagatgcaatgatgatggcactgtaggtgcagtccctcccgtggccgtgggcacacctgactacatctcgcccggagatcctgcaggcgatggaggacggcatgggcaaatacgggcctgagtgtgactggtggtctctgggtgtctgcatgtatgagatgctctatggagaaacgccgttttatgcggagtcactcgtggagacctatgggaagatcatgaaccatgaagagcgattccagttcccatcccatgtcacggatgtatctgaagaagcgaaggacctcatccagagactgatctgcagtagagaacgccggctggggcagaatggaatagaggatttcaaaaagcatgcgttttttgaaggtctaaattgggaaaatatacgaaacctagaagcaccttatattcctgatgtgagcagtccctctgacacatccaacttcgacgtggatgacgacgtgctgagaaacacggaaatattacctcctggttctcacacaggcttttctggattacatttgccattcattggttttacattcacaacggaaagctgtttttctgatcgaggctctctgaagagcataatgcagtccaacacattaaccaaagatgaggatgtgcagcgggacctggagcacagcctgcagatggaagcttacgagaggaggattcggaggctggaacaggagaagctggagctgagcaggaagctgcaagagtccacccagaccgtgcagtccctccacggctcatctcgggccctcagcaattcaaaccgagataaagaaatcaaaaagctaaatgaagaaatcgaacgcttgaagaataaaatagcagattcaaacaggctggagcgacagcttgaggacacagtggcgcttcgccaagagcgtgaggactccacgcagcggctgcgggggctggagaagcagcaccgcgtggtccggcaggagaaggaggagctgcacaagcaactggttgaagcctcagagcggttgaaatcccaggccaaggaactcaaagatgcccatcagcagcgaaagctggccctgcaggagttctcggagctgaacgagcgcatggcagagctccgtgcccagaagcagaaggtgtcccggcagctgcgagacaaggaggaggagatggaggtggccacgcagaaggtggacgccatgcggcaggaaatgcggagagctgagaagctcaggaaagagctggaagctcagcttgatgatgctgttgctgaggcctccaaggagcgcaagcttcgtgagcacagcgagaacttctgcaagcaaatggaaagcgagctggaggccctcaaggtgaagcaaggaggccggggagcgggtgccaccttagagcaccagcaagagatttccaaaatcaaatccgagctggagaagaaagtcttattttatgaagaggaattggtcagacgtgaggcctcccatgtgctagaagtgaaaaatgtgaagaaggaggtgcatgattcagaaagccaccagctggccctgcagaaagaaatcttgatgttaaaagataagttagaaaagtcaaagcgagaacggcataacgagatggaggaggcagtaggtacaataaaagataaatacgaacgagaaagagcgatgctgtttgatgaaaacaagaagctaactgctgaaaatgaaaagctctgttcctttgtggataaactcacagctcaaaatagacagctggaggatgagctgcaggatctggcagccaagaaggagtcagtggcccactgggaagctcagattgcggaaatcattcagtgggtcagtgacgagaaagatgcccggggttaccttcaagctcttgcttccaagatgaccgaagagctcgaggctttgaggagttctagtctggggtcaagaacactggacccgctgtggaaggtgcgccgcagccagaagctggacatgtccgcgcggctggagctgcagtcggccctggaggcggagatccgggccaagcagcttgtccaggaggagctcaggaaggtcaaggacgccaacctcaccttggaaagcaaactaaaggattccgaagccaaaaacagagaattattagaagaaatggaaattttgaagaaaaagatggaagaaaaattcagagcagatactgggctcaaacttccagattttcaggattccatttttgagtatttcaacactgctcctcttgcacatgacctgacatttagaaccagctcagctagtgagcaagaaacacaagctccgaagccagaagcgtccccgtcgatgtctgtggctgcatcagagcagcaggaggacatggctcggcccccgcagaggccatccgctgtgccgttgcccaccacgcaggccctggctctggctggaccgaagccaaaagctcaccagttcagcatcaagtccttctccagccctactcagtgcagccactgcacctccctgatggttgggctgatccggcagggctacgcctgcgaggtgtgttcctttgcttgccacgtgtcctgcaaagacggtgccccccaggtgtgcccaatacctcccgagcagtccaagaggcctctgggcgtggacgtgcagcgaggcatcggaacagcctacaaaggccatgtcaaggtcccaaagcccacgggggtgaagaagggatggcagcgcgcatatgcagtcgtctgtgactgcaagctcttcctgtatgatctgcctgaaggaaaatccacccagcctggtgtcattgcgagccaagtcttggatctcagagatgacgagttttccgtgagctcagtcctggcctcagatgtcattcatgctacacgccgagatattccatgtatattcagggtgacggcctctctcttaggtgcaccttctaagaccagctcgctgctcattctgacagaaaatgagaatgaaaagaggaagtgggttgggattctagaaggactccagtccatccttcataaaaaccggctgaggaatcaggtcgtgcatgttcccttggaagcctacgacagctcgctgcctctcatcaaggccatcctgacagctgccatcgtggatgcagacaggattgcagtcggcctagaagaagggctctatgtcatagaggtcacccgagatgtgatcgtccgtgccgctgactgtaagaaggtacaccagatcgagcttgctcccagggagaagatcgtaatcctcctctgtggccggaaccaccatgtgcacctctatccgtggtcgtcccttgatggagcggaaggcagctttgacatcaagcttccggaaaccaaaggctgccagctcatggccacggccacactcaagaggaactctggcacctgcctgtttgtggccgtgaaacggctgatcctttgctatgagatccagagaacgaagccattccacagaaagttcaatgagattgtggctcccggcagcgtgcagtgcctggcggtgctcagggacaggctctgtgtgggctacccttctgggttctgcctgctgagcatccagggggacgggcagcctctaaacctggtaaatccccaatgaccctcgcgcttgcgttcctctcacacagttctttttgatgccctttgtgctgtggagctcgaaagcgaggagtacctgctttgcttcagccacatgggactgtacgtggacccgcaaggccggagggcacgcgcgcaggagctcatgtggcctgcggctcctgtcgcctgtagttgcagccccacccacgtcacggtgtacagcgagtatggcgtggacgtctttgatgtgcgcaccatggagtgggtgcagaccatcggcctgcggaggataaggcccctgaactctgaaggcaccctcaacctccttcaactgcgagcctccacgcttggattctaattcaagagcaagttcttcgggaagcgggtttttcaaacgtggccggacaacttccgacaacagcaagaagcagatgctgcgcaccaggagcaaaaggcggttcgtcttcaaggtcccagaggaagagagactgcagcagaggcgagagatgcttagagacccagaattgagatccaaaatgatatccaacccaaccaacttcaaccacgtggcccacatgggcccaggcgacggcatgcaggtgctcatggacctgcctctgagtgctgtgcccccctcccaggaggaaaggccgggccccgctcccaccaacctggctcgccagcctccatccaggaacaagccctacatctcgtggccctcatcaggtggatcggagcctagcgtgcactgtgcctctgagaagtatgtctgatccagaccaggactttgacaaagagcctgattcggactccaccaaacactcaactccatcgaatagctccaaccccagcggcccaccgagccccaactccccccacaggagccagctccccctcgaaggcctggagcagccggcctgtgacacctgaagccgccagctcgccacaggggccagggagctggagatggcctccagcgtcagtgccaagactgagcgggccctccagtgttgtccaaggaaatgtagaatcactttgtagatatgggagatgaagaagacaaatctttattataatattgatcagttttatggccgcattgtttcgtgggcagtaggaccacatcttgtttcgtcttggcacagctgttgagggcgatgctgtttccatcttgcacatggagggacccccatacagcctgtctcccacccctgacaacccgagagggcatatggggccctgccaacaccacttcctcagcagaaacccgtcatgacgcggcctgccttcggaagcagacatctggggacacagcctcagtacccagtcttttccctagttcctgaaactttcctagggaccttaagagaatagtagggaggtcctattaggcattcccagtgttcactaggaatttttgaaggacagggaaagttggaggtttagttttgtgggccttttttttccattttaggccatttgcaacagttcaggttgcagaagtcctgctgaccacctagtcatggacaaaggcccaggaccagttgacaccctgcgtccctgtgtgcgttaagttcattctgggtccgcagccatgaagtgttcaccagtatctactactgtgaagtcagctgtgcggtttttccattcgcttccacggcttctgcctcctgccataaaaccagccaagtgtcgtggtgcaggcaggccctgtggcctgctgggctgagggaagtcagagccccagggcgcccacgaagcagccactgggataccccaccccgccccgccctgcccgcccccccccccaccagtcctgcccccgcatggagcccccgtgattagtagcccgtatgatcacgtagaccccaccccaaaacactcctgcacaactggccccgggccccacggnaacagcaatccccctgccgccgtggaatttcaaccttcacccctttggtacccagatgttgaagtgaaccaagctctgtggcccctgtgtcggtccagaggcgttgtgattaacagtgtggcggcaagacacagcttgtcccacagctttgggcccaggcttcccctgttccttcccaccggtcgggctgcttggcaaggctgttcaggacgtgcacttccccaaggtcggcactgagtggcccaagcaccgcctagccctgccaccccaactcgcctcctgggccttctgctggatgggcaccctggggggttctggttttttacttttttaatgtaagtctcagtctttgtaattaattattgaattgtgagaacatttttgaacaatttacctgtcaataaagcagaagacggcacctggggggttctggtttttacttttttaatgtaagtctcagtctttgtaattaattattgaattgtgagac

SEQ ID NO: 153303 - DNA, 2346 bp, Homo sapiens
  misc_feature (1)...(2346): n = a,t,c or g
atggagaaaatccccatactgaggagcctccgcgcccgagagcagcaggctgggaaggatgtcaccctccagggtgagcaccagcaccttccggaaccaggctgccagcagacagtgcccctgagtgttggcaggaggcccccggacacacccggaccagaaaccaattccatggaggcagcccctggctccccaccaggggaggggtgccccgcttgcagccgatgtttacgttgggaacctcccccgggacgcccgtgtgagtgacctgaagagagccctgcgggaactcggctccgtgcccctgcggctcacctggcagggcccgcggcgcagagccttcctccattacccggactctgccgcagcccagcaggccgtctcctgcttgcagggcctgcgcctgggcaccgacaccctgagggtggcgctggccaggcagcagagggacaagtgacctcgtggacagccacggagctcactgcagacttcgccatccccgtccccttgccgctccggttccgatggcactcgagaggccttgcgtggcaagacgtgtcggagccaccgcctgagctgctcgggtctcaattcttctcagaagtcaccgctcagtgaacgcccaggccctcctgtgagtggggaagccgccctgcggttcatctcacagcgcgcagagactgcagcctcccaatcgtgcaggctcgggccttgagtcggtttctgtttctctggagggacagagcagaggggccagggactgagtgagtggctaagcaggggagggtgatgtgaaggtgatctcgagtttgccaggggtgggctgaacaggagaagatgaacaaaggatccggctctcaaaaggccctgggcagggactggatgctgggtacagaagcgcgcccttggnttttcaggctcctgagctgggcagcacggcagggagagttccatccatgttcgcaggagcccaggaagctcagcccctgggtaaaaagtgctcactgcagctcagatcagtcctcaggtcacatttcggggagccagcctcccctcttcccctccccagccccgctcctccctctgtggacacactccgggcccctcagccagctgggatgcatgagaagcaagctttgtgctgtgggagagaccggctctgggagaatgggtttcaccccagcctacgtcacatttgcccaagtgccttatgttttctgggttttttttcctccagttctgtttctaaaaaccagcttgagtttggctgaactgtcctttctcaacagaaagcgcttttgcaattgatcccgggcaacaagtcaaaataagcttttaagtggagattttgtttttttcaaatgtatatgctttggaaattttgattttttagccagagggttttaccaagtgttctttgaaaccacattacgaagccctcgaaaagggccggcccgtgcacgcgcctttccaagaaaaatgttctcgggacactcgggtcttctctttgaaaggacattttcctcattggttttgccgtgaaaatcctgtggaagacttcgcaaagaaaacgcagccttacatttggctcattaaagacagatttccttcccaagtcgccatgaataaaatgagagagtagaaacgtctggaagcgccacacctggccctgggccctcggccctctgtgtccttggccttgcccccgccccgcacggctggtcacgtttgtcactgggcattcagctcagcgtcagaggctgactcagtccccagttcagagtagtcacctggttacactgaaactcctcaccttcttttctctctttttttaaaaaatacttctttttctgaaagattctttttttttttttttgtttacctttttcctgtggatttgctgccgttagaatagcaactcccaggagaagagcaagtgagtcagccccccttctccactcccctgccccaccggcaagtgggcacagccctgcagacaggagcaaggacttccggggaatagacccactggggccgggagagggagaagctggattctgaccccaccactggcactcctgtggtccagccatgcctgacgcccaccccaccctcagacggcgggattaaaccaggcagtacagggttactcggggaagccagactgctgggatttcctgtcgctttagccagaataatccaggtatatggatatacagataatctgaaagagtttctcatttttatatttgtggaacatcgtgtaagaaaaactgaagagcaagtgcctgaaataaaatcccccacatgtatcagcctgcaaaaaaaaaaaaaaaaaaaaaaaaa

SEQ ID NO: 153304 - DNA, 1644 bp, Homo sapiens
atgaaggtctgcagctccattgctgaagtcagcgataccacgaacccaccatcaagaaccaactctggacacatgacttcagtgctgaagcaggccctgaaggacccctgccgtacaaggcattaccgccttgtgttgtggactctggagaggacagaggtcctggacctgttcatcgagaggttctgcatgacaggtgggaacagcccgatctgctacctcaaggcctatcacaccaacctctacttgtcagccgatgcggaaaaagtgcgagaagccattgatgaggggatcgcagctgccaccatcttcagccccagcagggatgtggttgtgtcccagagtcagctgcgcgtggccttcgatggggacgccgtgctcttctcggacgagtcggagcgcatcgtcaaggccacgctggaccgattcttcgagcatgagaaggcccacgagaacaaacctctggctcaggaacaaggaagcacctccttcccagacaaggtggaggccttcaggagcccctcagttcccctccccatcactggacactcagccaatgtttaccaaacacctacctgtgccagacgccggacaactcgacctctggtgaactgggaactgattcccagggacaacccaccactgccaccacgccaggcctttagggacctcggccagagcccagctttctcagatgcggtggccacaacttcagccgtcccttttgggggtgactgccacctctcagaagtccgcggggctgagaccaggcagcctgcgttcgccatgaagcgacccaaggagccgagcggctccgacggggagtccgacggacccatcgacgtgggccaagagggccagctgaggtcttccaagctggagaaagccgaggtcttgcagatgacggtggatcacttgaaaatgctccatgccactggtgggacaggattctttgatgcccgagccctggcagttgacttccggagcattggttttcgggagtgcctcactgaggtcatcaggactcctacgatctggttactgcctggccgatccaaggctgtggagtcccagagccagcagttcactggtgctcattccacactgggagagcccactgctaaaaaaggcctagtcaaatcctcaggtgtacatggacatcaagattgggaacaagccggctggctgcatccaaaccctcctgcgttccgacgtcgtgcccatgaccacagagaattttctctacatgtgcacccatttaaaggactcggcttcaagggaagcagcttccaccgcattatcccccagttcatttgccagggcagtgatttcacaaaccacggtggcaccaggggtaagtccatctacaagaagaaatttgatgatgaaaactttatcttcaaacacacaggaccaggtctgcgcaggcatggcactaagtgtcccatggcacatttggccctcatggaggcctcaaaagggcaggaccagcaccctcttctacggaggaaggaacgggcacagcaggtacatgatgtggtcaaattaacaagaggcagaggccggggaatttctctaaagcgcatcgcccggtccctatgtaaagacaaagaaacaggactttgcacgctcacctggcattag

SEQ ID NO: 153305 - DNA, 1099 bp, Homo sapiens
ctactactactaggccacgcgtcgactagtacggggggggggggaaagcgcgcgagcaagatggccaccaccaagcgcgtcttgtacgtgggtggactggcagaggaagtggacgacaaagttcttcatgctgcgttcattccttttggagacatcacagatattcagattcctctggattatgaaacagaaaagcaccgaggatttgcttttgttgaatttgagttggcagaggatgctgcagcagctatcgacaacatgaatgaatctgagctttttggacgtacaattcgtgtcaatttggccaaaccaatgagaattaaggaaggctcttccaggccagtttggtcagatgatgactggttgaagaagttttctgggaagacgcttgaagagaataaagaggaagaagggtcagagcctcccaaagcagagacccaggagggagagcccattgctaaaaaggcccgctcaaatcctcaggtgtacatggacatcaagattgggaacaagccggctggccgcatccagatgctcctgcgttctgatgtcgtgcccatgacagcagagaatttccgctgcctgtgcactcatgaaaagggctttggctttaagggaagcagcttccaccgcatcatcccccagttcatgtgccagggcggtgatttcacaaaccacaatggcactgggggcaagtccatctatgggaagaagttcgatgatgaaaactttatcctcaagcatacgggaccaggtctactatccatggccaactctggcccaaacaccaatggctctcagttcttcctgacatgtgacaagacagactggctggatggcaagcatgtggtgtttggagaggtcaccgaaggcctagatgtcttgcggcaaattgagaaacaagaagagtcagcaattaccagccagccgaggtcctggaagctgacgtagagctcgtgccgacggcagacctgccggccgtgggagccgtggacgtcatctgcagggacagaaggggcaaggtcttttctggggttcctactgtgtgcagctactatggggtaccagggtgggggatgccctgatgagcacatttgtc

SEQ ID NO: 153306 - DNA, 584 bp, Homo sapiens
caccgaaggcctagatgtcttgcggcaaattgaggctcagcttggacctctcttctgaactccagacttgtggatcctgctcccctcgccacttctgcacttggggtctaatggggcctcagcggaacatggagttcctcccgccctgacatcatagcccccgcctgggaggcctcctggatgactcctcttgcctcctcccttccctgggagcagcccctggctcaacctccacctccatgctgccttggaccacctgccccgtccagctgccatcacctgtcagaaacaaggagagtcagcaattaccagccagccgaggtcctggaagctgacgtagagctcgtgccgacggcagacctgccggccgtgggagccgtggacgtcatcaaagatccctgggagtcggttggcctgcggcagctcgttgcttttcttcggctgcctcctcctcagtggcctcactgcccgaggggtgcggatgggactcggactggccctgaagaaagtgaccacgaaaggctgttgggagcgtggggcccgttgacccagcaggccggccaggccaggatccacgctgtgcc

SEQ ID NO: 153307 - DNA, 1262 bp, Homo sapiens
agcaaatgaaaaaatagagttttctctatcacacaaatgggaaggtttgtattgaatgttatatttatcctctatccagtcttgtcttggagcacaaagcaaaaaggcccagcatcctccactatcttctgaaaacttgctcaggcctgagggcaagttttcagaagatagtggaggatgctgggcctcaggcctgagcaagagggctgcccggttgcttccatgtagccagccagcatatgtgcagggccaagtctagagggaggagggggtggcacatggatggtttcgtttaattggaagacagtgggtagattggagctggcatttgaagatgttagagagttgtggatcatgggcaagaaaagcgctgttctgggactgcggggcaggagaaggaaactgatgcttctgagggtgagtctgatgagataacatgcctgcgtgtgggcctcaggttagacagagctgaggtctcccgtcactgggcatccagctgggtgctacggccgtggctcctgccttctgcagccctgtcagggcccaaggccttcctcatcagcacttgctccagcctactcactggagttgtgttctggggtgggtgtatagaatactcgcactcctacttggggcatcagggagctctctagcaatttcttctgcacctagggagagcccactgctaaaaagggcctagtcaaatcctcaggtgtacatggacatcaagattgggaacaagccggctggctgcatccaaaccctcctgcgttccgacgtcgtgcccatgaccacagagaattttctctacatgtgcacccatttaaaggactcggcttcaagggaagcagcttccaccgcattatcccccagttcatttgccagggcagtgatttcacaaacccacggtggccaccaggggtctgcgcaggcatggcactaagtgtcccatggcacaatttggccctcatggaggcctcaaaagggcaggaccagcaccctcttctacggaggaaggaacgggcacagcagaaacaaggagagtcagcaattaccagccagccaaggtcctggaagctgacgtagagctcgtgccgacggcagacctgccggccgtgggagccgcggacgtcatctgcagggacagaaggggcaaggtcttttctggggttcctgctgtgtgcagctactatggggtaccagggtgggggatgccctgatgagcacatttgtcaaataaatgaatgacaggaaaccaaaaa

SEQ ID NO: 153308 - DNA, 2685 bp, Homo sapiens
gtcggatggacttggggctagctgcggcggggctggatggtgctgtattgaatttttggacggtactgcattggaggattttaagcttgggcagtaggacattgtattaatctgttttcacattgccaatgaagacatagcccagacctgccaatttactaaagaaaggaggccagataaccatgtcagccacagttgtagatgcagttaatgctgcacccctatcggggtccaaagaaatgagtttggaagaaccaaagaagatgaccagagaggactggagaaagaagaaggagctagaagaaccagcaaaaattgggcaatgctcctgcagaagttgatgaagaaggaaaagacatcaacccccatattcctcagtatatttcttcagtgccatggtatattgatccttcaaaaagacctactttaaaacaccagagaccacaaccagaaaaacaaaagcagttcagctcatctggagaatggtacaagaggggtgtaaaagagaattccataattacctaagtaccgcaaaggagcatgtgaaaattgtggggccatgacacacaaaaagaaagactgctttgagagacctaggcgagttggagccaaatttacaggtactaatatagctccagatgaacatgtccagcctcaactgatgtttgactatgatgggaagagggatcggtggaatggctacaatccagaagaacacatgaaaattgttgaagagtatgccaaagttgatttggcaaaaccgaacattgaaagcccagaaactccaagaggaattagcctcaggaaaattagtggaacaggctaattctccaaaacaccagtggggagaagaggaaccaaattctcagacggaaaaagatcataatagtgaagatgaggatgaagataaatatgcagatgatattgacatgcctggacagaattttgactccaagagacgaattactgtccggaatctcaggattcgagaagatattgcaaaatatttgaggaatttagatccaatttctgcctactatgatccaaaaactagagcaatgagagagaatccttatgccaatgcaggaaagaatccagatgaagtgagttatgctggagataactttgttaggtacacaggagataccatttcaatgggtcagaccacaggtggtttgcatgggaagcctaatgacaagggatctgaaagtgcatctaccaggcagatccttacaaagctagagctgttgtataagtcccttcaaagtcaaaaaaagaagatttcaaagaacagcagaaagaaagcatcctggaaaagtatggtggccaagaacatttggatgcccctccagctgaattgcttttagccccagactgaagactatgtggagtactcaagacatgggacagtcatcaaaggacaggagcgggctgttgcctgctctaagtatgaggaggatgtgaagatccacaatcacacacatatctggggatcgtactggaaagaaggccgcagggggaaccaaatgctgtcactctttttccaagtattcctattgtactggagaagctgggaaggagattgttaactctgaggagtgtattataaatgagataactggggaagaatctgtgaaaaaacctcaaaccctcatggagctgcatcaagaaaaactgaaagaggaaaagaagaagaagaaaaagaaaaagaagaagcatcgaaagagcagttcagatagtgatgatgaagaaaagaagcatgaaaaattgaaaaaggcactgaacgcataggaggccacgccttcttcatgtcaaggagaccattgcagatttgatgagaggaagcggcctttacaatagcatgtattaaacttcaagaccttattgaagaggaaatggaggcatatagaatgaaaccgtcagaggccagatgaccccatggcctctttccttggacagtagcaactagtcagaagaccatccaagatagatgcagctgatacattcttttcagcttcttattgatgattgtagatagaaaaaatccttgtttattcttcttgctgcctggctttaataaatattttcagatgcctcacagttaagttcactcctttccatactgaggaaacaagaaaagaagaagaggcacatgaagtgtgcttttgggaatagaatttaaaattggattaagattttatttccagttttttttatttatttatttttttttttgagacggaatctcactttgtcgcccaagctggagtgcaggggggcgatctcggctcactgcaagctttgcctccagggttcaagtgattctcctgcctcagcctccctagtagttggggactacagggcgcccgccaccatgctcagctaattttttgtatttttagtagagacgcggtttcatcgtgttagccagggatggtctcgatcttcctgaccacaagcaatccgcccacctcggcctctcaaaatgctgggattacaggcgtgacacccgcggcctgggcctgtcacaggtttgttttttttttttctgttttttgagatggagtcttgaaaaaaaataaataaataaaaaaaactggaaataaaatcttaatccaattttaaattctattcccaaagcacacttcatgtgcctcttcttctttttcttgtttctcagtatgg

SEQ ID NO: 153309 - DNA, 1140 bp, Homo sapiens
  misc_feature (1)...(1140): n = a,t,c or g
agcggccgcagggcagggaaacccctactggaccctgtgtgtctgccagcctggagcctttgtctccagccctgcctttattcctccttgcctccacaccagcctccccttgcttctccttacagactatccaagaagtgaagcttatgtctaggggggagccttgggcagagtccacataaatgcaggaagaacttagacaatgcctgaaatgcaaaggcgacactggagtcttctttctctaacgtgtagcgttgaatgaatatctgcctggaaccaagagggctgctctgatgtttgggagtcggttttttgtgagccacatctgatatttctgatatccccaggaaggagtggcctggaggtcactggttcaggctccctttgggcgaaatcctgggagtgatgctctaaaaatccacctttcccatcatccctactcatcagaaagacaaatataaaatcccagagaggttgaagaagcttaaaaaagccaattgctcaaccttacaaatttggatagaaaggagatgtagtttatttcatatgggcaaagtagtcctcttccaaagtcctgtacagttgttctctgcaattgacgcacatctgccctaagcngaaatctgtcagaaggaatcaacaaggctccttgcctcccctcccaatcccccttttgggaggacttgtggcttcagtgtcgtcctaagtgaggagtgggcgtgtgcttttttcctgtcccctcctccctccgtgtcctaggacgctgggctgccttctgtgcactcccaggcagatcactacggaagagtcggagcctgtggggttggactggccacactcagtcctgagaaggcgagttgccatggaaagctgggggcagaggtgtttttggagaggaggcggcaggcaaacattgcctttgacttgctctccgcgtacccggggttgtagagctgctcaggaaggggcaggatgtaaggccagaggtgcctggtgggtgagaagcccaggcagagctgggcgccctctccgaagaggtggcagcagggtgaccctgaactcccaaatggggagtgatgccactggggaaactgagtggatcaaagagatgaaaccaaaaaaaaaaaaaaaaatgagcgg

SEQ ID NO: 153310 - DNA, 762 bp, Homo sapiens
atggcgggcgcgttggtgcggaaagcggcggactatgtccgaagcaaggatttccgggactacctcatgagggtgacccagcagccctacaaggtgttcaactctggcccctgggccttcagcagctcctcctacatgagcaggcccagtgcccacatcagctccttgattgtctcccgagtgggcagcagcagcaccagcttccagggtggcctgggtgccggcatgggagttgaacccttagatccacacgaaaacctgtatgtggatttttatagaggttttattcataactgccaaaatttggaagcaaacaagatgtcctttggtagaagccagtctgaaaaggctgcatactacctggttccaactacacaacgttctggaaaaggcaaaattatggagctagtcgaaagatcggtggttgcaagggttgagcacttctggggcccagtagccaactggggtcttcccattgctgccatcaatgatatgaaaaagtctccagagattatcagtgggcggatgacatttggtacagcctcggaactggcttctgtttgcatgccacgcaacaaatgaagtagcccagctcatccagggagggcggcttatcaaacacgagatgactaaaacggcatctgcataacaatggaaaaggaagaacacggtcttgaagggacagcattgccagctgctgctgagtcacagatgtcattataaatagcctccctaaggaatatacactgaatgctattcttt

SEQ ID NO: 153311 - DNA, 953 bp, Homo sapiens
tttcgtgctgccggagggttggccggggtgtcattggctctgggaagcggcagcagaggcagggaccactcggggtctggtgtcggcacagccatggcgggcgcgttggtgcggaaagcggcggactatgtccgaagcaaggatttccgggactacctcatgagtacggtaagaaaattatttccatccatttcaggcttttgcagactttctgcattaacagagttaggggtaacaggcttagcatcctttgcatatgagagcctttctagccgccatggctggcaggttgtgaagggtgcctactgcaccctggcctgtcctggggagcctagacacgagctctgtgacagccatgctcctggggctgctccctactcctgtttttagaaacaagcatataattacttcattgataacagtcacagtggagcctagcaaccgatgaaaggaaatagagaaagaaaaagagaaagcaggaaaagaagggtgggatgattttttcctgtagggtggagttcatttccatggcttgattttcacacaggagatggtgttgtataattctgttggaactttcttttcagcacaattaagaattataatcaagtaaaatgttttccatttaatccaacatatgttaatttctttttgaattttaataaagttccttatttttctcaaaattgactgctgaatatctgacagcataaatcaattgtattctaaaaaagggaagagagaactagaatattgtactagatagaaaagatgcattataaactttctaaggttaggtattttagtaaactagtgttaaaatgatttttacctttcgtgttcttcttaagaaacatattttcagtatagctcaacacttacagtcataagtgtatgtatagttcttaacttgcagaactgtttcctataacctaacactcatcacacttaaa

SEQ ID NO: 153312 - DNA, 671 bp, Homo sapiens
  misc_feature (1)...(671): n = a,t,c or g
gtcgtgaggcgggccttcgggctgngctcgccgtcggctgccggggggttggcctgggtgtcattggctctgggaagcggcagcagaggcagggaccactcggggtctcggtgtcggcacagccatgtgcgggcgcgttggtgcggaaagcggcggactatgtccaaagcaaaggatttccgggactacctcatagagtacgcacttgctggggcccagtagccaacttggggtcttcccattgctgccatcaatgatatgaaaagagtctccaggagattattcagtggggcggatgacattttgccctctgtttgctattcttttgacattcatggagattttgccttacaaggtacaggtntagnctctgaactggctttctgttttgcatgccacggaacaaatgaagttaggcccagcttcatccagggggaggggcggcttattccaaacacgaggatggacttaaaacgggcatctggcattaaccaatggggaaaagggaagaacaaggtctttgaaggggacagcctttgcccaggttgctgctgagttcacaggttttcttattaaataggcttccctaaggaaaatacactgaatgctatttttactaaccattctatttttatagaaatagctgagagtttctaaaccaactctctgct

SEQ ID NO: 153313 - DNA, 554 bp, Homo sapiens
cagtgtgcagaaaaaattgcgagcaatcctaaaattgtagtagcgatggccaaagaatcagtgaatgcagcttttaaaatcacattaccagaaggaagatgaccggaaagaagggatgacgccgtttgtggaaaagagaaaggccaacttcaaagaccagtgagaaccagctgcccctgcttcacacctctgcttgtagaggacaagtgcagcctgtcagttttagaagcaagtaaatcatcctcttttcaagagcagtgtccgtggtgtgcagttcctctccaattgctgcgtggtcgtggcccgacctctcacggcatgacagccttcgtcacccagcctgtgagggtcctgactggagcaccttctaaatctaagattctgctgaggagcccccgctggtccctctgggcatgctgtgctcggacggaaagcggggcctgtgggtccttgtgtccctgccgctgaagaatggggctgctctgagggaaacgcttgtctgcttgccttcatacagatgctgattaaagtgatagcgattcagaaaaaaaaaa

SEQ ID NO: 153314 - DNA, 520 bp, Homo sapiens
tttccaggctgttactccagcaagttcttgaagcactgggaccacctcacccagttcaagaagccagtcatcgctgctgtcaatggctatgcctttggcgggggctgtgagcttgccatgatgtgtgatatcatctatgccggtgagaaggcccagtttgcacagccggagaggacaagtgcagcctgtcagttttagaagcaagtaaatcatcctcttttcaagagcagtgtccgtggtgtgcagttcctctccaattgctgcgtggtcgtggcccgacctctcacggcatgacagccttcgtcacccagcctgtgagggtcctgactggagcaccttctaaatctaagattctgctgaggagcccccgctggtccctctgggcatgctgtgctcggacggaaagcggggcctgcgggtccttgtgtccctgccgctgaagaatggggctgctctgagggaaacgctgtctgctgccttcatacagatgctgattaccgtgatagcgattcagattaaa

SEQ ID NO: 153315 - DNA, 427 bp, Homo sapiens
gggagcaccagatgtggggcctgagcttgaaaaggggctgctgcccctgatgttcccgggctcttgtgctgcctggcctctgacccctggacctagtctcagggcctatcttaagccccttggaatttgctggctgcacagctgtgatgtcttcttgggttcactcatcacagtgccagccatgaccagcccctccctgcaggtgcgggcggcacccagagactcacccgtgctgttgggaagtcgctggcgatggagatggtcctcaccggtgaccggatctcagcccaggacgccaagcaagcaggtcttgtcagcatgatttgtgctgttgagacactggttggaggagccatccagtgtgcagaaaaaattgccagcaattctaaaattgtagtagcgatggccaaagaatcagtgaatgcag

SEQ ID NO: 153316 - DNA, 1486 bp, Homo sapiens
gaggccactctcaccaggccacgtcctgcgggaggcccggcggctggctggtactgccccagtgccaagacctctggccaactgggcgcagggttcaccttctcacccctggaacgccattgtcctttgtctccttcccaccttgctgtccacccagcaggcgcaggtcctgtgcagcaggccaaccgagaagcgcctgcgtctcccattttcgggctggcctgctgctccggacctgtgcctgatcttaatgctgcaggaacacccaggattttcacatcccccaccctgcgtccagttggccagaggtgctaactttgagtacatcatcgcagaaaaaagagggaagaataacaccgtggggttgatccaactgaaccgccccaaggccctcaatgcactttgcgatggcctgattgacgagctcaaccaggccctgaagaccttcgaggaggacccggccgtgggggccattgtcctcaccggcggggataaggcctttgcagctggagctgatatcaaggaaatgcagaacctgagtttccaggactgttactccagcaagttcttgaagcactgggaccacctcacccaggtcaaagaagccagtcatcgctgctgtcaatggctatgcctttggcgggggctgtgagcttgccatgatgtgtgatatcatctatgccggtgagaaggcccagtttgcacagccggagatcttaataggaaccatcccaggtgcgggcggcacccaagagactcacccgtgctgttgggaagtcgctggcgatggagatggtcctcaccggtgaccggatctcagcccagggacgccaagcaagcaggtcttgttcagcaagattttgtcctttttgagacactggttggaaggaagccatccagttttgcagaaaaaattgccagcaattctaaaattgtagtagcgatggccaaagaatcagtgaatgcaggcaggtcccctaacctctctgagtgcatttatctcgagggtgtggccgtcccccgggcttgccgttggcttgaggcaggatacagtgaggagagcattttgaaagaacggaggctgctgtcgcccgaggtgtttggcaaggtcgtgctcccctgggagaggatgctggcaccagccctggagccacagcgcctgcctccatctgcgcacctggatctgctctgcttggcctcgtgcaaagaacgggcctggaatgagcagagccaaaggcgttcttggtgccggccgcgcccagctctggctctcgtgctgtccttcctggttttcatccttggttatttttctctgtttgcagccccgttgccgcctcacagcctctcctcaagggcacagtttgccatctcacctttcatccagttcctctcccttcttggggccgtgggctaccggagtgtgacgtttgggggccatagcagagctgttggttctgccaggtctccgctggggcagtgcctttga

SEQ ID NO: 153317 - DNA, 1332 bp, Homo sapiens
gggcgaggagtccagagagccatggccgccctgcgtgtcctgctgtcctgcgcccgcggcccgctgaggcccccggttcgctgtcccgcctggcgtcccttcgcctcgggtgctaactttgagtacatcatcgcagaaaaaagagggaagaataacaccgtggggttgatccaactgaaccggcgccttgcctgtcaattggctgtgcgattgcctgatgtgactagctcaaccagggcctgaagatcttcgaggaggacccggccgtgggggccatttgtcctcaccggcggggataaggcctttgcagctgggagctgatattcaagggaaattgcagaaccttgagttttccagggactgtttattccagcaagttttttggaaggcactggggaccaccttcacccagggtcaagaagccagtcatcgctgctgttcaatggctatgcttttggcggggggctgtgagctttgccattgatgtgttgatatcattctattgccggtgagaaggcccagttttgcacagccggagatcttaatagggaaccttcccagggtgcggggcggcacccaggaggattcacccgtgcctgttgggaagtcgctggcgatggaaaatggtccctcaccggtgacccggatcctcagccccaggacgcccaagcaagcagggtcttgtccagcaagatttgtccctgttgagacactggtggaagaagccatcccagtgtgcagaaaaaattgcccagcaattctaaaattgtagtagcgatggccaaagaatcagtgaatgcagcttttgaaatgacattaacagaaggaagtaagttgggagaagaaactcttttatttcaacctttggccacttgatgaccgggaaagaaggggatgaccgcgttttgtgggaaaagagaaagggccaactttcaaagaccagtgaggaaccagcttgcccctgcttcacacctctgcttgggagaggacaagtgcagcctgtcagttttaggaagcaagtaaatcatcctcttttcaagagcagtgtccgtggtgtgcagttcctctccaattgctgcgtggtcgtggcccgacctctcacggcatgacagccttcgtcacccagcctgtgagggtcctgactggagcaccttctaaatctaagattctgctgaggagcccccgctggtccctctgggcatgctgtgctcggacggaaagcggggcctgtgggtccttgtgtccctgccgctgaagaatggggctgctctgagggaaacgctgtctgctgccttcatacagatgctgattaaagtgatagcgattcagatt

SEQ ID NO: 153318 - DNA, 416 bp, Homo sapiens; identical to SEQ ID NO: 130803
  misc_feature (1)...(416): n = a,t,c or g

SEQ ID NO: 153319 - DNA, 362 bp, Homo sapiens
agagattacaatttgactgaagaacagaaggcgatcaaggccaagtatccgccagtcaataggaagtacgagtgagatgacttacagtctcttctgtttcactttttggatgaatggctttataagttcagtgctgatgaattcttcataccccgggaagtgaaagtacttagcattgatcaaagaaatttcaaattacgatcaattgggtggggagaagaattttcattgtccaagcaccctcagggaacagaagtcaaagcaataacatattcagcaatgcaggtctataatgaagagaacccggaagtttttgtgatcattgacatttaagacaccaaaaaataaaagactcctacgaa

SEQ ID NO: 153320 - DNA, 425 bp, Homo sapiens
tttcgttcatggcgcaggaagaggaagatgttagagattacaatttgactgaagaacagaaggcgatcaaggccaagtatccgccagtcaataggaagtacgagtatttggatcatacagcagatgtccagttacacgcatggggagatactctggaggaagcatttgagcaatgtgcaatggccatgtttggttacatgacagatactgggacagtggagcccctccaaacagtagaagtagaaacccaagttcagtgctgatgaattcttcataccccgggaagtgaaagtacttagcattgatcaaagaaatttcaaattacgatcaattgggtggggagaagaattttcattgtccaagcaccctcagggaacagaagtcaaagcaataacatattcagcaatgcaggtctataatgaaga

SEQ ID NO: 153321 - DNA, 756 bp, Homo sapiens
aacgctttgaggaactctgcacgagctcgtgccggtctaatcctgcagtcatggcgcaggaagaggaagatgttagagattacaatttgactgaagaacagaaggcgatcaaggccaagtatccgccagtcaataggaagtacgagtgtgagtaggtggcttacttctctctttacatatttggatcatacagcagatgtccagtgagtatagcgggagttcattcctttgaaaccacgtcagtaggaagactgaatgtttcaatcttggttacacgcatggggagatactctggaggaagcatttgagcaatgtgcaatggccatgtttggttacatgacagatactgggacagtggagcccctccaaacagtagaagtagaaacccaaggagatgacttacagtctcttctgtttcactttttggatgaatggctttataagttcagtgctgatgaattcttcataccccgggtggggagaagaattttcattgtccaagcaccctcagggaacagaagtcaaagcaataacatattcagcaatgcaggtctataatgaagagaacccggaagtttttgtgatcattgacatttaagacaccaaaaaataaaagactcctacgaagaactggttttgttttcctcttccttttgagaagacactatgaattaaattctacagcttttttttgatatatggaaatttgtagaacagaaatattttagttaaagtgtgactttcagaaagggaaaa

SEQ ID NO: 153322 - DNA, 938 bp, Homo sapiens
  misc_feature (1)...(938): n = a,t,c or g
attgttatgtagactttagtcagtgtggtggaattcggtggatgaagggcggaagtagagtgtctaatcctgcagtcatggcgcaggaagaggaagatgttagagattacaatttgactgaagaacagaaggcgatcaaggccaagtatccgccagtcaataggaagtacgagtgtgannnnnnnnnnnnnnnnnnnnnnnnnnnnnnnnnnnnnnnnnnnnnnnnnnnnnnnnnnnnnnnnnnnnnnnnnnnnnnnnnnnnnnnnnnnnnnnnnnnnnnnnnnnnnnnnnnnnngattcttttatgtctggcttcttcactcgtgtgtgaaagtggattgtattacacagagcatgaatatacttctttaggttacacgcatggggagatactctggaggaagcatttgagcaatgtgcaatggccatgtttggttacatgacagatactgggacagtggagcccctccaaacagtagaagtagaaacccaaggtaaatgactacaagtttcttctgtttcacttttgggatgaatggctttataagttcagtgctgatgaattcttcatacccgggaagttgtgtgctattgttttctagaaaaggttgtaaaggccaggcgcggtggcttacgcctgtaatcccagcactttgggaagccgaggcaggtggatcacctgaggtcaggagttcgagaccagtctgaccaataaggaagtgaaagtacttagcattgatcaaagaaatttcaaattacgattcaattgggtggggagaagaattttcattgtccaagcaccctcagggaacagaagtcaaagcaataacatattcagcaatgcaggtctataatgaagagaacccgggaagtttttgtgatcattggacatttaagaccacccaaaaaattaaaagactccctacgggaaaaaaaaa

SEQ ID NO: 153323 - DNA, 393 bp, Homo sapiens
  misc_feature (1)...(393): n = a,t,c or g
gggtcntaccggatttaccttaccgaaaaaaaggaaaggaaattatggccccttaggctttttttacccaccattccaaaccaggtangttccaggtttcccgaggtgagnccaaagccaattacctggaaggaaggtaaagaaattttattacgtcataaaccattgaaaacacatctagtaagaaaatgaaaacctgaataaggatagggacaatagttgaagaaagaaaagtctctgatggagaagcatttcttttaacaaactgattcttctgtatcaaacctggaaaaaaatcatgaaccatctgacatcgtgaacagtctgcagtgggctatggtttcttgacaagtcttatttccttatcatcccnattaaatgttgtcattttgc

SEQ ID NO: 153324 - DNA, 470 bp, Homo sapiens
accctcaaatacactggaattcgcaataaatccagtatggtggttatagatgtaaaaatgctatcaggatttactccaaccatgtcatccattgaagagcttgaaaacaagggccaagtgatgaagactgaagtcaagaatgaccatgttcttttctacttggaaaatagcaaccttgtgttcaacattcagccagccccagccatggtctacgattactatgaaaaagaagaatatgccctagctttttacaacatcgacagtagttcagtttccgagtgagacaaagcaattactagaagagttggagaagcatttcttgtaacaaactgattcttctgtatcaaacctggaaaaaaatcatgaaccatctgacatcgtgaacagtctgcagtgggctatggtttcttgtcaagtcttatttccttatcatcccattaaatgttgtcattttgaaaaaaaaaaaaaaa

SEQ ID NO: 153325 - DNA, 425 bp, Homo sapiens
gcgttcggacccctgtcggatagtaaatcccaggtaaggtacctgcggtcggcaggtctgagctttcttcttggacacctaaaacccacagtcctccaggtacctgccgtgggcagatctgagctttcttcttggacaccccatacccacagtcctccaggccacccttaagtacaatgttctcctacctaagaaggcatctggattttctctttccttggaaatagtaaagaactactctttgactgtttttgacctcacagtgaacctcaaatacactggaattcgcaataaatccagtatggtggttatagatgtaaaaatgctatcaggatttactccaaccatgtcatccattgaagagcttgaaaacaagggccaagtgatgaagactgaagtcaagaatgaccatgttcttttctact

SEQ ID NO: 153326 - DNA, 3603 bp, Homo sapiens; identical to SEQ ID NO: 119806

SEQ ID NO: 153327 - DNA, 197 bp, Homo sapiens
ggttttggtcgagcagacagtttccctttttctgttgagcagagcaaccttgtgttcaacattcagccagccccagccatggtctacgattattacgaaaaaggcctaatccaacgttgcccatcccgttggagcaaaggcattgcttgtgcagaggatcggccaggacgtcctatgcttgcatccttactcaccag

SEQ ID NO: 153328 - DNA, 966 bp, Homo sapiens
atgggggtcacaagagccaggggggaagtggggctggctctcagttcccgccttgcggccacccttaagtacaatgttctcctacctaagaaggcatctggattttctctttccttggaaatagtaaagaactactctttgactgtttttgacctcacagtgaacctcaaatacactggaattcgcaataaatccagtatggtggttatagatgtaaaaatgctatcaggatttactccaaccatgtcatccattgaagaggagaagctgaagtcctttcctgtgtgtgtgagcgccaagctggagcccaaggatgacatggaggaggcgcttggggggtctccccaggtctccatgctgctcgtcaacatcagagagatcctgtgtagcagaaaatggagtcgcagggtatacaagaagtctgtcttcccagacggactggctggtgctgtaacaaagacccatgtgatgctgggggtagagacagataaactgttcagtgccccttgtccatcagtgagagagcagctggagcagaaggtggagagggaggggcagagaactacttctacatgccagacctgggccaagtcccccaaggtcgatgtgccatcctacctgacctgcctggcagacctcaagtatggtgccagcctgggccccagcatcacccactctgccctggcaccaggctcaagtcgctcaagcccagccccggccactgcagtccaaggcgccgggcaggacgacagcagcagcatccccttcaggagggagctctctgaggccacctcagtctcatttctggatccctggcggattttctgtggggttgttagctgccttttcacctctggggctggtgaggggccgggaggagagagcccgtatgtcagacaacaaaccgtctctgctaacccccagcagccacaggcagaggaagaagaggacaactggaaatcctag

SEQ ID NO: 153329 - DNA, 589 bp, Homo sapiens
tttttttttttcaaaatgacaacttttaatgggatgataaggaaataagacttgacaagaaaccatagcccactgcagactgttcacgatgtcagatggttcatgatttttttccaggtttgatacagaagaatcaagtttgttaaaagaaatgcttctccatctgggatttaaaacatcatttaaacaataaacacgtttgtatgtatatataaatagatatttagatataaaaacatgcatatataggcacatagacatgtatatacatatacacacatatgtacaaaatatatatgcctaaatttttactgacctgtcaacttaccaaaaccaaaaatggagagatttataaaaagggtaccatatatagctgtgaattctttaaagctatttttaaagaaattaatataatcttaatgattatcagattactcatgcagtacacagctacacaagtctaatgaagtaccagacacttttctttcttcaactattgtcctatcttattcaggttttcattttcttactagatgtgttttcaatggtttatgacgtaataaaatttctttacctcttctagtaattg

SEQ ID NO: 153330 - DNA, 1857 bp, Homo sapiens
ttaactgctccagcatcttgtgcatctcagctgtttgtgcgagtcatccagcatgagggaggatgggtctgcatcaggtgcagttcctgggccttggaatatgtcctccacttttgtttgatcagcggcgtgtttccattgagtgtgcaactctgccttccacccattgctttttgtgctctcagaaactggagaaacgctagctttgcacactgggttttctcgaagcgggctaggcgtatcatttccaagggctgtggagcttcctggaactgtgcatgctgtgaacactctcccagaatgatgaaatgccaaagtgctcaagtcaccatgcctttgttcactggctcccatgcctttcttgctgtgaccatccatgaggcttagaaccatcacagctgccatcgacagatttgagctttcatctggacagctaatacccacagtcctccaggtgagtctaaagatcttaggacccgcgatgggggtcctgccttctgcccttaggctccggtagactgcaaataacctgctttctttctgttcccgggctgcgttcggactcctgccatcggcagatttgagctttcttcttggacacctaatacccacagtcctccaagtgggtcctaaggttcttaggatccgcgatgggggtcctatgccgggggggacgaggggctggctctcagtccctgcctcgttgggggtgcctcccacccctgcgattggtgtcctgccttctgcccttaggctccggtagactgcaaatgacctgctttctttctgatcccgggctgcgttcggacccctgtcgtatagaaaatcccaagtaaggtacctgccgtcggcagatctgagctttcttcttggacacctaatacccacagtcctccagacccctgtcggacagtaaatcccaagtaaggtacctgccctcggcagatttgagctttcttcttggacacctaatacccacagtcctccagacccctgtcggatagtaaatcccaagtaaggtaccttctgctggaagatctgagctttcttcttgggacaccttaaaacccacagtcctccagcagtgaaggatccaggtgagattttccacggttaacggtcactaaccgcctactggtccaacgttcagaagtaacacaggcacctggacaatacacagtagatgtggaaggacacggttgtacatttatccaggccacccttaaagtacaatgttctcctacctaagaaggcatctggattttctctttccttggaaataagtaaagaactactctttgactgtttttgacctcacaagtgaacctccaatacactggaattcgcaataaatccagtatggtggttatagatgtaaaaatgctatcaggatttactcccaacccatgtcatcccattgaagagcttgaaaacaagggccaaagtgatgaagactgaaagtcaaagaatgacccatgttccttttcctacttggaaaatgtttttggtcgagccagacagtttcccttttttctgttgagcagagcaacctttgtgttcaacatttcagccaggccccagccatggtcttacggattactatgaaaaagaagaatatgccctagctttttaccaacatcggacagtagttccagtttccgagtgagacaaagcaattactagaagagttggagaagcgatttcttgtaacaaactgattcttttgtatcaaacctggaaaaaaatcatgaaccatctgacatcgtgaacagtctgcagtgggctatggtttcttgtcaagtcttatttccttatcatcccattaaatgttgtcattttgaaaaaaaaaaaaaaaaa

SEQ ID NO: 153331 - DNA, 1514 bp, Homo sapiens
  misc_feature (1)...(1514): n = a,t,c or g
ctccaacctgccacgtgaacacgtcagtctgtgtgctgcctcttggacacctgcccttgaaagcctcaggccctgggagaagcactctgtccagtcctgtccccggggggagngcagggcactgagccctcctcagatggttagtggcttccaacagccatcaggagtgtttcttgaatgccccaggtgtggaggacttggtctgtgaccacctagaaccccagagctgaacaggaagccgtccctgcagcaacaagagggctggaagggggagctgcaggccaccctcggctctcccactgctggggcggtgatgttcgggtgacatgtttgaaaaatactcttaaagataccaactgttcccttatatggctaatggtttggtgcagccaccagcgatggcggcccctattagagaccaggtttgttaaaacaccaaatattgctgtccacactagacattaaccggcttcagaaaagatggacaccttttcccacgctgtttcgcttcttaactttggtccagctttagccaccacacagcgtgtaaggggactgctgctgcggagtcagcctcggttggtccttccgcctcccaccaagcacgcgccgcttctgagagacaccagctccctgcctccaagcctgggtgccacaggcttgtcgtgagggaccccttgctttccgagagctcctggggggggttcttgccctttcaacacctggggagaggtgttcagtttcagtttccgagtttgaaacaagggcccgttgcacacagcatgttgggggcccagcccaaagttcttgtcacctcctcatgcaaagccagccatcaccctccggccagagctcaaggaggccccttggccagccccctccttgggtcctccaggaggactgagcacccctcctagcggcatcccttgccctccacagtgctgccaggggcacgtcgctctgtgccgtggactgagaccatccccctggtgaacagaatgacccgtttgttggaaaatgcctcgttgcccagagaaactccccccaggcatcttcgggaacgaaacttatttagttcccattgtgaactggcccacggggacaagctttttatcaacttattaaagttgggagcactgtaaatcgcggcttgcctgagttaaacagtggtggtaagcggtgtgttaaacacataatgttacggttttaggagagagaggtcgtaaggaaggggtcgtgtcgctcatgactctcttctattagttgggtaacagtggcctcatgtttgtgtctgtgtgtacacagagcccttaggttctgctctgtttctttgcccaggtgaatgtttgtggcatgcgctgctgtccacgcccctctgtcctgcgcagctgttcagctgtgcggcgccctgatttcctccatgcacacagaacctccttgtgtctgtttctctgttcctctgtggctgactcaataaacttttccctctgaaaaaaaaaaaaaaaaaaaacgtt

SEQ ID NO: 153332 - DNA, 632 bp, Homo sapiens
gtggaaggaaagccaaggaaggtgtgagtggtgagtggcccgtggcctgtaggcagacctcacctgaggatttcactggcatctaccgggtgcccctcctgtggggcctcctgactgggggtggtcagggcagaggccatgggcacagagggggttgggctctttcaggcagacctcccctgaggatttcactggcatctaccgggtgcccctcctgtggggcctcctgactgggggtggtcagggcagaggccatgggcacagagggggttgggctctttcaggcatcccacccagactgcagtccttccaagtgtgggcagagagcccactgccccaactgccctggggatgcgtggcagggatttctgttcacaccggagtctcctggctgccataaatggccctgagacccgatatggtccattttatggagggggttcctgaatggaacctggttgggcatgggaacaggaatgaacccaaccagatgagatcacagtttcccttttgtaaaacgcctagtgttggaggaagacagtgaatacctaagtcacacctgtaaacataaatggaggaaggggcttggggtccccatgacatcatcccccctcttttaagctagctgaggg

SEQ ID NO: 153333 - DNA, 1058 bp, Homo sapiens
cttcatacaacaagaggaagagtctgcacgcagaagcaccaccttctagggataaataaagggtcaagctaaggaagggcagaacaaacttcagacactcacttctttgcctcaacttcagcctgctctcacaacctcactatgtcttgccccaactactgctcgggaaactccaactcaggatctctcagaacctcccgccatattcctctcacctccatcgacctctgccctaccagcgtgagctgtggagatgtcctctacttacccactagctctcaagaccatacctgggtcacagacaactgccaagagacctgcggtgaaccaaccagctgccagccggtccactgtgagaccggcaatcttgaaacctcttgcggttcttccactgcttactacgtgcccagggccttgccaaggaagcagttttcttcctgcttctttcttctccagttcctgccttccagtatcctgtaggaccacagaggtatgtgtccagcggctgttcgtccattgagggccgttgttcaatagtttaccagcccatagggagattgtgttgcccaatgcctatcgcccccaattctgcttgtccaagagttgccagccccaaaacctcctcacttctggatgccaaccctcgagttgcttggcctatcgtcctcaaagtcttcacgttgtgtccagcagcctcagacctctggggcctctgttcagtggttgccaacctctgacccatgtgttcagcaccgtgtcgtcccatcttgctctggaacatgggtccccaaacatatgctttttacagtcatccatccttttgcataggtcatcatcgagagcggtatgttcttcagctctgttttgaaaactcatacttgttagtagtttccaacctgggtcctggacaactgccaggagaacagtaacaaacccaccagctgccagccagccaaatgtgcgttcagcaactgtcaaatctattgcggcccttctactgattgtcctgtgtccagactctgccaagaaactcactttgttcctgccacttcctgtgt

SEQ ID NO: 153334 - DNA, 478 bp, Homo sapiens
  misc_feature (1)...(478): n = a,t,c or g
gtagagaaattagtgaaaggaaaattccaagataattttgagtttattcagtggtntaagaaattctttgacgcaaactatgatggaaaggattacaaccctctgctggcgcggcagggccaggacgtagcgccacctcctaacccagttccacagaggacgtcccccacaggcccccccccctgcattctccggaagaatcctccatcagcccgaaatggcggccatgagactgatgcccaaattcttgaactcaaccaacagctggtggacttgaagctgacagtggatgggctggagaaggaacgtgacttctacttcagcaaacttcgtgacatcgagctcatctgccaggagcatgaaagtgaaaacagccctgttatctcaggcatcattggcatcctctatgccacagaggaaggattcgcaccccctgaggacgatgagattgaagagcatcaacaagaagaccaggacg

SEQ ID NO: 153335 - DNA, 1219 bp, Homo sapiens
agatgagtctctagaaacgaggctttgtctgggtcctggaggggaagggagaaaagcaatagggcctttgggaagcagcagcgttgggaggggaagggagaggagcagccccagcccgcgtcggaccccgtcatagcagagccacctcctctgtctgcactgctgttctgcctgggcctgccccactcgcccgcccgcttgctttgcactagaagcagcccgctctgtctagggaggtgcagtcgctagtgagcaagtcgccacggcatgctggctgcgctggggaggagctggggtccctgatttggccaccactgtgcagatacctggtccagcccagcagagggcaaaagagcccatcctgacacagggcccctggaggggcagccacccagggacaatggctttgggctggggcttctgttaggaaagaccctgtgccagctgcctttcctctagctatgagtacgagagggtcccgcacccttccaactctacttccccaaatttgcgtcctaatttctctcctctatccctcaggccagctctctccctgccccaacacctcacaccttgtttagttccctatagtttctgctctcccgggctcgccaaagggctgcccagctgctggagtgtccatgtggccaagactcggggcctagctgtagatgcccttcctggggtgggggcaggggggtgagagtgcctgcctgtcgcatgggcctgcccccgcagtcctcacaccagggctgtctcctgccacgtgcgctgtggggctcacgtgggacttacctgactcttttcctctggggcagttccacagaggacgtccccccaccaggccccaaaaaacatgccagaccttctggccggctgagccaatgtggccccccccctgcattctccggaagaatcctccatcagcccgaaatggcgggccatgagacttgatgcccaaattctttgaactcaaaccaacagctggtggacttgaagctgacagtggatgggctggagaaggaaacgtgacttctacttcagcaaacttcgtgacatcgagctcatctgccaggagcatgaaagtgaaaacagccctgttatctcaggcatcattggcatcctctatgccacagaggaagagattcgcaccccctgaggacgatgagattgaagagcatcaacaagaagaccaggacgagtactgagggcggccgct

SEQ ID NO: 153336 - DNA, 4842 bp, Homo sapiens
  misc_feature (1)...(4842): n = a,t,c or g
atgagctctaagcatctaaaatcagaacaaatcaaggaccaaatcagagtcccagtaatatcgctgattcccaaaatacactcagcccaggaggagcagctctccagtacagctgtctgctcctgccctgctcgggtattttgtgcagtgacaaaggtggtagcagttttccagatgtggatgcttcatgatctggtgcagatggtccccaggtccctgcagtggctcccccacatcttcacactcttctcaaatccactcattctgtaccactcccacgagctctcagcccccagctttgcagagcagagagaatgcaaactcgcttatatgcctgtctcttctgcatctgcacatcacctcctcctacaagcctttgactttaacctctctgtatctctttcctctttggcaaggaacatgcttgccaactcagccagcgtgaggatcctcatcaagggaggcaaggtggtgaacgatgactgcacccacgaggctgacgtctacatcgagaatggcatcatccagcaggtgggccgcgagctcatgatctggcggggccaaggaaaactggtgatccctggtggcatcgacaccagcacccacttccaccagaccttcatgaatgccacgtgcgtggacgacttctaccatgggaccaaggtaatgctcctgtttgccaaaggtggcttcctctttggcttttttattctgcttctagggctgctccagactagactcatggcctcattagccaagagcgactggttttcccctgagaaccatcagctctttacagctgatgaagagctctgcacacgtgtctttatgcaaggtggcccgggggctgaagtcacctgtttggaaaatctgcaaaattgctacccctacccctgtgagtcacacatccaggttattctgggcttgcatggaggcagtatgtgcagctgcaatccagaccacaagcacccctttatgagcggggctttgagaagtatcatgaagcggcagaataaggagcaggtcccaccccctgctgtggaacctaagaaaccagggaacaagaagcagccaaagaaggtggcaactcctcccaaccaaaaccagaagcagggccgcttccgcagcctggaggaagcactgaaagctctggatgtggcagacctgcagaaggaactggacaagagccagagtgtgttctctggaaacccatccatatggttgaaggacctggccagctatctcaactacaagctacaagctcctctaagtgaacccacgctgagccagcatactcatgattatccctacagcctggtgagccgggagctacgtgggatcatccgagggctgctggcgaaggcagcagggtctctggagctcttttttgaccactgtctgttcaccatgttgcaagagctggataagacaccaggggagtcactacatggttaccgcatctgtatccaggccatcctgcaagacaagcccaagattgccacggcaaacctaggcaagttcctggaactgctgaggtcccaccagagccgaccagcaaagtgtctcaccatcatgtgggccctgggtcaagcaggttttgccaacctcaccgagggactgaaagtgtggctggggatcatgctgcctgtgctgggcatcaagtctctgtctccctttgccatcacatacctggatcggctgctcctgatgcatcccaaccttaccaagggcttcggcatgattggccccaaggacttcttcccacttctggactttgcctatatgccgaacaactccctgacacccagcctgcaggagcagctgtgtcagctctacccccgactgaaagtgctggcatttggagcaaagccggattccaccctgcatacctacttcccttctttcctgtccagagccacccctagctgtccccctgagatgaagaaagagctcctgagcagcctgactgagtgcctgacggtggaccccctcagtgccagcgtctggaggcagctgtaccctaagcacctgtcacagtccaggcaggtacagaagtctttgcaagaaaccattcagtccctcaagcttaccaaccaggagctgctgaggaagggtagccgtaacaaccaggatgtcgtcacctgtgcaatggcctgcaagggcctgttgcagcaggttcagggtcctcggctgccctggacgcggctcctcctgttgctgctggtcttcgctgtaggcttcctgtgccatgacctccggtcacacagctccttccaggcctcccttactggccggttgcttcgatcatctggcttcttacctgctagccaacaagcgtgtgccaagctctactcctacagtctgcaaggctacagctggctgggggagacactgccgctctggggctcccacctgctcaccgtggtgcggcccagcttgcagctggcctgggctcacaccaatgccacagtcagcttcctttctgcccactgtgcctctcaccttgcgtggtttggtgacagtctcaccagtctctctcagaggtggcaattaaccatgaccatcttcctggagaagagaaactacctggcaaagggccaaagtcttaggactgctgggcaggagaactggcctgtgttcaaggagagcacgtccggagaagccaagggaaatgtggagcaggagcagccaaagtggcccatcggctctcgagcagggtttgcgcgtcgcggtcgcaaagcccctgtgagtgcaggcaggccgttaaccgtcttccggaagacgctgctagaaccctccggccgctcctgcccgccatcgtccccgaacgacactcgctcagctacctgcttccccagaagccccatagtgggtaacagcatgattcgttgctgggtcctgaaaggagccattttttccagcttccttcacacaggcactgctgccactcatgggaccctagagtcagaccgaagctggggtatggccgtcaatgtgtactccacatctgtgaccagtgaaaatctgagtcgccatgatatgcttgcatgggtcaacgactccctgcacctcaactataccaagatagaacagctttgttcaggggcagcctactgccagttcatggacatgctcttccccggctgtgtgcacttgaggaaagtgaagttccaggccaaactagagcacgaatacatccacaacttcaaggtgctgcaagcagctttcaagaagatgggtgttgacaaagtaggtgcctgcgctctggggggccctgaggagcagtgtgaccctggggaagaagaggacccaccagcccaggcaactggggctgctggggtcattccgatcattcctgtagagaaattagtgaaaggaaaattccaagataattttgagtttattcagtggtttaagaaattctttgacgcgaaactttgatggaaaggattacaaccctctgctggcgcggcagggccagngagcgtagcgccacctcctaaccccaggtgaatcagatcttcaacaaaatcccaagaaactcattggcacagccagttcccacagaggaccgtcccccccacaggccccaaaaaacatgccagaccctctggccggctgagcaatgtggcccccccctgcattctcccggaagaatccctcccatcagcccgaaatggcggcccatgagactgatgccccaaattcttgaactcaacccaacagctggtgggacttgaagctgacaagtggatggggctgggagaaggaacgtgacttcttacttcaggcaaactttcgtgacatcgagctcatctgccagggagcatggaaagtgaaaacagccctgttatctcagggcatcattgggcatcctcttatgccacagaggaagggattcgcaccccctgaggacgatgagattgaagagcatcaacaagaagaccaggacgagtactgagggcggccgcagccctggctgactgcacggcttccccgtgcctccctccctgctccactcccacattatagtcctttcctaacacggtcggccgggtgctttgtgtcagtgctgcagcactggggagccaggcgaggggggcttgggggcatggggccggaaagcaggcagaagcccgtcctgggtggtgctggcccagttggtgggacccctgtccacacccaccctatttatttccgttgtctctctgctgtgtcgcccaacacttcccagggtgctgctgccacccgccccagccagccacctgctcctgacagccagcagctgtgtatttgacaaagtcattggtatatttttacttactggattctccttgcactttacctgttcttttccagagctgacagcacgggctccggcgcagtgtgcctggcttggcttcccttccccatggctgggggctggggtaggactcacccattctaatttattttgtcttttggcttctcagtagctaaggggaaggctgatgtcaggagagggagagggggctgaggaggtagtgctgtaggcccagggggtcagggaaagggaggggggcatgtgagggatggaaatgacctcctggcaccaggctcacccacccaaggccccctgccccagcactgaatcccagcgctgccctgaggcccccagccactccctccagcagcctggttcaccacacaaactctgcctggaccccattgtctgtctgcttcccacctgccctccccaccccctgcccctcgggcaccagcctgcatatgtgttcacttttatttaaataaacttgtgtggtaaaagtacatgccatgtgtccctcaactgaaaaaaaaaaa

SEQ ID NO: 153337 - DNA, 308 bp, Homo sapiens
cctgtgaacatataaatgaatctggtgttggggaaactttaatctgaaacccacgctgtggccctggagggtcccggtttgtcagttcttggtgctctgtgttcccagaggcaggcggaggttgaagaaaggaacctgggatgaggggtgctgggtataagcagagagggatgggttcatgatccaagggaccctttgcctttattatgccctttcctaggcccaggcctgggtttgtacttccacctccaccacatctgccagaccttaataaaggcccccacttctcccaaaaaaaaaaaaaaaaa

SEQ ID NO: 153338 - DNA, 431 bp, Homo sapiens
tctggggcatccaaaagaatcggccagccatgaattacgacaagctgagccgctcgctccgatactattatgagaaaggcatcatgccgaaggtggctggtgagcgctactcgtacaagattgtgtgtgagcccgaggccctcttttctttggccttcccagagctggctgtccccgcccagccatttggccccaagggtggctactcttactagcccccagcggctgttccccctgccgcaggtgggtgctgccctgtgtacatataaaagaaactgggggtggggaaaccttcatctgaaacccacagatgtctctggggcagaaccccactgttctaccaagtgtcctataccagactctgagctgctcaccggagtcattgggaaggaaaagtggagaaatggcaagtctagagtctcagaaactcg

SEQ ID NO: 153339 - DNA, 736 bp, Homo sapiens
  misc_feature (1)...(736): n = a,t,c or g
tttaaagtttaaataattcttttcggcagtcctttggcacagagagcccagggctccctccccaaatagccttgattgtaattctaatagcaagtgttcctccctcttccatcccgcttgaatacctctgcctccaggcaaattccccccttcctgtgtgctggggagttagctgtgagctggctggggtggggtccgtggctgggtccgtggctgggtctgatggggaagtggtgtgttcaggaggtttcctggttggattcttcagtgcgttttggtggggcctgagggtgtcgctggtggggctctgacttctctctgcagctcaggtaccagacagtgatgagcagtttgttcctgatttccattcagaaaaccgtgagtagaggtcccattctggctgtctgttgaagagggcactggaaggatggatatagaccacctgctggtcgatcagtgtccggtaaccctcctgcgggtctttcttggcagcattacggaagaacccactgcagatggccttctgcactcggacctgtgacttgccacaggaaacaacatccagcttgtgtctgtccattatgcctaacatctgcttgcgaatgtcctgggcccggcgcanggaacgagcctggataaagtctcatagcaccatggggtggagaacttgttgtcttccaggagttgacacagctagcagggtgaggtgtccccttcatctgtggaatttgccctt

SEQ ID NO: 153340 - DNA, 2385 bp, Homo sapiens
acaactgtctgctgcgcccgaaaaacaagtcggtgcgctggggacccggggccggggccgccttactccggcctagccccgcggccctcggtgcgggctccagggcatgctcggtaccccccgcggctccagcccagacgccccggcctcaggtctcggcccccgcttggggccccggccgtgcggcgcgagggagcggccggatggagcggaggatgaaagccggatacttggaccagcaagtgccctacaccttcagcagcaaatcgcccggaaatgggagacttgcgcgaagcgctgatcggcccgctggggaagctcatggacccgggctccctgccgcccctcgactctgaagatctcttccaggatctaagtcacttccaggagacgtggctcgctgaagctcaggtaccagacagtgatgagcagtttgttcctgatttccattcagaaaacctagctttccacagccccaccaccaggatcaagaaggagccccagagtccccgcacagacccggccctgtcctgcagcaggaagccgccactcccctaccaccatggcgagcagtgcctttactccagtgcctatgacccccccagacaaatcgccaatcaagtcccctgcccctggtgcccattggacagtcgcccctacagccctttccccgggcagagcaacggaatttcctgagatcctctggcacctcccagccccaccctggccatgggtacctcggggaacatagctccgtcttccagcagcccctgggacatttgccactccttcacatctcagggagggggccgggaacccctcccaggccccctaccaacaccagctgtcggagccctgcccaccctatccccagcagagctttaagcaagaataccatgatcccctgtatggaacaggcggggccagccaggccgtgggaaccaggggtgggggttcaatgggggcacagggtacccaggggcgggggtggtgatcaaacaggaacagacggacttcgcctacgactcagatgtcaccgggtgcgcatcaatgtacctccacacagagggcttctctgggccctctccaggtgacggggccatgggctatggctatgagaaacctctgcgaccattcccagatgatgtctgcgttgtcccatgagaaatttgaaggagacatcaagcaggaaggggtcggtgcatttcgagaggggccgccctaccagcgccggggtgccctgcagctgtggcaatttctggtggccttgctggatgacccaacaaatgcccatttcattgcctggacgggccggggaatggagttcaagctcattgagcctgaggaggtcgccaggctctggggcatccagaagaaccggccagccatgaattacgacaagctgagccgctcgctccgatactattatgagaaaggcatcatgcagaaggtggctggtgagcgttacgtgtacaagtttgtgtgtgagcccgaggccctcttctctttggccttcccggacaatcagcgtccagctctcaaggctgagtttgaccggcctgtcagtgaggaggacacagtccctttgtcccacttgggatgagagccccgcctaacctcccagagctggcttggccccgcccagcatttttggccccaagggtgggctactcttactaagcccccagcggctgttccccctgccgcaagtgggtgctgccctgtgtacatataaatgaatctggtgttggggaaaccttcatctgaaacccacagatgtctctggggcagatccccactgtcctaccagttgccctagcccagactctgagctgctcaccggagtcattgggaaggaaaagtggagaaatggcaagtctagagtctcagaaactcccctggggggtttcacctggggccctggaggaattcagctcagcttcttcctaggtccaagccccccacactttttcccccaaaccacagagaacaaagagtttgttctgttctgggggacaagaaaaggcgcttcccaaactttcatactggcaagggagggtgaggaggttcacctgagctccccaagatctccccactgcggggagacagaagccttggactctgccccacagctgtggcccctggagggtcccggtttgtcagttcttggtgctctgtgttcccagaggcaggcggaggttgaagaaaggaacctgggatgaggggtgctgggtataagcagagagggatgggttcccttgtccaagggaccctttgcctttcttctgccctttccttaggcccaggcctgggtttgtacttcccacctccaccacatttgccagcccttaataaaggcccccacttctcccattaaaaaaaaaa

SEQ ID NO: 153341 - DNA, 444 bp, Homo sapiens
acgagctgagtcaggagagcttaaggggagagcgggaaaggactgcagccggggagagcaggacgcgccatctccattggcaccctctcccgccccacttccatcgctagaaaactaaggattcggtgttgggaccactcctgccctgacctgccctgtgactccgtcatactctccaaaggccagaccctcctagaccagctggaaccaccatcaagatgtccccagccatgtcagactctggggccccaggcggagggcaaccagatgtcttcagctccaagtctggcctctcctcccagcaagcagccacctctgatggccaacaggtgctgctgtgtgcccagatcaagaatccacctctgcggaattcaaaaccggctggggttctgggacagcagggaggagagaggtggagacgcaacatgggtttctgtgtcagac

SEQ ID NO: 153342 - DNA, 972 bp, Homo sapiens
gcgcctgcggaattccgcacgagcggagaggctgctggctctggggaaaggagagagcagcccagtgtgacagagcgagtccccacggctctgggagtgcctcgcatgtgtgtggcccaggtcctgacagcccacctactccctccccggcaggcactgggctccctctgctccccgtgggccgctccccgcgtggggccactgcccccggcccccgccatggtgcggatttcaaagcccaagacgtttcaggcctacttggatgattgtcaccggaggtatagctgtgcccactgccgcgctcacctggccaaccacgacgacctcatctccaagtccttccagggcagtcaggggcgtgcctacctcttcaactcagtggtgaacgtgggctgcgggccagccgaggagcgggtgctgctgaccggcctccatgctgtcgccgacatccactgcgagaactgcaagaccactttgggctggaaatatgaacaggcctttgagagcagccagaagtacaaagaggggaagtacatcattgaactcaaccacatgatcaaagacaacggctgggactgacccccgctcccccgacgcatgtggctccagcccggcctgggccgccagggagccgccactggcttcccgccacccgaagggagctctggaccctcagagcccctgcagaggacggatctagctcctgtatatatattttattgcatgcactgtgaccttggggggagaacagaagggggacgacgcccccgcacctcctgcgatctggctggcttggatctcgtttttaacccgttcctgccccacctgccctatagttatggcctgtgttctgctctcctggtcccagtgcaccgtttgctctgtgaactcctcccaccaggcccttcttaccccacgcgtgtctgtccccctcgttctgtagcgtttgtacataataaaacaatggaatgg

SEQ ID NO: 153343 - DNA, 1711 bp, Homo sapiens
  misc_feature (1)...(1711): n = a,t,c or g
ggaattccgcctggtgcggatttcaaagcccaagacgtttcaggcctacttggatgattgtcaccggaggtatagctgtgcccactgccgcgctcacctggccaaccacgacgacctcatctccaagtccttccagggcagtcaggggcgtgcctacctcttcaactcagtgtgagtatctggcctcccttcttgctttccctgacctctgttgtgacctgtgacccctggcatcctgctgagactcccagagttccccggtgcaggcaggaaattgtgagcatcatttcttggatgctgaggacagacacagtgcttgagggggtgggccctgtgatggcaggaccctccctgggactaccccatgtccccacagggtgaacgtgggctgcgggccagccgaggagcgggtgctgctgaccggcctccatgctgtcgccgacatccactgcgagaactgcaagaccactttgggctggaaatatgtgaactcatccacccctgacccctggctagcccttgaacctgaccttttcaacacctttttctgacagctgggacccctatagcctttcagattgcataagccgagctcacacaagtcagcatccctgaccacattctctttatcttgcaccttgcaaggggtgtagaacttttctcttaacccatcccttctctcccaggcacttggatccccattagagagttaggatataatcagagtcaccatttatggaatgtttatgtgccttgcactgttgtgtgcctgggcgtctattatctcattcaatcattgcagtgatcctctaggtagaagctattattatctctaacagaagaaggacagggaggcccagagatgttaggtaanttgcccaaggttcacccaactggtaagtaacaggattaggggaccagatttgagttggttgggttggtttttttttcactccaaacccttggtcaccaacttatattgtcatttaaagaatcaaaaaaattgccccaaactttgcaacaacatggagcttgggttcaccagcctccctttccatagtcctcattgccactggtgctgtccagggtctgatttcactaccctgagtctcatttccttaatctcctcaagtggaaagataaagccactgccctagcacccccaggattgtttacagggatcagatttagatgcctcaggaagatgcctccttgggacacttgcaagggacaggattcttcagggcgtcgcttgggaactgtgggtgccctctgtgagggtgggatgtccccaggcagagccaggccagccagccctggaccttgaggttcgctgcttgaccctggccacagatttggctgtgtgtctctggaacaggtggcttggccactctggacctctaccaaataaagagctggccggccaggcacagtggctcacacctgtaatcccagcactttgggaggccgaggcgggtggatcacaaggtcaggagattgagacccnatcctgggctaacacggtgaaaccccatctctactaaaaaatacaaaaaaattagccgggagtagtggcggacgcctatagtcacagctactcgggaggctgaggcagggaaatggcatgaacccaggaggcagaggttgcagtgagctgagatcccaccactgcactccagcctgggcgacagagcaagactctgtctcaaaa

SEQ ID NO: 153344 - DNA, 938 bp, Homo sapiens
ggcgcagatggcggcggcgcatttcgcttgagcgggccggggccatgagcgccgcccggccccagttcagcattgatgatgccttcgagctgtccctggaggacgggggccctgggcccgagtccagcggggtcgcgcgctttgggccgctgcacttcgagcgtcgggcccggttcgaggtggctgacgaggacaagcagtcccggctgcgcataccagaacctggagaacgatgaggatggagcccaggcctctccggagccggatgggggagtcggcaccaggttagggccagggattccagccgaacttccatccgcagcttcccagtggtccttcagcaccattcagcagcagcacccagcgctcctacaacacctgctgcagctggacccaacaccctttgatccagaagaaccgccgagtggtgctggcctccttcctgctcctgctgcctggggcctggtgctgatcctggtcggcgtgggaactggaggcgaccccctcttccaaggtgtctccagcgccagtcttcttcgtgccgggctttcctgttgttggtgcctggagtctaatcacgtgatcttcatctactgcgcggtcaagggccaccggggcttccagttcttctacctgcccctacttcgagaagtgaatcgcggcgcaacgtgtacccaacttgcggcccatggggcgtcacgtcttggcccatgttccgttcccctcatctcaagggaaaaggccctcccaggaccctcgaaaccccaagccccttagggagtttgctcaggaagttcggggcatgcaggcctggccctgggaaagccgcccgtcgcctgctctgtgccttaacttattctcgggccgtgcggctgctaggttgctgttattttgtgctaataaaagagtaattaattcccccaaaaaaaaaaaaaaaa

SEQ ID NO: 153345 - DNA, 992 bp, Homo sapiens
atttgctgagtgaagataaaaatccagtgaatgtgatgcctgaggcttacttcttatgcttatgtgtctattggaaatggtaacggcacaactttctatcttttctagtgaggctggcttgccggccaggctctccccttcctttgagatggcctccctgctccaggtcagtacaaaccagaagcttaaagcggaggcttttcctttatgtggcttatcaccagcatcaaataatttgaaattaatctttccccaaatgcccttttctaattctccagagcataaaatgctaattgtgaatattaaatttatgtgggtggcacatatcctgtttaacataattttattatttaattatttcttgagacggagtcttgctttgttgcccaggctggagcacggtgggcagtcataactcactgcagcctcaagctcctggaccatgcaaccctcccatctcagccttgtgagtagctaggaccacaggcatgagccaccacaccgagccttaaaatatgttttttaaataagcagaaccatgttttttcaagaagtagcatgcacaaagacaaagagacaattttagatgtcacacacagtaagtcaagctaatgattcagatagcctgttgtagtctcacctttccaatattataaatgatagtctgatccagaatttctcttttattcccaggcaaaaattaacttattcattttttattcaacaaatattttggggctaatatttattcaacagatgtttgttgggagcctaccatgtacctgatactgttctaggtactaaagaacccacaaatgaacaaaatagtccatcactgctctcagggagcttatgttctagtgggggaagtggacagaaaacaattacacatcatacttcacagactcttaagttgccgtcaactgtaagttgtgctttcacgtcccaccaagagaggaagaaatgcacgaaatcgtcgacgcgggaattca

SEQ ID NO: 153346 - DNA, 2551 bp, Homo sapiens
  misc_feature (1)...(2551): n = a,t,c or g
tgttccattatgttcccccccccaagtaagggtcctttcccaaaattcccaggtagcagattttcccgttcccccggtgttaaaccccgggccgggcccagcctttaaaacgcccccccataaggaaaaaaataataccttgcctgcccccgtaaaatttggcccccccaagggtcctttaaaaaggcccccccnnnnnnnnnnnnnnggttgaaatccatattacctatttattcaacaaaaaactgagtatcttctatggtccaggccatgtccttggcactgcgaacagagataagtcctggccctcaaggagctcacagtctagtgggggaaaaaagacacaagaataaataaatataatgtatttggagtttgcaaagggggccactatgggagacaaagaaacagagggaacctaaatatcctatagttaggcatcccacagggaaaggaaagacctggggcaatgtacatttttgttaaagaatacgataaggcagtgggttcttcaaagtgtgggctgggctaatttacctacattcagattcatttgggaggcacatattaaccaagtaagattcccagttacctttcttgcacatattcttgatttagtacgtgtgtggggggggtgggtgtacggtttgaggcctgagaatctggcattttaaaagcacctttaggtgatgctcctgcatcttaaagtttcagaactgatgagataaagtttgttcttcttatctggaataaagaatgatctccacatctgaaatgctaactagtattagtctttaatgagggccaaggcaagtagagaaaaggatggtagttgatattttctactatagtgaagcttattttaattctcacaataatcctatgaggtagatattattatccctattttagatggaaaaaaaaaccccaaaattagatagtttaagcaatttgttcaacagtatagagctaatgaatagcaacactaacatatgaacccagattcacttaactttaaagcctggccacgttctatatctccatgctagcaccaggggacaaattaactgattaaatggtacaattttctgtgagttctgtgccagatcgttctaggtaaataaatataaagaacagctacgtggtactttagtcatgccccccacatttatccatgcacacatcctacttggcagttggggactgaggacaaatccaggaggaatgattaaaacgaatggccacttcttactcctttttccatcatttcctcacccgctggtggaggtgtatcaatgtactatgtatggctaataactgggcccatctggaaagacaagcaaacataactggataccaataaaaacaaccccatctgatgtcaaaaattcttgggacccaaaacattcagaaggtcagaaggcatttaatgaaaatggcagggcagataagactcaagtttctcaaaagataaactgccaggaccagaagcaggtccagaatttacattagttaacagctcacccttttagagaaatagtgaaaggatagcagcttcccccagtttaaaaaaatactatctgtctctctcaatacatagactcaaaggtgcaacaaaatagacacggctcagagaatagtgggatgtccaccctatttaaagagcttagggacaggcccaacctataaaaattcttctggaaggaagaaaacacacacacacaaactgcgaaatactgcttaaattcccactcaccacattcagtgtcatataaccagatcttaggcaggagcagcagagtggagcatgttagatcaataaagaaatgtcaggccaggcacggtggctcacacctgtaatcccagcactttgggaggtcaaggtggtggatcacttgaggccaggagttcgagaccagccagcctggccaacaaagtgaaacccctgtctctacaacaatacaaaaataagccaggtatggtggcatgtgcctgtaatcctagctcctcaggaggctgacgcagcagaatcacttgaaccagggaggtagaggttgcagcgagctgagatcacgctactgtactccagcctgggcaagacagagcaagacttcatctcaggaaaaaaagaaagagaaagaaatgccatggtaaaggcagctgacaacaatactgggggccttgggttcagaaggctggtgtgtaaccaccgtcctttcctatcactgagcttggagccacaacagtgacactacaaacgaaagatgggtttccagctctggagaacaactttcttatttctggcattccaaacaatttttcagtcccaagatgagttttgataaaatcagcccatagccctgacacaatggacagtacataactcagatttcattattttgtataacaaacattgtaagccagacttaaaaaaaaaattattgctatattttccccacatccaatctgggaacatttgctttcatccactttttcgtatcatgtttagagttgtttttaaaaaaatcatgcaaaccaggattaatcttct

SEQ ID NO: 153347 - DNA, 517 bp, Homo sapiens; identical to SEQ ID NO: 115477

SEQ ID NO: 153348 - DNA, 1845 bp, Homo sapiens; identical to SEQ ID NO: 115478

SEQ ID NO: 153349 - DNA, 897 bp, Homo sapiens
atggaacttcctaaagacttgtttaatggctttgcccaaaatgctgatagcaatatggacaataaaatccaggctgaggtggtctcagatagagatggggaacttgttgggaactggagcaaaggtgactcttgttatgttttagcaaagagactggtggcatcttgcctctgccctagaaatctgtggagctttgaactggagagagacgatttagggtatctggcagaagaaatttctaagcagcaaagcattcaaaagttgacttgggtgctgttaaaagcattctgttttaaaagggaaacagagcataaaagttcagaaaatgtgcagcctgatgatgcagaagaaaagaaaaacccattttttgagaagaaattcaagccagctgcagaaatttgcataagtagcaaggagcctaatgttaatccccaagaccatggggaaaatgtctccaggccatatcagagatcttcacagcagcccctcccatcacaggcccagaagcccaggaggaaaaagtggttttgtgggccgggcccagggtccctgtgctatgtgcagcccagggacttggtgctctgtgtcccagctgctccaaccgtggctgaaaggggccaatgtacagcttgggctgtggcttcacagggtggaatccccaagccttggcagcttccacgtggtattgagcctgtgggtgcacggaagtcaagaactgaggtttgggaacctccacccagatttcagaagagcttgtaccgtgaacctggaaaagcctcagacactcaacgccagcctgtgaaagcagccaggagggagcctgtaccctgcaaagccacagaggcagagctgcccaagaccatgggaacctaccttttgcgtcagcatgacctagat

SEQ ID NO: 153350 - DNA, 1134 bp, Homo sapiens
ttaagcttcaaagcaatctcctttgacttcaggtctcacatccaagtcacactgatgcaaaaggtgggttcccatggtcttgggcagctccactcctgtggctttgcagggtatagtctccctcctggctgatttccctggctggcattgagtgtctgtgacttttccaggtgcacaatgcaagctgtcagtggatctacaattctggggtctggagaaaggtggccctctactcacagctccactaggcaaagtcccagtagagactctgtgtgggggttctgatcccacattttcctcctccatttccctaacagaggttctccatgatgaccctgcccctgcagcaaaattttgcctgggaatccaggcgtttccatacatcttctgaaatctaggcagaggttcccaaacctcagttcttgacttctgtgcacctgcaggctcaacaccacatagaagctgccaaggcttgggtcttgcaccctctgaagccacagcctgagctgtagattgtcgcctttcaaccacagctggagcagctccaggcctgtgatgggaggggctgctgtgaaggtctttgacatggcctggagatgatttcccatggtcttggggattaacattaggctcctcgtcacttatgcaaatttctgcagctggcttgaatttctccccagaaaatgggtttttcttttctatcacattgtcaggctgcaaattttccaaactcttattctctgtttcccttttaaaactaaatgcttttaacagcacccaagtcacttcttgagtgctttgctgcttaggatttttttccatcggataccctaaatcatctctctcaagtttaaaattccacaaatctctagggcaggagcaaaatgccaccagtctctttgctaaaatataacaagagtcacttttgctccagttcacaaaaagttcctcatgtccatctgagaccacctcagcccggactttattgtccatattactatcagcattttgggcaaagccattcaacaagtctctaggaagttccaaactttcccacattttcctgtcttcttctgatccctccaaactgttccaacctctgcctattacccagttccaaagtcgcttccacat

SEQ ID NO: 153351 - DNA, 450 bp, Homo sapiens; identical to SEQ ID NO: 145625

SEQ ID NO: 153352 - DNA, 1113 bp, Homo sapiens; identical to SEQ ID NO: 145626

SEQ ID NO: 153353 - DNA, 1149 bp, Homo sapiens
atgtgctcaccagtgtttctcttcttcctgggcacactgcaggactcatttctcagagtctttgcaggctggttaagaaccattgttggggagctagtggactcgtttggaggtgctctgggccgtggggctcccttaaggaaaggctacagcagggagatatgccacagcctttctggaatggtccttcagaaggaagctcaccccacttccaccctggcccaagaacctgtgcatctcacctgttgcagtgcttttaagatgggggctccttccctgctcaggaagatcctccagacaattcataagtccatgggggatgtggggtcccctgtagcaaggatcccagaggttcatgacaagtgtgagtcatccttcattcacttctttcccaggaaccattcaggttcaggagctagctctagcattcaggttcacaacagacttgattttaatgtaactaatgtgtccgtatccaaggttcttctcccatccttaattcaaagcaattttgataaaagtaaaggcagaggttggaacagtttggagggctcagaagaagacagaaaaatgtgggaaagtttggaacttcctggagacttgttgaatggctttgaccaaaagcctgatagcaatatggacaatcaggtccaggctgaggtggtctcagatggagatgaggaacttgttgggaactggagcaaaggtgacttttgttatgttttagcaaaaagactggcagcattttgcccctgccctagggatttgtggaaatttgaacttaagagagatgatttagggtatctggcagaagaaatttctaagcaacaaagcattccagaggtgacttgggtgctgctaaaggcgttcagttttaaaagggaagcagagcataaaagttcagaaaatttacagcctgacaatgcgatagaaaagaaaatcccattttctgaggagaaattcaagctggctgcaggaatttgcataagtaacaaggagtcaaatgttaatccccaaggcaatggggaaaatgtctccagagtatgtcagagacctttgtggcagcctctcccatcacagacctggaggccgaggaggaaagtggtttcatgggaagggcctagggtccccgtgctgtgtgcagtttag

SEQ ID NO: 153354 - DNA, 537 bp, Homo sapiens
atgtggaagcgactttggaaccaggtaacagacacgggttggaacagtttggagggctcagaagaagacaggaaaatgtgggaaagtttggaacttcctagagacttattgaatggctttgcccaaaatgctgatagcaatatggacaacaaagtccaggctgaggtggtctcagatggagatgagaaacttgttgggaattggagcaaaggcctcctgctcctggaggaaggcatggaccctgaagcagtgggcttccaagccctgcctccagactgtagaggcccttggacaaaccctgtgggctctgtggacaatcccagagggcttgtcaacatgaaggttccatttgtcaggcccctgcatgaggaccccaaccccctgaagatcttcatgttaagtgctgctggcaacaaaagtagatggatccctggaagtctctgtctgcacgtgacagctactccaaccactgctgagcttccaggagcttcccgtgatggcaaggtaccagctgtgtgccgagtaccagctgtgtga

SEQ ID NO: 153355 - DNA, 828 bp, Homo sapiens; identical to SEQ ID NO: 145627

SEQ ID NO: 153356 - DNA, 1642 bp, Homo sapiens; identical to SEQ ID NO: 145628

SEQ ID NO: 153357 - DNA, 1048 bp, Homo sapiens
actgatggtattataggggcttcccccttcagtgggcactcattcttctccttcccgccattatgtgaagaaggacatgttgcttccccttctgccatgattgtaagtttcctgaggcctccccagccatgctgaactgtgagttaattacacctctttcgtttataaattgttcagtctcaggtatgtcttatttagcagtgtaagaacagactaatatagtaaattggtgctgcagagagtggggtgctactgtaaaaatacctgaaaatgtggaagcgactttggaactgggtaacaggcagaggttggaacagtttgtaggactcagaagaagacaggaagatgtgggaaagtttggaacttcctagagacttgttgaatggctttgaccaaaagcctgatagcaatatggacaataaaatccaggctaaggtggtctcagatggagatgaggaacttgttgggaactggagcaaaggtgactcttgttatgttttagcaaagagaactggtggcattttgcccctgccctagagatttgtggaactttgaacttgagggagatgagttagggtatctggcagaaaaaatttctaagcagtaaagcattcaagaaatgacttcggtattgtcaaaagcattcagtgttatgtattcactacaatatggttttgaacttatggaatttatgtttaaaaggaaggcagagcatgaaagtttggaaaaattgcagtctgacaatgtgattgaaaagagaaagccattttctgaggagaaattcaagctgactgcaaaagtttgcataggaaacaaggagccaaatatcaatcgagaagacaatgggaaaatgactccaggacattttggggacttgatgacctacatcccagccatggctgaaagtgtccgatgtagagctcaggctgttgcttcagagggtggaagccccaagccttggtggcttatacgtggtgttgggcatgagggtgaacagaagtcaagaactgaggtttgggaacctccaccaagatttcagaggatgtag

SEQ ID NO: 153358 - DNA, 976 bp, Homo sapiens
ccctcggacggccccggaggatgctgctgagccccggcactgcctggctgcgagcacatgatggcgatacgggagctcaaagtgtgccttctcggggacactggggttgggaaatcaagcatcgtgtgtcgatttgtccaggatcactttgaccacaacatcagccctactattgggggcatcttttatgaccaaaactgtgccttgtgaaaatgacttcacaaagttcctcatctgggacactgctggtcaggaacgtttttattcattggctcccatgtactatcgaggctcaggtgcagctgttatcgtgtatgattttaccgaggccggattccattttcatcccttgaagaaatgggtccaagcggctgaaagaacttggtccggaaaaacattgtaatggccatcgctggaaacaagtgcgacctctcagatatttagggaggttcccctgaagggatgctaaaggaatacggctgaatccataggtgccatcgtggttgagacaagtgcaaaaaatgcctattaatatcgaaagagctctttcaaggaaatcagccgcccagatccccacccttggaccccccatgaaaatggaaacaatgggaccatcaaaagttgagaagccaacccatgcaagccagtccgccggtgctgttgacccaagggcccgtggtccacgggtactttgaagaagccagagccccacatcctgtgcactgctgaaggaccctacgctcggtggcctggcacctcactttgagaagagtgagcacactggctttgcatcctggaagacctgcagggggcggggcaggaaatgtacctgaaaaggattttagaaaaccctgggaaaacccaccacaccaccaccacaaaatggcctttagtgtatgaaatgcacatggaggggatgtagttgcatttttgctaaaaaaaaaaaaaaaaacctttaaaaattgttggatgtgta

SEQ ID NO: 153359 - DNA, 2378 bp, Homo sapiens
atggatgaagctggaagccatcatcctcagcaaactaacacaggaacagaaaaccaaacactgcatgttctcactcgtaagtgggagttgaacaatgagaacacatggacacaccagtctgatgattgcaatgatctgatcgtagaataccacaagcctaaccaagctgcggccctgctacagctgccaaacagagcagtattgttgctaaagcagattattaaaacctcagtggaagtggatcatcgtaaaggtcttcatcctcatggtctttacgttgagtgggctgaggaggaagataagggaggagttggtcttgctgtctcaggggtggcagagatgggagaaaattcccctctttacaattcttcaaaatccacaattctattgatctttgaccagattacaaataggaacaatgagagttgccgtggccatgggctcagtttgtttgtcccatttgtgtatgatcgccttcccctgcggggaactgggcaaggggcaagcctggtggttcagtcctctggagtcctgatgcttgttgggctttttctttttgccagcatgctctggcactggcaaacaagtcatttagagggagctgaggagagatcaacagaatctgagaaaagtaggcaatgtgcacgcagaggccgtcacgtgggtcgccgaggctcgcaagtgcgcgtggccgtggcggctggtgtggggttgagtcagttgtgggacccggagctgctgacccagcgggtggcccaccgaaccggtgacacagcggcaggcgttagggctcgggagccgcgagcctggcctcgtcctagagctcggccgagccgtcgccgccgtcgtcccccgcccccagtcagcaaaccgccgccgcgggcgcgcccccgctctgcgctgtctctccgatggcgtccgcctcaggggccatggcgaagcacgagcagatcctggtcctcgatccgcccacagacctcaaattcaaaggtgatggatgagtatttatacgaccagaacaatactacactgtatgaaaatggtgtaaaagaagtaaaagacatggtcccttccggccccttcacagatgtagtcactacaaatcttaaattgcgaaatcccatcggatagaaaagtgtgtttcaaagtgaagactaccgtgccttcacccggtactgtgtgaggccccaacagtggaatttattgacccagggtcaactgtgactgtttcagtaatgctacagccctttgactatgatccgaatggaaaggagtaaacacaagtttatggtacagacaatttttgctccaccaaacacttcagatatggaagctgtggtgggaaagaggcaaaacctgatgaattaatggattccaaattgagatgccgtatttgaaatgcccaatgaaaatgataaattgaatgatatggaacctagcaaagctgttccactgaatgcatctaagcaagattggacctatgccgaaaccacacagtgtttcactttaatgataccgaaacaaggaaactaatggaagagtgtaaaagacttcaggggagaaatgatgaagctatcagaagaaaatcggcacctgagagatgaaggtttaaggctcagaaaggtagcacattcggataaacctggatcaacctcaactgcatccttcagagataatgtcaccagtccctcttccttcacttctttgttgtaattgcagccattttcattggattctttctagggaaattcatcttgtagagtgaagcatgcagagtgctgtttcttttttttttttttctcttgaccagaaaaagatttgtttacctaccatttcattggtagtatggcccacggtgaccatttttttgtgtgtacagcgtcatataggctttgcctttaaaggacctttaccggtaaaaaaccccattaaaaccaactggtccgcttacggaccgggtggtttttacccaaaccttccttaccaaatgtacgtggcacttggagccctttataaaattcataaataaagaattgttctttctttgtggttttaataagagttcaagaattgttcagagtcttgtaaatgttattttaataatccctttaaattttatctgttgctgttacctcttgaaatatgatttatttagattgctaatcccactcattcaggaaatgccaagaggtattccttggggaaatggtgcctcttacagtgtaaatttttcctcctttacctttgctaatatcatggcagaatttttcttatcccttgtgaggcagttgttgactgagtttttcatccttacaatcctgtcccatggtatttaacataaaaaaaaataaaactgttaacagattcttgctcgataa

SEQ ID NO: 153360 - DNA, 417 bp, Homo sapiens
tttcgtagctcagcagctccaaggagattcccttcattttatgcaagcgttatatggccagcattttcccattgaggtgcggcattatttatcgcagtggattgaaagccaagcatgaacacgtatgaccgctgccccatggagctggtccgctgcatccgccatatattgtacaatgaacagaggttggtccgagaagccaacaatggtagctctccagctggaagccttgctgatgccatgtcccagaaacacctccagatcaaccagacgtttgaggagctgcgactggtcacgcaggacacagagaatgagttaaaaaagctgcagcagactcaggagtacttcatcatccagtaccaggagagcctgaggatccaagctcagtttggcccgctggcccagctgagcccccag

SEQ ID NO: 153361 - DNA, 858 bp, Homo sapiens
atggccatttaccctcaaatacttgacagtgtatctactcccagcaagggcattcttctacgcaacctgaatgccattgtcactctcaagaaatttagcagtgataaaggcagggtgccatttgccgtgcctgacaaagtgctgtggccacagctgtgtgaggcgctcaacatgaaattcaaggccgaagtgcagagcaaccggggcctgaccaaggagaacctcgtgttcctggcgcagaaactgttcaacaacagcagcagccacctggaggactacagtggcctgtctgtgtcctggtcccagttcaacagggagaatttaccaggacggaattacactttctggcaatggtttgacggtgtgatggaagtgttaaaaaaacatctcaagcctcattggaatgatggggccattttggggtttgtaaacaagcaacaggcccatgacctactcattaacaagccagatgggaccttcctcctgagattcagtgactcagaaattggcggcatcaccattgcttggaagtttgattctcggggcgcctgggagcggggccttggcagttcaggcctcctgctgaatcggaatgaaggggcctcagctgtgctgccagagtcctcaatgccatccactatcctgggaacaggcagtgctcatcagcccatgggggaggcaactttgctggtccaggaaggtctagctctagctggctctagcaacagtcacagtaatcttgcagtttctgagtgccctcaacagtgggaggagccgcccagagccaggcagggcgacagcaacagagggaaaaccacagtggaattacaagttggttattaccatgaatccacgtga

SEQ ID NO: 153362 - DNA, 813 bp, Homo sapiens
atgctgctgtggccactgctgctgctgctgctgctgctgccaacattggccctgctcaggcagcagcggtcccaggatgccaggctgtcctggcttgctggcctccagcaccgagtggcatggggggccctggtctgggcagccacctggcagcggcggaggctggagcagagcacgctccatgtgcaccagagccagcagcaggccctgagggactcagtagatcttgataatccacaggagaacattaaggccacccagctcctggagggcctggtgcaggagctgcagaagaaggcagagcaccaggtgggggaagatgggtttttactgaagatcaagctggggcactatgccacacagctccagagaatcccctgtgatgatttaccaaagaacaaactacttcccttgtctgagcatcacgcactgaaattggagctgcccgtaaataagcagaagatggcgggtactggggacagagctaaagctgttgatggatacgtgaagccacagatcaagcaagtggtccctgagtttgtgaacgcatctgcagatgccgggggcgcagcgccacgactgagtggagttgtgatgtgtctggacagccggtgtgagagccctgactcagtccttgacaccgatggggacttcgatctggaggacacaatggacgtagcgcggcgtgtggaggagctcctgggccggccaatggacagtcagtggatcccgcacgcacaatcggtaacccgggacctctccatcgtcaacttcttcatcttcaccagaagaatcactcttgtggatgtttaa

SEQ ID NO: 153363 - DNA, 5226 bp, Homo sapiens
gcggcgcgcgtccctgggcctccgcgcgtgagcggcgcgcgcgcccccgcgggccccggcgggaggagagtcggcggccggagccgtcaccccgggcggggacccagcgcaggcaactccgcgcggcggcccggccgagggagggagcgagcgggcgggcgggcaagccagacagctgggccggagcagccgcgggcgcccgaggggccgagcgagattgtaaaccatggctgtgtggatacaagctcagcagctccaaggagaagcccttcatcagatgcaagcgttatatggccagcattttcccattgaggtgcggcattatttatcccagtggattgaaagccaagcatgggactcagtagatcttgataatccacaggagaacattaaggccacccagctcctggagggcctggtgcaggagctgcagaagaaggcagagcaccaggtgggggaagatgggtttttactgaagatcaagctggggcactatgccacacagctccagaacacgtatgaccgctgccccatggagctggtccgctgcatccgccatatattgtacaatgaacagaggttggtccgagaagccaacaatggtagctctccagctggaagccttgctgatgccatgtcccagaaacacctccagatcaaccagacgtttgaggagctgcgactggtcacgcaggacacagagaatgagttaaaaaagctgcagcagactcaggagtacttcatcatccagtaccaggagagcctgaggatccaagctcagtttggcccgctggcccagctgagcccccaggagcgtctgagccgggagacggccctccagcagaagcaggtgtctctggaggcctggttgcagcgtgaggcacagacactgcagcagtaccgcgtggagctgcccgagaagcaccagaagaccctgcagctgctgcggaagcagcagaccatcatcctggatgacgagctgatccagtggaagcggcggcagcagctggccgggaacggcgggccccccgagggcagcctggacgtgctacagtcctggtgtgagaagttggcggagatcatctggcagaaccggcagcagatccgcagggctgagcacctctgccagcagctgcccatccccggcccagtggaggagatgctggccgaggtcaacgccaccatcacggacattatctcagccctggtgaccagcacgttcatcattgagaagcagcctcctcaggtcctgaagacccagaccaagtttgcagccactgtgcgcctgctggtgggcgggaagctgaacgtgcacatgaaccccccccaggtgaaggccaccatcatcagtgagcagcaggccaagtctctgctcaagaacgagaacacccgcaatgattacagtggcgagatcttgaacaactgctgcgtcatggagtaccaccaagccacaggcacccttagtgcccacttcaggaatatgtccctgaaacgaattaagaggtcagaccgtcgtggggcagagtcggtgacagaagaaaaatttacaatccctgtttgaatcccagttcagtgttggtggaaatgagctggtttttcaagtcaagaccctgtccctgccagtggtggtgatcgttcatgggcagccagggacaacaatgcgacggccactgttctcctgggacaagtgcctttctgcaagagcctgggcagggtgccatttgccgtgcctgacaaagtgctgtggccacagctgtgtgaggcgctcaacatgaaattcaaggccgaagtgcagagcaaccggggcctgaccaaggagaacctcgtgttcctggcgcagaaactgttcaacaacagcagcagccacctggaggactacagtggcctgtctgtgtcctggtcccagttcaacagggagaatttaccaggacggaattacactttctggcaatggtttgacggtgtgatggaagtgttaaaaaaacatctcaagcctcattggaatgatggacccattttggggtttgtaaccaagcaacaggcccatgacctactcattaacaagccagatgggaccttcctcctgagattcagtgactcagaaattggcggcatcaccattgcttggaagtttgattctcaggaaagaatgttttggaatctgatgccttttaccaccagagacttctccattcggtccctagccgaccgcttgggagacttgaattaccttatctacgtgtttcctgatcggccaaaagatgtagtatactccaaatactacacaccagttccctgcgagtctgctactgctaaaagctgttggatggatacgtgaaggccacagatcaagcaagtggtccctgagtttgtgaacgcatctgcagatgccgggggcggcagcgccacgtacatggaccaggccccctccccagctgtgtgtccccccaggctcactataacatgtaccccacagaaccctgactaagtccttgacaccgatggggacttcgatctggaggacacaatggacgtagcgcggcgtgtggaggagctccctgggccggccaatggacagtcagtggatcccgcacgcacaatcgtgaccccgcgacctctccatcttcagcttcttcatcttcaccagaggaatcactcttgtggatgttttaattccatgaatcgcttctcttttgaaaacaatactcataatgtgaagtgttaatactagttgtgaccttagtgtttctgtgcatggtggcaccagcgaaggggagtgcgagtatgtgtttgtgtgtgtgtgtgtgtgtgtgtgtgtgtgcgtgtttgcacgttatggtgtttctccctctcactgtctgagagtttagttgtagcagaggggccacagacagaagctgtggtggtttttactttgtgcaaaaaggcagtgagtttcgtgaagcctggaagttggccatgtgtcttaagagtggctggactttgacatgtggctgtttgaataagagaaggacaaagggaggagaaagcacatgtgctccagtgagtcttcgtcactctgtctgccaagcaattgatatataaccgtgattgtctctgcttttcttctgaaatgtagataactgctttttgacaaagagaagccttccctctcccccacccctgtgttcttggggtagggaatggggaaaaggggcaaccttacaaagattgttgggggcaaggggaagttcacaagcttttcgggatggggcggtggcttttttcaccaaaacattaagctcatcttaattctctctttggcctctctcccctcctgcccgcccgcaccctgggaattgccactcagttcctctgggtgtgcacatatgtttggagaaatagaggagagaaaagagggccacgtaactgagagcttacagtgcccaatgcccgtttgtgttcctggccagagtggagtgcgcacccctggactccccaggccgctgaagattgttgcctgggttacccaggaagctgctgtttccggttgcccagcctttctctgagccagcggatgcacagtccgtggccttcttcaggcttattgatgatgctttttgcaaatgttgaatcatggttctgtttctaagttggatcttttttgttttctccttgccaccctaatttgacatcaaaattctctcttgtgcattgggccctgggtcattcaaacccaggtcccttcatttcccgttttctgttcacacctaatgtcttgaagagtaggtagcagcagtgtgggatgaacctaggccagcttgcttagcgggtcaccctgctgtgaagtcctgggcaggtgttggtaatgtgtgggaaatgcagtcagcaagtttgctgggggagtttgataaaagtataaaacaaaacaaaaaaagcctcgggtattaattttgttcccacgactttctttctgtagcctttacacccagaagggaagggaatgggctacagcaggtagttggaaggaagaggggggtgagccaggtgtattaaaatagcttacgggtaaggcctaaaaggtcacccctcggccccctctccaaaagaagggcatgggcacccccaggagaggatggccccaaaaaccttatttttatacatgagagtaaataaacatattttttttacaaaaataacttctgaatttatcagtgttttgccgttaaaaatattcctctatagtaaattatttattggaagatgacttttttaaagctgccgtttgccttggcttggtttcatacactgatttatttttctatgccaggcagttaggagtctctctgcctcttgaggagcaggcttacccgcatcccacttcagcccctacctacccctcaagatttgatgaaaattccaaccatgaagatgggtgcatcggggaagggtgagaaggagagcctgcctgctcatggatccaggctcgtagagtcactccctgcccgtctcccagagatgcttcaccagcacctgcctctgagacctcgctctctgttccagcaaccctggttggggggtcagacttgatacactttcaggttgggagtggacccaccccagggcctgctgaggacagagcagccaggccgtcctggctcactttgcagttggcactgggttggggaggaagagagctgatgagtgtggcttccctgagctggggtttccctgcttgtccagttgtgagctgtcctcggtgttaccgaggctgtgcctagagagtggagatttttgatgaaaggtgtgctcgctctctgcgttctatcttctctctcctccttgttcctgcaaaccacaagataaaggtagtggtgtgtctcgaccccatcagcctctcacccactcccagacacacacaagtcctcaaaagtttcagctccgtgtgtgagatgtgcaggttttttctagggggtagggggagactaaaatcgaatataacttaaaatgaaagtatactttttataatttttctttttaaaacttggtgaaattatttcagatacatattttagtgtcaaggcagattagttatttagccaccaaaaaaaagtattgtgtacaatttggggcctcaaatttgactctgcctcaaaaaaaagaaatatatcctatgcagagttacagtcacaaagttgtgtattttatgttacaataaagccttcctctggaagggaaaaaaaaaaa

SEQ ID NO: 153364 - DNA, 501 bp, Homo sapiens
  misc_feature (1)...(501): n = a,t,c or g
tcccgccgccgccgccgctgcagccactgcaggcaccgctgccgccgcctgagtagtgggcttaggaaggaagaggtcatctcgctcggagcttcgcncggaagggtctttgttccctgcagccctcccacgggaatgacaatggataaaagtgagctggtacagaaagccaaactcgctgagcaggctgagcgctatgatgatatggctgcagcatgaaggcagtcacagaacaggggcatgaactctccaaccgaagaagagaaatctgctctctgttgcctacaagaatgtggtaggcnccccgcgcgtcttccttggcgtgtcatctccagcattgagcagaaaacagagaggaattgagaagaagccagcagaacttgccaggacatcttgcaatgatgttctgggagctggtttggacaaatatcttattccccaattgcttacacaaccangaaagtnaaggtgttctacttttgaaaatgaaaggagattatt

SEQ ID NO: 153365 - DNA, 1818 bp, Homo sapiens
atgacaagtcgatcacccacactccccagccctcttccctatgctgccaagcaggaaatggttgtcagaggttattgtgcaggcggagcagggtttatctcctcagacaaaggtggaaaggctgatggcagtgtgggtcagggagggggtgttgccattactggggatggggaagctgtttcttctggcaaaaaagtttcatcagagtttacaaactcagtgtccccagctctatcagggtcctcccatacgtccccattccaagttgcagggtcccattcttttccaatcaatgccctcactttaacagtagacacctggttatcgctaatgctggtaagggcgatcggtgcgtgcctcttcggttattaccccagctggagaatggagggatgtgctgctaggcgatcaggttgggcatcgtcaggtatttcacggtctcgacgttgtaaagagacggccagtgccaagcttgcatgccagcagtggctccaagtagcgaagcgagcaggactgggcggcggccaaagcggtcggacagtgctccgagaacgggtgcgcatagaaattgcatcaacgcatatagcgctagctgtggaatgtgtgtcagttagggtgtggaaagtccccaggctccccagcaggcagaagtatgcaaagcatgcatctcaattagtcagcaaccagaaatcggaggaagaagaatatatgaaaacatttaacatttctcaacaagatctagaattagtagaagtagcgacagagaagattacaatgctttatgaggataataaacatcatgtgggagcggcaattcgtacgaaaacaggagaaatcatttcggcagtacatattgaagcgtatataggacgagtaactgtttgtgcagaagccattgcgattggtagtgcagtttcgaatggacaaaaggattttgacacgattgtagctgttagacacccttattctgacgaagtagatagaagtattcgagtgattccaacctatggaactgatgaatgggagcagtggtggaatgcctttaatgaggaaaacctgttttgctcagaagaaatgccatctagtgatgatgaggctactgctgactctcaacattctactcctccaaaaaagaagagaaagggaatgacaatggataaaagtgagctggtacagaaagccaaactcgctgagcaggctgagcgatatgatgatatggctgcagccatgaaggcagtcacagaacaggggcatgaactctccaacgaagagagaaatctgctctctgttgcctacaagaatgtgaaaacagagaggaatgagaagaagcagcagatgggcaaagagtaccgtgagaagatagaggcagaactgcaggacatctgcaatgatgttctgtactctcccccttttccaatggatgtggcttcctgtgagcagactgctgtgattgttgtgtctcttctggggtctagctgctcagcgagtctacctggctctgggctggtactgggggttgtctgcacagagtcctgtgatgtgaaccatctatgggtctctcagccagcaataccagcgcctgtttcagtggcgatatcggagggtgcaatggactctgtgaaggtccttagctttggtggtttaatgttctttgtgctgattggcctcttgccaggaggtggagctttccagaaagcatcagctgtagtagtgtggagaggaattggtggtgggcagggtcctagaactcccttgtcttccactaccagggtggataggaaaggaccaccaggtgggggtggggctaggagtgtctga

SEQ ID NO: 153366 - DNA, 513 bp, Homo sapiens
aaaacagagaggaatgagaagaagcagcagatgggcaaagagtaccgtgagaagatagaggcagaactgcaggacatctgcaatgatgttctgtactctcccccttttccaatggatgtggcttcctgtgagcagactgctgtgattgttgtgtctcttctggggtctagctgctcagcgagtctacctggctctgggctggtactgggggttgtctgcacagagtcctgtgatgtgaaccatctatgggtctctcagccagcaataccagcgcctgtttcagtggcgatatcggagggtgcaatggactctgtgaaggtccttagctttggtggtttaatgttctttgtgctgattggcctcttgccaggaggtggagctttccagaaagcatcagctgtagtagtgtggagaggaattggtggtgggcagggtcctagaactcccttgtcttccactaccagggtggataggaaaggaccaccaggtgggggtggggctaggagtgtctga

SEQ ID NO: 153367 - DNA, 962 bp, Homo sapiens
ggaagtggagcataccgccaccgccgccgccgattccggagccggggtagtcgccgccgccgccgccgccgctgcagccactgcaggcaccgctgccgccgcctgagtagtgggcttaggaaggaagaggtcatctcgctcaggagcttctctcggaagggtctttgttccctgcagccctcccacgggaatgacaatggataaaagtgagctggtacagaaagccaaactcgctgagcaggctgagcgatatgatgatatggcttgcagcagtgaaaggcatgtcacagaacaaggggcatgaacgtctccaaccgaagaagagaaatctgctctcttgttgcctacaagaatgttggtaggcgcccgccgcttccttcctggccgtgtcatctccagcattgagcatgaaaacagagaaggaatgaagaagaagcagcagatgggcaaaagagtacccgtgagaagatagaaggcagaacttgcaggacatctgcaaatgatgtttctgggagctgttgggacaaatatcttattcccaatgcgttacacaaccagaaagttaaggtgttctactttgaaaattgaaaggaggttattttaggtatctttctgaagtggcatcttgagacaacaaacaaaccactgtgtcgaactcccagccaggctttaccagggagcattttgaaattagtaagaaagaaatgcagcctacacacccaattcgtcttggtctggcactaaatttctcagtcttttactatgagattctaaactctcctgaaaaggcctgtagcctggcaaaaacggcatttgatgaagcaattgctgaattggatacgctgaatgaagagtcttataaagacagcactctgatcatgcagttacttagggacaatctcactctgtggacatcggaaaaccagggagacgaaggagacgctggggagggagagaactaa

SEQ ID NO: 153368 - DNA, 1603 bp, Homo sapiens
  misc_feature (1)...(1603): n = a,t,c or g
taccgccaccgccgccgccgattccggagccggggtagtcgccgccgccgccgccgccgctgcagccactgcaggcaccgctgccgccgcctgagtagtgtaccgccaccgccgccgccgattccggagccggggtagtcgccgccgccgccgccgccgctgcagccactgcaggcaccgctgccgccgcctgagtagtgggcttaggaaggaagaggtcatctcgctcggagcttcgctcggaagggtctttgttccctgcagccctcccacggcagagtctccagagatttgggccgctacaaaaagtgcattttgcccattcggctgtggatagagaagcaggaagagcactggacttggagtcagggaatgacaatggataaaagtgagctggtacagaaagccaaactcgctgagcaggctgagcgctatgatgatatggctgcagccatgaaggcagtcacagaacaggggcatgaactctccaacgaagagagaaatctgctctctgttgcctacaagaatgtggtaaggcgcccgccgctcttcctggcgtgtcatctccagcattgagcagaaaacagagaggaatgagaagaagcagcagaatgggcaaagagtaccgtgagaagatagaggcagaactgcaggacatctgccaatgatgtttttgaagctgttggaacaaatatctttattccccaatgctacacaacccagaaaagtaaaggtgttcctacttgaaaaatgaaaaggagattatttttaggtatcttttctgaaagtggcaatcgtgaagacaacaaacccaaccaacttgtgtcgaaactccccagcagggnttacccaggaagcaatttgaaattagtaagaaagaaatgcagccctacacacccaattcggtcttggtgctggcacctaaatttcctcagtctttttactatgagattcctaaactccccctgaaaaaggcctggtaagcctgggcaaaaacggctctttgttttaggcattttgattgaagcaatttgctgaatttggatacgctggaatggaagagtcttattaaagacagcacttctgattcatggcagttacttaggggacaatcctcactctgtgggacatccggaaaaccaggggagacgaaggagacgctggggagggagagaactaatgtttctcggtgctttggtgatccgtttcagtgtcactctgtaccctcaacatatatcccttgtgcgataaaaaaaaaaaaaaaaaaaaaaaggaaatttgcccggcaattttgattttttcaaaccctcaccctagaaaaaagggtcctggggaaaaccggcgggttttggtttttaaaacccaaatgggccccataagtgcccgggttttccaaatttttgattttgattaactttgccgggattacggggggttaaatttttaaaaaacggaacactgtgattatggggttttgtaatttagcagaactcttactggtagaaaaaatagacctgaattatgtgtaactttttggaaggtttaatctgatatcaaaataatcattgaaatacaattccattgtaaagttgtacagaaagtt

SEQ ID NO: 153369 - DNA, 459 bp, Homo sapiens; identical to SEQ ID NO: 145829

SEQ ID NO: 153370 - DNA, 310 bp, Homo sapiens; identical to SEQ ID NO: 145830

SEQ ID NO: 153371 - DNA, 454 bp, Homo sapiens; identical to SEQ ID NO: 145831
  misc_feature (1)...(454): n = a,t,c or g

SEQ ID NO: 153372 - DNA, 619 bp, Homo sapiens
  misc_feature (1)...(619): n = a,t,c or g
ctgagcccaggaaagtcgagactgcggtgaccatgatcgtgctactgcactccagccagggcaacagagtgagatcctcctcctgcagcgtctgccaccagagaatgctgtggactgagtggccttggagggatcacagcctctctgaaccttagcttgccttctgagctgtaagtaccagacgccggaccactggtatccatctgacctgcaggctcgtgcccgtgttcatgagtacctgggctggcatgccgactgcatccgtggcacctttggtatacccctgtgggtccaggtgaggagagccaatttgccctttttatctttccctcttgccccagtgccttctctccagcttcatgtgaagctctgcacagacaagacactcagtgtccttggcagtgcttctatccttaggtgcagcatacataccagttagaagactaatctctcagccaaggtggaagtcccatccttcaaggccggcactttctcagggggttcacatgggcaaagcgatgctgtgctgctgggctgcaatatctccaccacggccacaggttagcaagtgagatttggtttccgtgatgaacatcttatctgcagaaaactcgtgncg

SEQ ID NO: 153373 - DNA, 510 bp, Homo sapiens
  misc_feature (1)...(510): n = a,t,c or g
tgcgcntnccgccgaatgaacccctcgcanactgagaccatagtccagtgtcgtggaattccacagagatgaggttctcaaaatgcaaagcagaaggtccagccaagagtcggtgcccaaggcaacaaagacaggaggagactcgtaggaggagggggtggtgttggggagctggagatggagggcgaggctggagggcagtccttcaaatgcagagaagcccccgggccccactggcagatgggagcagttaggggtaaatgcctggtgccagtgtccttatagccactgcccatttgttcccagctcggccatcctgatttacctgagctgtaagtaccagacgccggaccactggtatccatctgacctgcaggctcgtgcccgtgttcatgagtacctgggctggcatgccgactgcatccgtggcacctttggtatacccctgtgggtccagatgttggggccactcattgnggtccaggtgcccaaggagaaggtggaacgcac

SEQ ID NO: 153374 - DNA, 384 bp, Homo sapiens; identical to SEQ ID NO: 145832

SEQ ID NO: 153375 - DNA, 1411 bp, Homo sapiens
atgccagggctgggattcagggagaagaaaggaggttcccggacagtcattcctgcctcccgcggctgcgggctccctgcccccatcctgtgcacgaagtgggagctcccgctgtctggcagctcccgctgtctggcagcagctgctctgcaggggacagtctggacggcagaaagttcatccttgaccccagccttccagtcaagggggtggggcctgatcccctatttcccggcgcgccgggatcctgccacagctgctgcccacaccgcgctcagcgccttcactgccatccccgctgtccttgccgcccccgccatgggcctagagctgtttcttgagcctggtgtcccagcccagccgcgccgtctacatcttcgccaagaagaatggcatccccttagagctgcgcaccgtggatttggtcaaagggcagcacaagagcaaggagttcttgcagatcaacagcctggggaaactgccgacgctcaaggatggtgatttcatcttgaccgaaagcttggccatcctgatttacctgagctgtaatgtaccagacagccggaccacttggtatccaatctgacctgcaaggcttcggtgcccgtgttcatgaagtaccctgggcctgggcatgccgacttgcatcccgtgggcaccttttggtattacccctggggggtccaaggtgtttgggggcactcattgggggtccaggtgcccgaggagaaggttggaacgcaaacaaggactgccatggaccaggccctgcaatggctggaggacaagttcctgggggacaggcccttcctcgctggccagcaggtgacactggctgatctcatggccctggaaggaagctgatgcaagccggtggctctcggctatgaactgtttgagggacggccacgactcggcagcatggcgtcggacgagtggaggctttcctgggttgctgaactatgccaggaggccccacaagcatcatcttgagcatcctggaacaggcggcccaagaaaaccctcccaacacccttcaccaggaggcctatcaggctatgctgcttcggaatcgcccaggatcccctgaagggtctgggatgggggccaaggagattagcaacaaggattcattctgttacttacttgcccctttttatctttccctcttgccccagtcccttctctccaagcttcaatgtgaagctctgcacagacaaagacactcaagtgtcctttggcaagtgctgctactcctcaggtgcaagcatacataaccagtaagagactaaatctgcaatatataaagagctcctacaaatcagtaacatgaagaacactcaaaaattggcaaatgtcatcagtgttttaaacagaataaagattccaaacactttgaatagaaaaaaaa

SEQ ID NO: 153376 - DNA, 456 bp, Homo sapiens
acaaataagtaaagatttgatggtgaaaagtgctctggataaaagtcaagcaggcacaggggaaatggcaagctgagatttggctgagggagtaagtggtcatggtgggcctaaagaataactggggaaaggtgacattttagcaaataagtgagggactgagccctgtagaagtaaaggaaagatcagtcttggtagagagaatatccccaaggcccttgttaagtttcattttattgacaagattttcttgatcagactatgcatgtctatactgagacatgttatagaagatgaaatatatatcagttggaataaaaatagtttaaaaatggccaagtgtggctgggtgcggtggttcgcgcctgtaatcccagcactttgggaggccgaggattccttggggccaggagtttgggaccagcctggccaacatggtgaaaccccgtctctact

SEQ ID NO: 153377 - DNA, 486 bp, Homo sapiens
  misc_feature (1)...(486): n = a,t,c or g
cagagggccgagacccgcgggaagaaggccatcaccaggtcagcaagggcacctcgangcaaggtccttccatagtgacgccccccaaggacatctggaatgtcactggtgcccaggtgtacttgagctgtgaggtcatcggaatcccgacacctgtcctcatctggaacaaggtatctcctctaagtaaggaagatgctggagaatatgagtgccatgcatccaattcccaaggacaggcttcagcatcagcaaaaattacagtggttgatgccttacatgaaataccagtgaaaaaaggtgaaggtgccgagctataaacctccagaatattattagtctgcatggttaaaagtagtcatggataactacattacctgttcttgcctaataagtttcttttaatccaatccactaacactttagttatattcactggttttacacagagaaatacaaaataaagatcacacatcaagactaaaa

SEQ ID NO: 153378 - DNA, 460 bp, Homo sapiens
aattgcctttcatagctaaaatcatgtaacttgagttccacagagcactccagcatatcatttatacaattactcatatatcctttatccccatattttaacatcttcatttatttggaaacactcaactacatgccaattcaaaagtcaaccacatccccatatgtaactaatttttatctttttttttttttaaacaggtgaaggtgccgagctataaacctccagaatattattagtctgcatggttaaaagtagtcatggataactacattacctgttcttgcctaataagtttcttttaatccaatccactaacactttagttatattcactggttttacacagagaaatacaaaataaagatcacacatcaagactatctacaaaaatttattatatatttacagaagaaaagcatgcatatcattaacccaataaaatactttttatcacaaa

SEQ ID NO: 153379 - DNA, 4963 bp, Homo sapiens
  misc_feature (1)...(4963): n = a,t,c or g
ccgcgtccgcggagacggaagttacttcgtctttagctcctggcgctgctggcttctgggcggtttttgtcttttgatttcaagagttaggagctcgagaaccgtttggcaatatgtacgacgcggatgaggatatgcaatatgatgaggatgatgatgaaatcaccccggatttgtggcaagaagcatgctggattgtaatcagttcctattttgacgagaaaggcttggttagacaacagctggattcttttgatgagtttattcagatgtctgttcaaagaattgtggaagacgctcctcctatagacctacaggctgaagctcagcatgctagtggagaagttgaagaaccgccacgatatttgctgaagtttgaacaaatttatctttccaagcctacccattgggaaagagatggtgctccttcaccaatgatgcccaatgaagctagattaaggaatctcacgtattctgctccgctttatgttgatataacaaaaacagtcattaaagaaggtgaagaacaacttcagactcagcatcagaaaacttttataggaaaaattccaattatgttgcggtcaacttactgccttttgaatggcttgacacgttcgtgatctttgtgagttaaatgaatgcccttcggatccttggtcgctatttcattattaaatggatcagaaaaggttctgattgcccaacggaaaatggcaacaaacaccagtttttgtcgcttgcaaaaaacggattctaaatatgcctacacgcggagagtgtagatcatgtcttgagaattcttcccgacccaccagtactatatgggttagcatgctggcaagaggaggacagggtcgccaagaagagtgctattggtcagcgcattgtggcaactctaccatatatcaagcaagaagttcccatcattattgtgttcagagcattaggttttgtgtccgacagagatattttagaacatattatttatgattttgaagatccagagatgatggaaatggttaaaccttctctcgatgaagcttttgtcatccaagaacagaatgttgcactaaatttcattggttcacgaggagcaaagcctggtgttactaaagagaaaagaattaaatatgcaaaggaagttttacaaaaagaaatgctccctcatgttggtgtcagtgatttttgtgagaccaaaaaagcctatttcttgggatacatggttcataggttacttctggcagctttgggtagaagagaactagatgacagagatcactatggaaacaagagattggatcttgctgggccgctgcttgcattcttatttagaggtatgtttaagaatttgcttaaagaagtgcggatctatgcacagaaatttattgatcgaggaaaggattttaacttggagttggcaattaaaacacggatcatatctgatggcctaaaatactctttagctactggaaactggggtgatcaaaagaaagctcatcaagccagagctggagtatctcaggtgttaaaccgcctgacttttgcgtctactctttctcacctgcgtcgtttaaattctcctattggtagagacggcaagctagcaaaaccaagacagttgcataatacgttgtggggaatggtgtgtcctgccgagaccccagagggccatgctgtaggacttgtgaagaatttagccttgatggcgtatatttcagttggatctcaaccatctccaattctggaatttttagaagaatggagtatggaaaatttagaagaaatttctcctgcagctattgctgatgcaaccaagatttttgttaatggctgctgggttggaatacataaagatcccgaacaacttatgaacaccctaaggaaattgagacgtcagatggacatcattgtgtctgaagtttctatgatcagagatattcgagagagggagattcggatctatacggatgcaggccgtatttgtagaccacttctgattgtggaaaaacaaaagctacttttgaagaagaggcatattgaccaatttgaaagagagagaatataacaactatagttggcaggatcttgtggccagtggggtagtggagtatattgataccctggaagaagaaacagtgatgcttgcaatgactccagatgatttacaggagaaagaagtagcttattgttccacatatacacactgtgagattcatccctcaatgatccttggtgtctgtgcatctattattccctttcctgatcataaccagtcccctagaaacacataccagtctgctatgggtaagcaggctatgggagtttacatcaccaacttccatgttcgcatggacacattggcccatgttctctattatcctcaaaagccacttgtgactacacggtctatggaatatctacgatttaaagagctgccagcaggcatcaactcaattgtggccattgcatcatacactggatataatcaggaagactctgttatcatgaatcgttcagctgtagaccgcggcttcttcaggtctgttttctatcgctcatacaaagaacaggagtctaaaaaaggatttgatcaagaagaagtttttgagaagcctacacgtgaaccatgccagggcattgaggcatgccatttacgacaagctggatgatgatnggttttgatagctcccagggggttcgtggtatcaggagatgatgttattataggcaaaacagtcaccttgcctggaaaatgaagatgaatttgggagagcaccaatagacgctataccaagagagactgtagcacttttctcagaactagtgagacgggcattgtggatcaggttatggtaactctcaatcaggaaggatataaattttgtaaaataagggtacgctctgttaggattccacagattggagacaaatttgctagtcgacatggtcaaaagggtacttgtggtattcagtatagacaagaggatatgcctttcacctgtgaaggtatcacccctgattatcatcatcaatccccatgccatcccctctcgtatgactattggtcacttaattgaatgccttcaagggaaggtatcgggcttaacaaggggtgaaattgggtgatgcccactccattttaatggatgctgtttaacgtggcaggaaggtttcctaatctttttatcctggattatgggctatcctcttcaggagggaaatggaggtccctgtacaatgggttcactgggtcgaaaattcacatcacaaatatttattggccccacttattaccagcgtttgaagcatatggtggatgataagattcactctcgtgctaggggacctattcagatccgtcaatagaccagccccatggagggtagttctcccgaatggtggcctgcgtttttgaagaaatggaccgagatttgtcagattgcccatggagcagacccagtttttaagtggaaagattgtttgaaggccatccagaaccccatatccaggttccatgctttgccaatcctttgtggaataaatggcgattgcccaacacccaggaccccatacatatgaatgcaggggctgcccgcaataaaaccccagattttctttggtgcgaatgcctaccgcatgcacactaattgtttcaggaacttatgtcctatgagtattgccccgcgaatgatgagtgtttagctattttacaggagtcaacaagataattaaatatcttggtgtcttgtttcttattgtgtggctcttttaaaaaatgacaaaatatgtactgtgttgtgataaaaagtattttatttgtttaatggatatgcatggcttttcttcctggtaaatatataataaatttttgtagatagtcttgatgtgtgatctttattttgtatttcctctgtgtaaaaccagtgaatataactaaagtgttagtggattggattaaaagaaacttattaggcaagaacagggtaatgtagttatccatgactacttttaaccatgcagacttaataatattctggaggtttattgctcgggccctttcacctttttttcactgggtatttcatgtaaggcatcaaccactagtaatttttgctggatggctggaagcctgtcccttggggaattgggatgcatgggcactcatatacttccaagcatccttcctttacttaggaagggaagatacccagcacccaagccaggtttacttcatggcttttctggggccaccccggggtctgaatgggccaggttgtccccggtcaccaggcaggaagttctgtcctttgaactcccataagtgacccctttttaccttgttccagatgaggacaggtgtcggggattccgcatgacctcacagctcaagtacacctgggcaccagtgacattccagatgtcctttggggggcgtcactatggaaggaccttgctcgcaggtgcccttgctgacctgggtgatggccttctccccgcgggctctcggccctctggctggcggcgcgcagatggcaagccgctcgggtaggtggtgccgtcgctgccgcacaccgggtagcggctcttgcacacgcacacgccgcttacacccggaccgccggctgctgccccggctttacccttccgcctcttgcggctcttcacgcactccatgcccggcgcgcagtaccccctgccggcgccgccacccccgcacggctcgccctcgccgcgggcgcacatagggcagcagccgcacgcgtcgcgggtctcgcccagcaggcagcccagcgggggcaggggcgggcaggaggccggctcgcaggggccgcaggtgtccgaagaggaggaagaggagaggggcaggagcaggagcagcagcccagcggcgccgaggagcagggcgcgcagcgacggccgctccatggcggggtgcggtggcactcgtgccgctcgtgcc

SEQ ID NO: 153380 - DNA, 383 bp, Homo sapiens
  misc_feature (1)...(383): n = a,t,c or g
cgcgtcgcgaggcgagcgtcctccttttgtgcgagcgccggcggctcggcttctcgaaggagaagaaactgaggcctggaatttgattaactcattcaaggttacccagttgatataaggacaaggacagaatcaccagcactggctgaaggtaccttaacatggggaatcttcttaaagttttgacatgcacagaccttgagcaggggccaaattttttccttgattttgaaaatgcccagcctacagagtctgagaaggaaatttataatcaggtgaatgtagcattataagatgcagaaagcatcttggaggacttgcagtcatacagaggagctggccacganatacgagaggcaatccagcatccagcagatgagaag

SEQ ID NO: 153381 - DNA, 2152 bp, Homo sapiens
  misc_feature (1)...(2152): n = a,t,c or g
aaactgaggcctggaatttgattaactcattcatggttacccagttgataactgcagcattggactagaggtggagagagtggtactgggggagtggtgaagcaggtaattcatttgcacacctgttagcaagaaacagaaagttgaaggactggaacaagtgaactaggaaagagggaacgccaatccaaggattagaaggacaaggacagattcaccagcactggctgaatggtaccttaacatggggaatcttcttaaagttttgacatgcacagaccttgagcaggggccaaattttttccttgattttgaaaagtggcagatgcccagcctacagagtctgagaaggaaatttataatcaggtgaatgtagtattaaaagatgcagaaggcatcttggaggacttgcagtcatacagaggagctggccacgaaatacgagaggcaatccagcatccagcagatgagaaagttgcaaagaagaaggcatggggtgcagttgttccactaagtaggcaaattaaagaaattttacgaattttctcagaggttagaagcagcattaagaggtcttctgggagccttaacaagtaccccatattctcccacccagcatctagagcgagagcaggctcttgctaaacagtttgcagaaattcttcatttcacactccggtttgatgaactcaagatgacaaatcctgccatacagaatgatttcagctattatagaagaacattgagtcgtatgaggattaacaatgtacccggcagaaggagaaaatgaagtagctaatgaattggcaaatcgaatgtctttgttttatgctgaggcaactccacatgctgaaaaccttgagtgatgccacaacaaaatttgtatcagagaataaaaatttaccaatagaaaataccacagattgtttaagcacaatggctagtgtatgcagagtcatggctggaaacaccggaatacagaagccagattttacaaaatgaagagacagtgtcattcctgccntggagggcaatggtggggtgttcataatactcctatgaccaccgtacatccagtggggaggcattttgcttaaaacttccaaaatttgatatgaaaggttgtatcaaagttcttaaggaccaacctcctaatagtgtggaaggtcttctaaaatgctctcagggtacacaacaaaacatttggaatggatgagactacctccaagcaaattaaaatccatgctgccaataacaattctgggaataaagcaccctgctgtagacagaagacagtattctgcaatgactgagaatgcagttttttagtgattgcaattactatctcatttattcttgcttttatttctttcctctgttcctcttccctcttttttaatcatgttcttaagacttcttttctgtgccaaaatcagtaaagttacactctgaagggatattcatccttttcaaacggggccatctaagggcagctaatttatggcattgcattgggggtctctactgaggaaaaattctgggacttggaactaaatatttttaaaatgtggggatttttttttgaaaactaatattttaatattgcttctccctgcatgggcaaaactgccttattctgctatttaaaaaaccctcaatgactttattttcctactgccgcctttttcatgtgcaacccaaaatgaaaatgttttaaattaactgtgttgtacaaaatggtacccaacacaaactttttttaaattagtaatactttttgtttaaagttttaagtttgcgattttgacttttttttgtaaggatgtatgttgtgtgtttaacctttatttactaacgttaaaagtctgtgatgtgtgcgtagaatattacgtatgcatgttcgatgtctaaagatatggctgttaatgccaccaataaaaatcagctttcatttttctaagtgtggcttggtttactgatgttttgtttttaggcttctgaagttttccccatgtatgtttttatggaatgcatatatacattacatgattttttcttcttttaggggagagccgggtcttttcattagaattttgatcatcgctccatgtatatacttttaattgcctttaaaattttgctaagtatcaaa

SEQ ID NO: 153382 - DNA, 505 bp, Homo sapiens
  misc_feature (1)...(505): n = a,t,c or g
gcccccaatgaagccgttcggaaactgaagatcctcggaannnccgggncgacccacgcgtncgggagagctgagcagtcaagatgtgtgacttcacctaagaccagaccgcatagttcaaggaggccttccagctgtttgaccgaacaggtgatggcaagatcctgtacagccagtgtggggaaccccaagagtgatgagatgaatgtgaaggtgctggactttgagcactttctgcccatgctgcagacagtggccaagaacaaggaccagggcacctattaggattatgtcgaaggacttcgggtgtttgacaaggaaggaaatggcaccgtcatgggtgctgaaatccggcatgttcttgtcacactgggtgagaagatgacagaggaagaagtanagatgctggtggcagggcatgaggacagcaatggttgtatcaactatgaagagctcgtccgcatggtgctgaatggctgaggacctttccagtctccccagagtc

SEQ ID NO: 153383 - DNA, 504 bp, Homo sapiens
tgacttcaccgaagaccagaccgcagagttcaaggaggccttccagctgtttgaccgaacagagatgaatgtgaaggtgctggactttgagcactttctgcccatgctgcagacagtggccaagaacaaggaccagggcacctatgaggattatgtcgaaggacttcgggtgtttgacaaggaaggaaatggcaccgtcatgggtgctgaaatccggcatgttcttgtcacactgggtgagaagatgacagaggaagaagtagagatgctggtggcagggcatgaggacagcaatggttgtatcaactatgaagagctcgtccgcatggtgctgaatggctgaggaccttcccagtctccccagagtccgtgcctttccctgtgtgaattttgtatctagcctaaagtttccctaggctttcttgtctcagcaactttcccatcttgtctctcttggatgatgtttgccgtcagcattcaccaaataaacttgctctctgggaa

SEQ ID NO: 153384 - DNA, 1259 bp, Homo sapiens
  misc_feature (1)...(1259): n = a,t,c or g
ccattactgcaggaaaaggtcccggagagctgagcagtcaagatgtgtgacttcaccgaagaccagaccgcagagatgaatgtgaaggtgctggactttgagcactttctgcccatgctgcagacagtggccaagaacaaggaccagggcacctatgaggattatgtcgaaggacttcgggtgtttgacaaggaaggaaatggcaccgtcatgggtgctgaaatccggcatgttcttgtcacactgggtgagaagatgacagaggaagaagtagagatgctggtggcagggcatgaggacagcaatggttgtatcaactatgaagcgtttgtgaggcatatcctgtcggggtgacgggcccatggggcggtacggctcctcccagcctctcctctagttgatctccccagtgtttcttttttccccaacctgtgctctttatcccctgcccttaccctactacnatctgacttcntcctggcatgtttctgcatggagctgactagggaggggagggattctcaaagaggaagaccaacctgggggtacagtacctccttactctagaatgggccctgaggttttacttatgcggccctgggtgctggtgtctgggaacctcaccagcctgtataccagtcttgctttagggtgaccttctggccctggagcatgggtagctggcatagaggggtatgggttgcctgccccattctgctgctatagctgaacagtcctttccccttccctcgctgggcagcttggcaggtaccctaacccaaaactctgtcctctcctcccgccagtggctgacagtagctgtaggtgtagtggagaacttttctgcctctgctgtgttcttgctgcttaggtttgggtgggggactaacagctgctgggaggggagctaggggcatggagaactggtcagactcaaggtggctcctctgcaaactgaccccagggttggttgctgtgggcatgttcccgcttatgctacctttgcagtctggtagtcccctggcccttggcgtacccctccacagccctgttccctggctcatcccacctttcctttccacagagctcgtccgcatggtgctgaatggctgaggaccttcccagtctccccagagtccgtgcctttccctgtgtgaattttgtatctagcctaaagtttccctaggctttcttgtctcagcaactttcccatcttgtctctcttggatgatgtttgccgtcagcattcaccaaataaa

SEQ ID NO: 153385 - DNA, 467 bp, Homo sapiens
actaaaattccggccgcgtcgacggagaacttttctgcctctgctgtgttcttgctgcttaggtttgggtgggggactaacagctgctgggaggggagctaggggcatggagaactggtcggactcaaggtggctcctctgcaaactgaccccagggttggttgctgtgggcatgttcccgcttatgctacctttgcagtctggtagtcccctggcccttggcgtacccctccacagccctgttccctggctcatcccacctttcctttccacagagctcgtccgcatggtgctgaatggctgaggaccttcccagtctccccagagtccgtgcctttccctgtgtgaattttgtatctagcctaaagtttccctaggctttcttgtctcagcaactttcccatcttgtctctcttggatgatgtttgccgtcagcattcaccaaataaacttgctctctgggaaaa

SEQ ID NO: 153386 - DNA, 1002 bp, Homo sapiens
atgctttactgcttctccagcggcaatgtgtcaaaatccccaactgccaataatgcccgcactggacgcgctgattacgtgtctattaccgatgatgaagcccttgaagccttcaaaacgctgtgcctgcacgaagggatcatcccggcgctggaatcctcccacgccctggcccatgcgttgaaaatgatgcgcgaaaacccggataaagagcagctactgttgaaggagcgcaaagaaggcgcattcgttcctttcgtcacgctcggtgatccgggcattgagcagtcattgaaaattatcgatacgctaattgaagccggtgctgacgcgctggagttaggtatccccttctccgacccactggcggatggcccgacgattcaaaacgccactctgcgcgcctttgcggcaggtgtgactccggcacaatgttttgaaatgctggcactgattcgccagaaacacccgaccattcccattggcctgttgatgtatgccaatctggtgtttaacaaaggcattgatgagttttatgcccagtgcgaaaaagtcggcgtcaaaacggtgctggttgccgatgtgccagttgaagagtccgcgcccttccgccaggccgcgttgcgtcataatgtcgcacctatcttcatctgcccgccaaatgccgatgacgacctgctgcgccagatagcctcttacggtcgtggttacacctatttgatgtcacgagcaggcacagtggccaagaacaaggaccagggcacctatgaggattatgtcgaaggacttcgggtgtttgacaaggaaggaaatggcaccgtcatgggtgctgaaatccggcatgttcttgtcacactgggtgagaagatgacagaggaagaagtagagatgctggtggcagggcatgaggacagcaatggttgtatcaactatgaagttttaattcatacgggtccagctcatagcagagatcgacttcgatcatcagttcgtctggattag

SEQ ID NO: 153387 - DNA, 853 bp, Homo sapiens
  misc_feature (1)...(853): n = a,t,c or g
caaagggtccttcccaaaaatcccccggtgggttttaaaaaccccccccaaaaagaaaaaaaatttattttcccccccccggtaaaatttggcccccccagggatttttttaaagggccccccccnnnnnnnnnnnnnnnnnnnnnnnnnnngcccagagagcaagtttatttggtgaatgctgacggcaaacatcatccaagagagacaagatgggaaagttgctgagacaagaaagcctagggaaactttaggctagatacaaaattcacacagggaaaggcacggactctggggagactgggaaggtcctcagccattcagcaccatgcggacgatgctcccgcccatgggcccgtcaccccgacaggagtatgcctcacaaacgcttcatagttgatacaaaccaattgctgtcctcatgccctgccaccagcatctctacttcttcctctgtcaatgttctaccccggtgtgacaaagaacatgccggatttcagcacccatgacgggtgccatttccttcccttgtaaaacacccgaagttccttcgacataaatcccataggtgaccctgggtcctggttcttggccactgtctgcagcatggggcagaaagtgctcaaagtccagcaccttcacattcatctcatcactcttgggggttccccaggaccttgagcaccttcggcgtgggtagggttctggcccagggccctcatcacatccccacacctggctgtacaggatcttgccatcacctgttcggtcaaacagctggaaggcctccttgaactctgcggtctggtcttcggggagtcacaacatcttgatgctcagctctccggggacc

SEQ ID NO: 153388 - DNA, 706 bp, Homo sapiens
ccaggaaaaggtcccggagagctgagcggtcaagatgtgtgacttcaccgaagaaccagaccgcagagttcaaggaggccttccagctgtttgacccaaaccaggtgatggcaagattccctgtacagcccagtgtggggatgtaatgagggccctgggccaaaaccccctaccaaacgccgagggtgctcaaggctcctggggaacccccaagaagtgatgacatgagtgtgaaggagcatgtactgtgagcacttttttgcacattcttcagacgagtggcccagaaccagggcccagggcacctactgaggattatgtcgaagactttcgggtgtttgacaaggaaggaaaatggcacccgtcatgggtgcttgaaatccggcatgttcttgtcacactgggtgaagaagattgacagaggaagaaagtagagatgctggtggcagggccatgaaggacagccaatgggttggtatccaactatgaagagctcgtccgcatggtgctgaatggctgaggaccttcccagtctcccccagagtccgtgccttttcctgtgttgaattttgtatctaagcctaaaagtttcccctaggctttcttgtctcagcaactttcccatcttgtccccctttggatgatgtttgccgtcagcattcaccagagtaaacttgctttttgggcaaaaaaaaaaaaaaaaaaa

SEQ ID NO: 153389 - DNA, 796 bp, Homo sapiens
  misc_feature (1)...(796): n = a,t,c or g
atgggggaatcccccactcctcagagcctggcccaaaccccggcccgattcctggccctccaggagggccttggaagcttagccaggaacagaaaaccaaatacctcacgtcagttctttgctgacaatgtgatcttatacttagaaaattctgaagactccatcaagaggggagcagccaaaatggcagaattgaaacaactctgcggcttccaccaagaaggacgaaaatggcgaatgaattctacatcttcaattgctgtaccaagcgccgacagcggacccaagatggcgaccgagttggagtacgagtctgtgctgtgtgtgaagccagacgtcagcgtctaccggattccgncccgggcctccaaccgcggttacagaagtttagcaatggcgtctttctctgctgagaccaattcaactgacctactctcacagccatggaatgagcccccagtaattctctccatggtcattctcagccttacttttttactgggattgccaggcaatgggctggtgctgtgggtggctggcctgaagatgcagcggacagtgaacacaatttggttcctccacctcaccttggcggacctcctctgctgcctctccttgcccttctcgctggctcacttggctctccagggacagtggccctacggcaggttcctatgcaagctcatcccctccatcattgtcctcaacatgtttgccagtgtcttcctgcttactgccattagcctggatcgctgtcttgtggtattcaagccaatctggtgtcagaatcatcgca

SEQ ID NO: 153390 - DNA, 1065 bp, Homo sapiens
atggttggaatatataagactggagtcttttgggttggctgtgatggaaagacaaagaggaaaggaaacttaaggatgctggcaagagaactgttgaaacaaggagatgggaggaataaagagaaggctaacaatgtgcagaacatgaagaagaacaggaattgggttgatcccacgtatagtctatttaacaggatcaaattttccaaaaagataatcggaatacacgccgaaagtgtggcaaaacattttaacaggtgtcgtcctgaaaaatcggagataaagagtgtttcaatatggctccccgcgtcaccgaaaaggttaatctcagaaactaacttgaactcgcgcggaagtgacgcaacagaagttgtcgcgctttgcatctccgcctcccgtgctccgcctccggtcttacgtttcgcccccggcagcgccgacagcggacccaagatggcgaccgagttggagtacgagtctgcgctgggtagtgaagcctaacgtcagcgcctaccggattccgccccgggcctccaaccgcggttacagggcctctgactggaaattagactatgcctgattggactggtcgcctccgaatcacttcaaaagggaagactgcctatatcaaactcgaggataaagtttcaggggagctctttgctcaggcaccagtagaacaatatcctggtattgctgtggagacggtgacagattctagccgctactttgtaatcctggatctcggatggtactgggcgcagtgctttcattggcattggcttcacagatcggggagatgccttcgactttaatgtctccttgcaggatcacttcaagtgggtaaagcaggaatctgagatttcccaggaatctcaagaaatggatgctcgtcctaagttggatctgggcttcaaggaaggacaaaccatcaagttgtgtatcgggctctgttccaaaccaggcaccacagccatccaactgggtccagttctgaatggcattggcaggacattaaggacagacttgaggaataaaaatgaccttgagggcaccaatctgtga

SEQ ID NO: 153391 - DNA, 2654 bp, Homo sapiens
  misc_feature (1)...(2654): n = a,t,c or g
agcggtaccgctccggaatttccgggtcgacgatctcgtgttggagtacgagtctgtgctgtgtgtgaagccagacgtcagcgtctaccggattccgccccgggcctccaaccgcggttacagggcctctgactggaaattagaccagcctgattggactggtcgcctccgaatcacttcaaaagggaagactgcctatatcaaactcgaggataaagtttcaggggagctctttgctcaggcaccagtagaacaatatcctggtattgctgtggagacggtgacagattctagccgctactttgtaatccggatccaggatggtactggtgggtaaagcaggaatctgagatttccaaggaatctcaagaaatggatgctcgtcctaagttggatctgggcttcaaggaaggacaaaccatcaagttgtgtatcgggaacattacaaacaagaaaggaggtgcttctaagcccaggactgcaaggggtgggggtctgagcttactcccacccccgccatgaggcaaagtcactattcccccaccatcctcctcaagttgccatcaaccaatcatgtcaccccaccatccattccgaaatctaaccatggaggcagtgatgcaagatatccttttaagatttggattctcctgctcctgtcacgacaccagcaccaactccaggtttctgtaagcaatggacttggtggggagacttcagcactgcctccagctctgttcccaaaccaggcaccacagccatccaacttgggtccagttctgaatggcattggcaggacattaaggacagacttgaggaataaaaatgaccttgagggcaccaatctgtgagggaagttaggaacccatttcctccccagaaccagaatgactggacaatctttttcatagcttctccatcacattcaagctggtttatgtcactcccctgtgttgttacttgtacagccaagaaagtatctgttatctcctgcgtagtaccaaggtagggggactagttggatcttattatagttttgggctggactatgcagggctttaaaagggccagcgtctgttttggaggggggaattgacctcttaacatctgttaaaatttgtcttcatcttttaattttctttaacttatttcaaaattcatctcatgacccttgtgtgcctctttgtgaagccctatttagcaatttcaggggagtcaaaaaccttgcaacttccttctccactaacccaggactaaaaatggacaggctgacctcagtgtttacaaattcagaattttgataggggtagatatggagaaagacctatttcctgggtctctgctgtgtagtctccttcaggcttattgtgctcagtgaacatccagtgctgggtgcagctccatcaccctcttgtgtgtttacatgtctctttctatgataagagggttgtgttggtgggcacctccactactcttttctgtttgttgagtttgaattgtgtaacatctttgatcagtggggtgtatctgtaaatgaagggaggttcaagaggctgtgctttccaagtgatagtctataggagtgtttaatttcttgcagctccatctggttgctgcatttgaagcatggcattaatttgtatttgccctgttctttgacctaaagttgaagggtttagagtttttaacctgatctgtagagcagagaggttgaaagcacttaactcttgtttagtatcctcattgccttgctgcctgagaaattggcccctttccataaacatttcttttcagttcatgtagttctttaatagaaagctgctattatggatattgccatttggggaaggaagttggagaggcccagctttactgggacaggttttgcccaaggctttgatacctgtcacccagggtatcttaaaagcaagttgttctcccactactttccttttccctctggccctgccattccctaattacaaaggctgtggaaaaaagttctgcttcttaggtgaatgggtactttctattttgtttctaaacgagcaattttgaggatgaaaatgggaagatatcattgcttccttttttgcacctattgggtatgtacactctggcccgaagggggggttgnnccccnccntcntaaaatttggggntgnttaaagtttccaaaatatattaccttcccccggattcctccttccttccacctttttcctgaactttgggtcccattttccttttccattgccctccctttcccccaggcaggctctattcttgcagagcccatagccaggacatggttaaaattcccaatagaaaacactaaaagggaaagtcctgtggaatcactagtgactaaatactggggaccctattttctcaatcttcctcccatgttgtgttctttgtattcttgagatgataatatattatgtatttgaattcctgaaaaatggaaaatgtttaagatatatgtatataaatgattatgctgtattggtgcaataatggtaattaaaaatatgaaaaaaagtgtctcttttatcttttaatttgcttatttgattaccttttaaatttaattgaccaaatataagtggaccagtagttaataaaggatatttatatcactctttattaag

SEQ ID NO: 153392 - DNA, 324 bp, Homo sapiens
attctgaaaaagaatgtggggtttccttgcagatgagttcatctgttgtttcatttcctttacaataactcccccactggaaaggattctgaaagaaatgaagtcagccctcagaaatgaagttgactgcctgctggctttctgttgactggcctggagctgtactgcaagacccttgtgagcttccctagtctaagagtaggatgtctgctgaagtcatccatcaggttgaagaagcacttgatacagatgagaaggagatgctgctctttttgtgccgggatgttgctatagatgtggttccacctaatgtcagggaccttc

SEQ ID NO: 153393 - DNA, 1047 bp, Homo sapiens
atggcagagattggtgaggatttggataaatctgatgtgtcctcattaattttcctcatgaaggattacatgggccgaggcaagataagcaaggagaagagtttcttggaccttgtggttgagttggagaaactaaatctggttgccccagatcaactggatttattagaaaaatgcctaaagaacatccacagaatagacctgaagacaaaaatccagaagtacaagcagtctgttcaaggagcagggacaagttacaggaatgttctccaagcagcaatccaaaagagtctcaaggatccttcaaataacttcagggaagaaccagtgaagaaatccattcaggaatcagaagcttttttgcctcagagcatacctgaagagagatacaagatgaagagcaagcccctaggaatctgcctgataatcgattgcattggcaatgagacagagcttcttcgagacaccttcacttccctgggctatgaagtccagaaattcttgcatctcagtatgcatggtatatcccagattcttggccaatttgcctgtatgcccgagcaccgagactacgacagctttgtgtgtgtcctggtgagccgaggaggctcccagagtgtgtatggtgtggatcagactcactcagggctccccctgcatcacatcaggaggatgttcatgggagattcatgcccttatctagcagggaagccaaagatgttttttattcagaactatgtggtgtcagacggccagctggaggacagcagcctcttggaggtggatgggccagcgatgaagaatgtggaattcaaggctcagaagcgagggctgtgcacagttcaccgagaagctgacttcttctggagcctgtgtactgcggacatgtccctgctggagcagtctcacagctcaccgtccctgtacctgcagtgcctctcccagaaactgagacaagaaagggggacaattcccggaagtggaattacagagtcaaaggacatgcatttttcaagcctcggatgcatcttactagatgtcctatag

SEQ ID NO: 153394 - DNA, 1057 bp, Homo sapiens; identical to SEQ ID NO: 151106

SEQ ID NO: 153395 - DNA, 753 bp, Homo sapiens
atgtctgctgaagtcatccatcaggttgaagaagcacttgatacagatgagaaggagatgctgctctttttgtgccgggatgttgctatagatgtggttccacctaatgtcagggaccttctggatattttacgggaaagaggtaagctgtctgtcggggacttggctgaactgctctacagagtgaggcgatttgacctgctcaaacgtatcttgaagatggacagaaaagctgtggagacccacctgctcaggaaccctcaccttgtttcggactatagagtgctgatggcagagattggtgaggatttggataaatctgatgtgtcctcattaattttcctcatgaaggattacatgggccgaggcaagataagcaaggagaagagtttcttggaccttgtggttgagttggagaaactaaatctggttgccccagatcaactggatttattagaaaaatgcctaaagaacatccacagaatagacctgaagacaaaaatccagaagtacaagcagtctggtggatggaatggaacctggatgaccaaagcctcctttagcttgtggctagaaatcgcgtccctttatattcttcatatcccagatctgccaactccattgccctgtatattcatgatctctgcaaaatgctgccaagcagttcttaacatttcagtcttcaagaaagaatctgggatctgcacaggctggcagagctatggacattcaggggttttgcatgtatgctga

SEQ ID NO: 153396 - DNA, 2084 bp, Homo sapiens
gcggccgcgtcgaccacgcatggagaattttaccacccagagacacgcgagtggccctgtgcaagtttcaactgcgcggggggcggggaattccgcagacaggattctagaatttatgtcttgtgtggtaacatttcagccggtgggtggcggggattaggcgtgaagcggttcagcaggcagaggttctcggacgccctccggcgaagccacctgttgatgcttttgactttctgtccttgttcctcgtcccatctggagcatttccaattctggttttgcggagcagcaggtctgagcttgtccggcgagggtgggagttggtcccggcggagatccagtgggaagagccggcggctgcccgggcaactcccccactggaaaggattctgaaagaaatgaagtcagccctcagaaatgaagttgactgcctgctggctttctgttgactggcccggagctgtactgcaagacccttgtgagcttccctagtctaagagtaggatgtctgctgaagtcatccatcaggttgaagaagcacttgatacagatgagaaggagatgctgctctttttgtgccgggatgttgctatagatgtggttccacctaatgtcagggaccttctggatattttacgggaaagaggtaagctgtctgtcggggacttggctgaactgctctacagagtgaggcgatttgacctgctcaaacgtatcttgaagatggacagaaaagctgtggagacccacctgctcaggaaccctcaccttgtttcggactatagagtgctgatggcagagattggtgaggatttggataaatctgatgtgtcctcattaattttcctcatgaaggattacatgggccgaggcaagataagcaaggagaagagtttcttggaccttgtggttgagttggagaaactaaatctggttgccccagatcaactggatttattagaaaaatgcctaaagaacatccacagaatagacctgaagacaaaaatccagaagtacaagcagtctgttcaaggagcagggacaagttacaggaatgttctccaagcagcaatccaaaagagtctcaaggatccttcaaataacttcaggctccataatgggagaagtaaagaacaaagacttaaggaacagcttggcgctcaacaagaaccagtgaagaaatccattcaggaatcagaagcttttttgcctcagagcatacctgaagagagatacaagatgaagagcaagcccctaggaatctgcctgataatcgattgcattggcaatgagacagagcttcttcgagacaccttcacttccctgggctatgaagtccagaaattcttgcatctcagtatgcatggtatatcccagattcttggccaatttgcctgtatgcccgagcaccgagactacgacagctttgtgtgtgtcctggtgagccgaggaggctcccagagtgtgtatggtgtggatcagactcactcagggctccccctgcatcacatcaggaggatgttcatgggagattcatgcccttatctagcagggaagccaaagatgttttttattcagaactatgtggtgtcagagggccagctggaggacagcagcctcttggaggtggatgggccagcgatgaagaatgtggaattcaaggctcagaagcgagggctgtgcacagttcaccgagaagctgacttcttctggagcctgtgtactgcggacatgtccctgctggagcagtctcacagctcaccatccctgtacctgcagtgcctctcccagaaactgagacaagaaagaaaacgcccactcctggatcttcacattgaactcaatggctacatgtatgattggaacagcagagtttctgccaaggagaaatattatgtctggctgcagcacactctgagaaagaaacttatcctctcctacacataagaaaccaaaaggctgggcgtagtggctcacacctgtaatcccagcactttgggaggccaaggagggcagatcacttcaggtcaggagttcgagaccagcctggccaacatggtaaacgctgtccctagtaaaaatac

SEQ ID NO: 153397 - DNA, 1319 bp, Homo sapiens
cgcagttcccgggtcgactatttcgtgtcgttgggcttttcccacttccttctactacgtacttcttccctattcctcctactgaggccattaaacccttagttgtaattttccctgaacatgctttacattctgatgaattctgaaaaagaatgtggggtttccttgcagatgagttcatctgttgtttcatttcctttacaatgtaggttttcttctctgtctttttggattagcctgtttttggttctgtctaccaaggatccctttctttagacttctatagatccctttctatagaacttaatctacttaagtcagggagaccacccagaaggaaagagcccatactttcaatcttaggcataagttagcttgataagattttcagaaaaattcccttttaaccacagaactcccccactggaaaggattctgaaagaaatgaagtcagccctcagaaatgaagttgactgcctgctggctttctgttgactggcccggagctgtactgcaagacccttgtgagcttccctagtctaagagtaggatgtctgctgaagtcatccatcaggttgaagaagcacttgatacagatgagaaggagatgctgctctttttgtgccgggatgttgctatagatgtggttccacctaatgtcagggaccttctggatattttacgggaaagaggtaagctgtctgtcggggacttggctgaactgctctacagagtgaggcgatttgacctgctcaaacgtatcttgaagatggacagaaaagctgtggagacccacctgctcaggaaccctcaccttgtttcggactatagagtgctgatggcagagattggtgaggatttggataaatctgatgtgtcctcattaattttcctcatgaaggattacatgggccgaggcaagataagcaaggagaagagtttcttggaccttgtggttgagttggagaaactaaatctggttgccccagatcaactggatttattagaaaaatgcctaaagaacatccacagaatagacctgaagacaaaaatccagaagtacaagcagtctgttcaaggagcagggacaagttacaggaatgttctccaagcagcaatccaaaagagtctcaaggatccttcaaataacttcaggatgataacaccctatgcccattgtcctgatctgaaaattcttggaaattgttccatgtgattaacatggaactgcctctacttaatcattctgaatgattaaatcgtttcattttctaaatgtgtaaaaaaaaaaaaaaaaaaaaaaactcgagggggggccc

SEQ ID NO: 153398 - DNA, 2069 bp, Homo sapiens
cccacgcgtccgactagtctcaactaaaagggactcccggagctaggggtggggactcggcctcacacagagagtgccggctattggacttttgtccagggacagctgagacaacaaggaccacgggaggaggtgtaggagagaagcgccgcgaacagcgatcgcccagcaccaagtccgcttccaggctttcggtttctttgcctccatcttgggtgcgccttcccggcgtctaggggagcgaaggctgaggtggcagcggcaggagagtccggccgcgacaggacgaactcccccactggaaaggattctgaaagaaatgaagtcagccctcagaaatgaagttgactgcctgctggctttctgttgactggcccggagctgtactgcaagacccttgtgagcttccctagtctaagagtaggatgtctgctgaagtcatccatcaggttgaagaagcacttgatacagatgagaaggagatgctgctctttttgtgccgggatgttgctatagatgtggttccacctaatgtcagggaccttctggatattttacgggaaagaggtaagctgtctgtcggggacttggctgaactgctctacagagtgaggcgatttgacctgctcaaacgtatcttgaagatggacagaaaagctgtggagacccacctgctcaggaaccctcaccttgtttcggactatagagtgctgatggcagagattggtgaggatttggataaatctgatgtgtcctcattaattttcctcatgaaggattacatgggccgaggcaagataagcaaggagaagagtttcttggaccttgtggttgagttggagaaactaaatctggttgccccagatcaactggatttattagaaaaatgcctaaagaacatccacagaatagacctgaagacaaaaatccagaagtacaagcagtctgttcaaggagcagggacaagttacaggaatgttctccaagcagcaatccaaaagagtctcaaggatccttcaaataacttcaggagcatacctgaagagagatacaagatgaagagcaagcccctaggaatctgcctgataatcgattgcattggcaatgagacagagcttcttcgagacaccttcacttccctgggctatgaagtccagaaattcttgcatctcagtatgcatggtatatcccagattcttggccaatttgcctgtatgcccgagcaccgagactacgacagctttgtgtgtgtcctggtgagccgaggaggctcccagagtgtgtatggtgtggatcagactcactcagggctccccctgcatcacatcaggaggatgttcatgggagattcatgcccttatctagcagggaagccaaagatgttttttattcagaactatgtggtgtcagagggccagctggaggacagcagcctcttggaggtggatgggccagcgatgaagaatgtggaattcaaggctcagaagcgagggctgtgcacagttcaccgagaagctgacttcttctggagcctgtgtactgcggacatgtccctgctggagcagtctcacagctcaccgtccctgtacctgcagtgcctctcccagaaactgagacaagaaagaaaacgcccactcctggatcttcacattgaactcaatggctacatgtatgattggaacagcagagtttctgccaaggagaaatattatgtttggctgcagcacactctgagaaagaaacttatcctctcctacacataagaaaccaaaaggctgggcgtagtggctcacacctgtaatcccagcactttgggaggccaaggagggcagatcacttcaggtcaggagttcgagaccagcctggccaacatggtaaacgctgtccctagtaaaaatacaaaaattagctgggtgtgggtgtgggtacctgtattcccagttacttgggaggctgaggtgggaggatcttttgaacccaggagttcagggtcatagcatgctgtgattgtgcctacgaatagccactgcataccaacctgggcaatatagcaagatcccatctcttta

SEQ ID NO: 153399 - DNA, 2239 bp, Homo sapiens
  misc_feature (1)...(2239): n = a,t,c or g
tgggacacaagccatagcaggaaacagcgagcttgcagcctcaccgacgagtctcaactaaaagggactcccggagctaggggtggggactcggcctcacacagtgagtgccggctattggacttttgtccagtgacagctgagacaacaaggaccacgggaggaggtgtaggagagaagcgccgcgaacagcgatcgcccagcaccaagtccgcttccaggctttcggtttctttgcctccatcttgggtgcgccttcccggcgtctaggggagcgaaggctgaggtggcagcggcaggagagtccggccgcgacaggacgaactccccctctggaaaggattctgaaagaaatgaagtcagccctcagaaatgaagttgactgcctgctggctttcctgttgactggcccggagctgtactgcaagacccttgtgagcttccctagtctaagagtaggatgtctgctgaagtcatccatcaggttgaagaagcacttgatacagatgagaaggagatgctgctctttttgtgccgggatgttgctatagatgtgggntccacctaatgtcaggggaccttctgggataatttacgggaaagaggtaagctgtctgtcggggacttggctgaactgctctacagagtgaggcgatttgacctgctcaaacgtatcttgaagatggacagaaaagctgtggagacccacctgctcaggaaccctcaccttgtttcggactatagagtgctgatggcagagattggtgaggatttggataaatctgatgtgtcctcattaattttcctcatgaaggattacatgggccgagtgcaagataagcaaggagaagagtttcttggaccttgtggttgagttggagaaactaaatctggttgccccagatcaactggatttattagaaaaatgcctaaagaacatccacagaatagacctgaagacaaaaatccagaagtacaagcagtctgttcaaggagcagggacaagttacaggaatgttctccaagcagcaatccaaaagagtctcaaggatccttcaaataacttcaggctccataatgggagaagtaaagaacaaagacttaaggaacagcttggcgctcaacaagaaccagtgaagaaatccattcaggaatcagaagcttttttgcctcagagcatacctgaagagagatacaagatgaagagcaagcccctagggaatctgcctggattaatcgattggcattgggcattgaggacagagctttctttcgaggacaccttcacttccctgggctactgaagtccagaaattcttgcatctcagtatgcatggtatatcccagattcttgggccaatttgcctgtatgcccgagcaccgagactacgacagctttgtgtgtgtcctggtgagccgaggaggctcccagagtgtgtatggtgtggatcagactcactcagggctccccctgcatcacatcaggaggatgttcatgggagaatcatgcccttatctagcagggaagccaaagatgttttttattcagaactatgtggtgtcagagggcccagctggagaacagcagcctctttggagggtggatgggccagcgatgaagaatgtggaattcaaggctcagaagcgagggctgtgcacagttcaccgagaagctgacttcttctggagcctgtgtactgcggacatgtccctgctggagcagtctcacagctcaccgtccctgtacctgcagtgcctctcccagaaactgagacaagaaagaaaacgcccactcctggatcttcacattgaactcaatggctacatgtatgattggaacagcagagtttctgccaaggagaaatattatgtctggctgcagcacactctgagaaagaaacttatcctctcctacacataagaaaccaaaaggctgggcgtagtggctcacacctgtaatcccagcactttgggaggccaaggagggcagatcacttcaggtcaggagttcgagaccagcctggccaacatggtaaacgctgtccctagtaaaaatacaaaaattagctgggtgtgggtgtgggtacctgtattcccagttacttgggaggctgaggtgggaggatcttttgaacccaggagttcagggtcatagcatgctgtgattgtgcctacgaatagccactgcataccaacctgggcaatatagcaagatcccatctctttaaaaaaaaaaaaa

SEQ ID NO: 153400 - DNA, 1337 bp, Homo sapiens
ggacgtcgaggcattacaatcgcgaaaccaagccatagcatgaaacagcgagcttgcagcctcaccgacgagtctcaactaaaagggactcccggagctaggggtggggactcggcctcacacagtgagtgccggctattggacttttgtccagtgacagctgagacaacaaggaccacgggaggaggtgtaggagagaagcgccgcgaacagcgatcgcccagcaccaagtccgcttccaggctttcggtttctttgcctccatcttgggtgcgccttcccggcttttagggggagcgaaggttgaggttggcagcggcaggagagtccggccgcgacagggacgaactcccccactggaaaggattctgaaagaaatgaagtcagccctcagaaatgaagttgactgcctgctggctttcctgttgactggcccggagctgtactgcaagacccttgtgagcttccctagtctaagagtaggatgtctgctgaagtcatccatcaggttgaagaagcacttgatacagatgagaaggagatgctgctctttttgtgccgggatgttgctatagatgttggttccacctaatgtcagggacccttctggatattttacgggaaagaggtaagctgtctgtcggggacttggctgaactgctctacagagtgaggcgatttgacctgctcaaacgtatcttgaagatggacagaaaagctgtggagacccccttgttcaaggaccctccccttgtttcggactatggagtgctgatggcagagattggtgaggatttggataaatctgatgtgtcctcattaattttcctcatgaaggattacatgggccgaggcaagataagcaaggagaagagtttcttggaccttgtggttgagttggagaaactaaatctggttgccccccagatcaactggatttatttagaaaaatgcctaaagaacatcccacagaaatagccctgaagacaaaaatcccagaagtacaagcagtctgttccaaggagcagggacaagttacaggaatgttctcccaagcagcaatcccaaaagagtctcaaggatcccttcaaataacttcaggatgataacacccctatgcccattgtccctgatctgaaaattccttggaaattgttccatgtgattaacatggaactgcctctacttaatcattctgaatgattaaatcgtttcattttctaaatgtgttataatgtgtttagccctttcttgttgctgtatgtttagatgctttccaatcttttgttactactaataatgctataaaataaacctccttgtacttctttgaaaaa

SEQ ID NO: 153401 - DNA, 1490 bp, Homo sapiens
acagcagccaggtccccctctccatgttgccaattgacagaaactgtactaaagtgggtgtgtgtgcaggcgggcgtgtaatttcacaggtaaagcattaatgtgcttttacaaattaacagaaggacttattttgaggaagaaagtgattaccacaactctattttcacaaaaataataaaatattctctatttcaaaaaatggggaaaaaatgtctttaatctatgtcaaaagtgtgccatcgtgaaaaaagatctatcctgaacagggatatctgcagatacctgaacaggaaaaatgatgtgactaaaccagtaagccaggaaatttgaaggtcttcagccttgttaccgtccaggattttttctcctttttagtgctcaacataattttgatggtctatataaagctagaataaatctaaatgtaaaagtctaacgaaagctgattttctttaataataaacagtgaatatcatgagaaaaaccactttaaagctacctctcttctttttttcattttttagagatgggatctcactctatccccaggctggtgtgcagtggtgtgatcgtagcgcactgcagcctccaactcctgggctcaagtgatgttcccacctcacctccaggtagctaggactcacaggctctcacaccaccatacccagcttgggtctcttcttgaactaaacatttttattttataagcgctaatttaaagtcagtaagagcccccatttaattacaaacttcaatagttacccagaaaaagaaatagtctttaaaatcattttgataacaactgtttaatttactattcagatggaaagcctggtaggatatttgggtaatggtctgtaattaggtagcataactttgtacacatgaatcaactgggacccgatacaatctaaaacagaaattcaaatatattttccctcaatgaaaagggctgaggaagtcctccaaaatgtggagacatttcaagtctacatcaacacacatctgggacctgtgcagcattcatttaattctaaaagaagagggcatactgctcaggaaaaggggcagaggatttcccaggtcatcttgcttatttaaaacgggtttaggataaaccacacttttaggctggatggtacactagacagcaatgttttaacaagtcctaaaacactatacaggttttaaaatactatgataacaactcagtcatcattgcaaaaaggcattcaacatgacataaaatgtttgaggaaactgatgtttacctcttttaataccaaagctttttaaaaagttttaatcaatttaagataaaacttttaaaatatgtactacatatctgtgtatgcaatttcacctttacttaattacctagaggcataataaagaataatcatcagatgatgtagtatagtgatgtcctctaggctgggtagcggtccttacactaatggccttggacagtgtcctagtgccgaatt

SEQ ID NO: 153402 - DNA, 1043 bp, Homo sapiens
gctcagctggtggaattcggagagcacagcatggcccctccagcccacttcagggcactcttgtatcacccgggtaccgccacactggtcccccacccagccagcatctcccagcacagcccctctccctggggaaatgctctgggtagccagtctaaaggcagaggcacctaactgctccccgcagcccaccccacccaagattcagacacaagccaggaaaggacccaagagaaaatccttcaaggtggcctgaggtcccatccctccctcagacccatgtggtcccaggccaggctgcctgggacacggtaaataccactgtgtgcaaaaatcgaagtacaaaaccacaagactaaacaaaacaaacccagagagccaaacttgtagaggtgggcagtccagaaagcagggggcagccctccccctttccttctctccctgatcctcagaatatatattgttgtaataggaagcatttttgcattgttctcttgtgggtgtcactacagacatgttctggcgtgttctccgagggatggagcatcctgttatatatttgacttcaaattgagatgttggcttcattttttttttttttacccaattaatctcccaatccctagcaactgtgactctgtatttagcacaagagaaagctgagaatgtgggtcttgcctccttccagaaatatgtctggctcatcaggacatttttttaaaacttcaaaatatttttaagatattttacacttttataaaacaaaaaatcaaccaacaagagacttttctgaggaggaacatttgtatttgaacaagatccttggtgtgtagttcagtcttgcagtatacaagcttttgtgtataaatgttttatgatatgattccctgtgttttgcaggggtttttttctcttttgctttttagataaatatgtatatcaatattttaaattcatctttgctttttttagaggagtttgtaatccccttataacatgaaaataaacatttcctttttaacctcaaaaaaaaaaaaaaaaaa

SEQ ID NO: 153403 - DNA, 476 bp, Homo sapiens
gcctcccttctgggatcttagtgcagacagctgcgaggactgtcatgatggcaccagatgcaccaagtgatggtccatatcttcctgtggcaactttacccacgtaactgacaaaattggaaataacacttgaggctggattcgatgtgaaatatctgatcattgtccgctgcagagaaggtactctccataaacagaatacaaggacatttgcagctataatacctgtcacagtccgctggccatcacttaggttattccaccacttgttaatcccaacagtaaaaaataaaggttttatgagactccttataggatagggagaaggataaaagactgtttcttccacaggaggaatcaaagcacttctcttgtatgcttcaccacttgtccctgggtctgatcttcgaggttcaaccttcctgggtgcttttctgaatccgcatttttgttgaataaagaagttaaacctgcgt

SEQ ID NO: 153404 - DNA, 434 bp, Homo sapiens
gtgtacctatctgcaggtgttatttccaattttgtcagttacctgggtaaagttgccacaggaagatatggaccatcacttggtgcagccctgaaagccattatcgccatggatacagcaggaatgatcctgggatggaaattttttgatcatgcggcacatcttgggggagctctttttggaatatggtatgttacttacggtcatgaactgatttggaagaacagggagccgctagtgaaaatctggcatgaaataaggactaatggccccaaaaaaaggaggtggctctaagtaaaactgggattggacagtagtggtgcatctggtccttgccgcctgagagccccaggagacatcggctagagtgaccatggctatgctcccgtctggaagatgccagcatctggcctcccacctcgtgccgaattcgg

SEQ ID NO: 153405 - DNA, 327 bp, Homo sapiens
acatcggaaggaaaataatggcaagcctcccttctgggatcttagtgcagacagctgcgaggactgtcatgatggcaccagatgcaccaagtgatggtccatatcttcctgtggcaactttacccacgtaactgacaaaattggaaataacacttgaggctggattcgatgtgaaatatctgatcattgtccgctgcagagaaggtactctccataaacagaatacaaggacatttgcagctataatacctgtcacagtccgctggccatcacttaggttattccaccacttgttaatctcctttctgaagtctccttctctcgtgc

SEQ ID NO: 153406 - DNA, 1506 bp, Homo sapiens
tttttttttttttttttacaaactagatagaaaccttttatttcacaactttatcatcattcacattctaaaaagacacggacttgggggacacagctgaaaacagtgggaggccagatgctgggatcattccagacgggagcatagccatggtcactctagccgatgtctcctggggctctcaggcggcaaggaccagattgcaccactactgtccaatcccagttttacttaagagccacctccttttttggggccattagtcccttatttcatgccaggattttcactaggcggcttccctggttctttccaaatcagttttcatgacctgtaaggtaacatacccatattcccaaaaaaggagctccccccaaggatgtgcccgcatggattcaaaaaattttccatccccaggatcattcctggctggtatccatgggcggataatgggcttttcaggggcattccctggctgtggaacgtggaacatcgggaagggaaaataatggggcaagcctcccttctggggatcttagtgcagacagctgcgaggactgtcatgatggcaccagatgcaccaagtgatggtccatatcttcctgtggccaactttaacccacgtaaactggaccaaaattggaaaataaccacctgccagataggtaccactgcccaggaactgctcttgaccccagaatgttccactatgctggaagagaagctcccacaaaacatacatatttgcttcccatgtgaaataaaggagaagtgactgaattgttgacagccaacattggagaacaaaggacctttgaggctggaatccgatgtgaaaatacctggacaatggcccgctgcagagaaggtactctccataaacagaaataccaaggaacatttgccagctaataatacctgtcaacagtccgctggcccatccactttaggttattcccacccacttgttaaatctccctttcctgaaagtctcccttccttttttgtggtccttaatgcctatcccaacccaatccagccttttaatacccatccaaaataactcctggaacccctggatttcaagtgattcatattgcccaaatagcagctgatccaaaatgcacaagccttgtaaacccaacaagtaaaaaataaaggttttatgagacttccttataggatagggagaaggataaaagacttgtttcttccacaggaggaatcaaagcacttcttcttgtatgctttcaccacttgtccctgggtctgatcttcgagagttcaacctttcctggggtgcttttactgaatccggcatttgttgttgaaataaagacagttaaaccctgcgtccgaggagctgcggcggggttaggaccgcagtgagctcgctcgcagctgcggccgcccaccgacgcaccccacgcctggccgcagccccagcctctctgcgcccagcctcgccacgccatcttcccaacctctgccccaccacctcgtgcc

SEQ ID NO: 153407 - DNA, 500 bp, Homo sapiens
cccaactgctagtggctgagtccctggcggggcgcggcggtgaaaggtgtcgcgtacgggcttcccgagctgacgtggcttgaattgggaggggggcagctggagcctcaggcggcagcgcttctaggtgagtaggggacgctacccaactcttccctctgcgagtccaataacggtcacccccgccagaggggccgcgggagctgcccaagcagatacaccggagtcccctcctcgccccgcctctcccggattcagtcctggatccggcccttcacccgcctccttcacctaccaggcctagttatagtagcccacaagcctcggcctctccggtgggccttcggggtcaccctgcgcagacttggaccacttgctcacggtctgtcccctccccggtacgtttctcctctgggagcgacggggaaaagcgcctaggtcagtcctgtccgcacggcaatgatcctggagcggcctgcataagtcggcctccgtacgca

SEQ ID NO: 153408 - DNA, 11307 bp, Homo sapiens
  misc_feature (1)...(11307): n = a,t,c or g
aactgctagtggctgagtccctggcggggcgcggcggtggaaggtgtcgcgtacgggcttcccgagctgacgtggcttgaattgggaggggggcagctggagcctcaggcggcagcgcttctagaaatgctgagccgattatcaggattagcaaatgttgttttgcatgaattatcaggagatgatgacactgatcagaatatgagggctcccctagaccctgtgagtagttctgttctgatttaaactggaattacaccaagaatctgacatggaatttaataatactacacaagaagatgttcaggagcgcctggcttatgcagagcaattggtggtggagctaaaagatattattagacagaaggatgttcaactgcagcagaaagatgaagctctacaggaagagagaaaagctgctgataacaaaattaaaaaactaaaacttcatgcgaaggccaaattaacttctttgaataaatacatagaagaaatgaaagcacaaggagggactgttctgcctacagaacctcagtcagaggagcaactttccaagcatgacaagagttctacagaggaagagatggaaatagaaaagataaaacataagctccaggagaaggaggaactaatcagcactttgcaagcccagcttactcaggcacaggcagaacaacctgcacagagttctacagagatggaagaatttgtaatgatgaagcaacagctccaggagaaggaagaattcattagcactttacaagcccagctcagccagacacaggcagagcaagctgcacagttgagttccatgcagcaggtggtccgagagaaagatgcccgctttgaaacacaagttcgtcttcatgaagatgagcttcttcagttagtaacccaggcagatgtggaaacagagatgcaacagaaattgagggtgctgcaaaggaagcttgaggaacacgaagaatccttggtgggccgtgctcaggtcgttgacttgctgcaacaggagctgactgctgctgagcagagaaaccagattctctctcagcagttacagcagatggaagctgagcataatactttgaggaacactgtggaaacagaaagagaggagtccaagattctactggaaaagatggaacttgaagtggcagagagaaaattatccttccataatctgcaggaagaaatgcatcatcttttagaacagtttgagcaagcaggccaagcccaggctgaactagagtctcggtatagtgctttggagcagaagcacaaagcagaaatggaagagaagacctctcatattttgagtcttcaaaagactggacaagagctgcagtctgcctgtgatgctctaaaggatcaaaattcaaagcttctccaagataagaatgaacaggcagttcagtcagcccagaccattcagcaactggaagatcagctccagcaaaaatccaaagaaattagccaatttctaaatagactgcccttgcaacaacatgaaacagcatctcagacttctttcccagatgtttataatgagggcacacaggcagtcactgaggagaatattgcttctttgcagaagagagtggtagaactagagaatgaaaagggagccttgctccttagttctatagagctggaggagctgaaagctgagaatgaaaaactgtcttctcagattactctcctagaggctcagaatagaactggggaggcagacagagaagtcagtgagatcagcattgttgatattgccaacaagaggagctcttctgctgaggaaagtggacaagatgttctagaaaacacattttctcagaaacataaagaattatcagttttattgttggaaatgaaagaagctcaagaggaaattgcatttcttaaattacagctccagggaaaaagggctgaggaagcagatcatgaggtccttgaccagaaagaaatgaaacagatggagggtgagggaatagctccaattaaaatgaaagtatttcttgaagatacagggcaagattttcccttaatgccaaatgaagagagcagtcttccagcagttgaaaaagaacaggcgagcactgaacatcaaagtagaacatctgaggaaatatctttaaatgatgctggagtagaattgaaatcaacaaagcaggatggtgataaatccctttctgctgtaccagatattggtcagtgtcatcaggatgagttggaaaggttaaaaagtcaaattttggagctcgagctaaactttcataaagcacaagaaatctatgagaaaaatttagatgagaaagctaaggaaattagcaacctaaaccagttgattgaggagtttaagaaaaatgctgacaacaacagcagtgcattcactgctttgtctgaagaaagagaccagcttctctctcaggtgaaggaacttagcatggtaacagaattgagggctcaggtaaagcaactggaaatgaaccttgcagaagcagaaaggcaaagaagacttgattatgaaagccaaactgcccatgacaacctgctcactgaacagatccatagtctcagcatagaagccaaatctaaagatgtgaaaattgaagttttacagaatgaactggatgatgtgcagcttcagttttctgagcagagtaccctgataagaagcctgcaaagccagctgcaaaataaggaaagtgaagtgcttgagggggcagaacgtgtaaggcatatctcaagtaaagtggaagaactgtcccaggctctttcacagaaggaacttgaaataacaaaaatggatcagctcttactagagaaaaagagagatgtggaaaccctccaacaaaccatcgaggagaaggatcaacaagtgacagaaatcagctttagtatgactgagaaaatggttcagcttaatgaagagaagttttctcttggggttgaaattaagactcttaaagaacagctaaatttattatccagagctgaggaagcaaaaaaagagcaggtggaagaagataatgaagtttcttctggccttaaacaaaattatgatgagatgagcccagcaggacaaataagtaaggaagaacttcagcatgaatttgaccttctgaagaaagaaaatgagcagagaaagagaaagctccaggcagctcttattaacagaaaggagcttctgcaaagagtcagtagattggaagaagaattagccaacttgaaagatgaatctaagaaagaaatcccactcagtgagactgagaggggagaagtggaagaagataaagaaaacaaagaatactcagaaaaatgtgtgacttctaagtgccaagaaatagaaatttatttaaaacagacaatatctgagaaagaagtggaactacagcatataaggaaggatttggaagaaaagctggcagctgaagagcaattccaggctctggtcaaacagatgaatcagaccttgcaagataaaacaaaccaaatagatttgctccaagcagaaatcagtgaaaaccaagcaattatccagaagttaatcacaagtaacacggatgcaagtgatggggactccgtagcacttgtaaaggaaacagtggtgataagtccaccttgtacaggtagtagtgaacactggaaaccagaactagaagaaaagatactggcccttgaaaaagaaaaggagcaacttcaaaagaagctacaggaagccttaacctcccgcaaggcaattcttaaaaaggcacaggagaaagaaagacatctcagggaggagctaaagcaacagaaagatgactataatcgcttgcaagaacagtttgatgagcaaagcaaggaaaatgagaatattggagaccagctaaggcaactccagattcaagtaagggaatccatagacggaaaactcccaagcacagaccagcaggaatcgtgttcttccactccaggtttagaagaacctttattcaaagccacagaacagcatcacactcaacctgttttagagtccaacttgtgcccagactggccttctcattctgaagatgcgagtgctctgcagggcggaacttctgttgcccagattaaggcccagctgaaggaaatagaggctgagaaagtagagttagaattgaaagttagttctacaacaagtgagcttactaaaaaatcagaagaggtatttcagttacaagagcagataaataaacagggtttagaaatcgagagtctaaagacagtatcccatgaagctgaagtccatgccgaaagcctgcagcagaaattggaaagcagccaactacaaattgctggcctagaacatctaagagaattgcaacctaaactggatgaactgcaaaaactcataagcaaaaaggaagaagacgttagctacctttctggacaacttagtgagaaagaagcagctctcactaaaatacagacagagataatagaacaagaagatttaattaaggctctgcatacacagctagaaatgcaagccaaagagcatgatgagaggataaagcagctacaggtggaactttgtgaaatgaagcaaaaaccagaagagattggagaagaaagtagagcaaagcaacaaatacaaaggaaactgcaagctgcccttatttcccgaaaagaagcactaaaagaaaacaaaagtctccaagaggaattgtctttggccagaggtaccattgaacgtctcaccaagtctctggcagatgtggaaagccaagtttctgctcaaaataaagaaaaagatacggtcttaggaaggttagctcttcttcaagaagaaagagacaaactcattacagaaatggacaggtctttattggaaaatcagagtctcagcagctcctgtgaaaagtccaaaactagctctagagggtcttactgaagacaaggaaaagttagtgaaggaaattgaatctttgaaatcttctaagattgcagaaagtactgagtggcaagagaaacacaaggagctacaaaaagagtatgaaattcttctgcagtcctatgagaatgttagtaatgaagcagaaaggattcagcatgtggtggaagctgtgaggcaagagaaacaagaactgtatggcaagttaagaagcacagaggcaaacaagaaggagacagaaaagcagttgcaggaagctgagcaagaaatggaggaaatgaaagaaaagatgagaaagtttgctaaatctaaacagcagaaaatcctagagctggaagaagagaatgaccggcttagggcagaggtgcaccctgcaggagatacagctaaagagtgtatggaaacacttctttcttccaatgccagcatgaaggaagaacttgaaagggtcaaaatggagtatgaaaccctttctaagaagtttcagtctttaatgtctgagaaagactctctaagtgaagaggttcaagatttaaagcatcagatagaagataatgtatctaaacaagctaacctagaggccaccgagaaacatgataaccaaacgaatgtcactgaagagggaacacagtctataccaggtgagactgaagagcaagactctctgagtatgagcacaagacctacatgttcagaatcggttccatcagcgaagagtgccaaccctgctgtaagtaaggatttcagctcacatgatgaaattaataactacctacagcagattgatcagctcaaagaaagaattgctggattagaggaggagaagcagaaaaacaaggaatttagccagactttagaaaatgagaaaaataccttactgagtcagatatcaacaaaggatggtgaactaaaaatgcttcaggaggaagtaaccaaaatgaacctgttaaatcagcaaatccaagaagaactctccagagttaccaaactaaaggagacagcagaagaagagaaagatgatttggaagagaggcttatgaatcaattagcagaacttaatggaagcattgggaattactgtcaggatgttacagatgcccaaataaaaaatgagctattggaatctgaaatgaagaaccttaaaaagtgtgtgagtgaattggaagaagaaaagcagcagttagtcaaggaaaaaactaaggtggaatcagaaatacgaaaggaatatttggagaaaatacaaggtgctcagaaagaacccggaaataaaagccatgcaaaggaacttcaggaactgttaaaagaaaaacaacaagaagtaaagcagctacagaaggactgcatcaggtatcaagagaaaattagtgctctggagagaactgttaaagctctagaatttgttcaaactgaatctcaaaaagatttggaaataaccaaagaaaatctggctcaagccagttgaacaccggcaaaaaggcacaagccagaatttagctagcttcaaaagtcctgctagatgacactcaaagtgaagcagcaagggtcatagcagacaatctcaagttgaaaaaggaacttcagtcaaataaagaatcagttaaaagccagatgaaacaaaaggatgaagatcttgagcgaagactggaacaggcagaagagaagcacttgaaagagaagaagaatatgcaagagaaactggatgctttgcgcagagaaaaagtcctcttggaagagacaattggagagattcaggttactttgaacaagaaagacaaggaagttcagcaacttcaggaaaacttggacagtactgtgacccagcttgcagcctttactaagagcatgtcttccctccaggatgatcgtgacagggtgatagatgaagctaagaaatgggagaggaagtttagtgatgcgattcaaagcaaagaagaagaaattagactcaaagaagataattgcagtgttctaaaggatcaacttagacagatgtccatccatatggaagaattaaagattaacatttccaggcttgaacatgacaagcagatttgggagtccaaggcccagacagaggtccagcttcagcagaaggtctgtgatactctacagggggaaaacaaagaacttttgtcccagctagaagagacacgccacctataccacagttctcagaatgaattagctaagttggaatcagaacttaagagtctcaaagaccagttgactgatttaagtaactctttagaaaaatgtaaggaacaaaaaggaaacttggaagggatcataaggcagcaagaggctgatattcaaaattctaagttcagttatgaacaactggagactgatcttcaggcctccagagaactgaccagtaggctgcatgaagaaataaatatgaaagagcaaaagattataagcctgctttctggcaaggaagaggcaatccaagtagctattgctgaactgcgtcagcaacatgataaagaaattaaagagctggaaaacctgctgtcccaggaggaagaggagaatattgttttagaagaggagaacaaaaaggctgttgataaaaccaatcagcttatggaaacactgaaaaccatcaaaaaggaaaacattcagcaaaaggcacagttggattcctttgttaaatccatgtcttctctccaaaatgatcgagaccgcatagtgggtgactatcaacagctggaagagcgacatctctctataatcttggaaaaagaccaactcatccaagaggctgctgcagagaataataagcttaaagaagaaatacgaggcttgagaagtcatatggatgatctcaattctgagaatgccaagctagatgcagaactgatccaatatagagaagacctgaaccaagtgataacaataaaggacagccaacaaaagcagcttcttgaagttcaacttcagcaaaataaggagctggaaaataaatatgctaaattagaagaaaagctgaaggaatctgaggaagcaaatgaggatctgcggaggtcctttaatgccctacaagaagagaaacaagatttatctaaagagattgagagtttgaaagtatctatatcccagctaacaagacaagtaacagccttgcaagaagaaggtactttaggactctatcatgcccagttaaaagtaaaagaagaagaggtacacaggttaagtgctttgttttcctcctctcaaaagagaattgcagaactggaagaagaattggtttgtgttcaaaaggaagctgccaagaaggtaggtgaaattgaagataaactgaagaaagaattaaagcatcttcatcatgatgcagggataatgagaaatgaaactgaaacagcagaagagagagtggcagagctagcaagagatttggtggagatggaacagaaattactcatggtcaccaaagaaaataaaggtctcacagcacaaattcagtcttttggaaggtctatgagttccttgcaaaatagtagagatcatgccaatgaggaacttgatgaactgaaaaggaaatatgatgccagtctgaaggaattggcacagttgaaagaacagggactcttaaacagagagagagatgctcttctttctgaaaccgccttttcaatgaactccactgaggagaatagcttgtctcaccttgagaagctcaactctactgctgctatccagagatgagcaatcgcttcacttgtcctcacaactagaagattcttataaccaagtgcagtccttttccaaggctatggccagtctgcagaatgagagagatcacctgtggaatgagctggagaaatttcgaaagtcagaggaagggaagcagaggtctgcagctcagccttccaccagcccagctgaagtacagagtttaaaaaaagctatgtcttcactccaaaatgacagagacagactactgaaggaattgaagaatctgcagcagcaatacttacagattaatcaagagatcactgagttacatccactgaaggctcaacttcaggagtatcaagataagacaaaagcatttcagattatgccaagaagagcctcaggcaggagaaaccctcctggcagcatgagctgcatcagctcaggatggagaagagttcctgggaaatacatgagaggagaatgaaggaacagtaccttatggctagtctcagataaagatcagcagctcagtcatctgcataatcttataagggaattgaggtcttcttcctcggagactggagcctctcaaagtgcaataccaaagacaggcatccccagagacatcagcttccccagatgggttcacaaaatctggtttatgagacagaacttctcaggacccagctcaatggacagctttaaaggaaatttcaccaaaaggagttaagaattcagcaactgaacagcaacttctctcagctactggaagagaaaaacaccctttccattcagctctgcgagtaccagtcagagtcttcgtgagaaccagcagcactatggtgaccttttaaatcactgtgcagtcttggagaagcaggttcaagagctgcaggcggtgagtaaagagaaggggccactaaatatagatgttgctccaggagctccccaggaaaagaatggagttcacagaaagagtgaccctgaggaactaagggaaccgcagcaaagcttttctgaagctcagcagcagctatgcaccagcagacagcgaagtgaatgaattaagggaagctgctggaagaagaacgagaccaaagagtggctgctgagaatgctctctctgtgcccgaggagcagatcagacggttagagcacagtgaatggcactcttcccggactcctatcattgggctcgttggcaaccagggagcagcaactgtaatagattcttacaagcaacagttgtcgaaggaccccggagtggccgttggatggaagcgagtcctgcgttcactctgtcattcacgggacccggagtgcccactttctagcagccatcttactttctaaatgattcatgtcctgctcattatgtgttatacgggccatctatagacttagttgttactctatggaccagctcccctcaaaaacttggaattctctcacctctaacatcagaacatcaattccgagtggaacagtccttcccatttacaggtcttctcttccacctcttcacggaaaagtgcctggcaaaaacagaggtggatacgaggacaggttggagctgcagggactggcgagtctgctttcttctactgccctgagcctgaacgcttctgcttaatctgagaatcacatttggtttgttgagcctaatatttgttgagattttgcaggaccctgatcttttgtggtcctgtaaaagatactgaggaatgtctttcagccaagccaagaggatggtttcaataaacctaataatctgaagttcagtatcattttgattgataactttctttgccttgtttgcctggattttctcctgtttcagggggaaggtggctctgccataaacagagttcagggaaatgaacatgtcacctcataggacatctgatttaggtctcttgcacaatagggtggagaaagctgaaggaactccctaaggggttttagctgttagatcacatgggaggacagcatcttcttccccggccaatttcagatataattggagggagaatttcaggtcttagactataaggatagaatcccttttgcttttgcccttgatcacatgtatactaaggtattaagtggcccaagttctttcctttcaccaaagggtcagggagaagtgtctatggtacagtcagggttccaattcttgttcattccagggaatatcctgaatattcctggtaatgtgganccctgagtacagtgtctcaggggcccactgggagcccaatattaggtcattgactcttcagcccaggagtctgaactggtctaaacaccacacttgcaaactcctgacctcttggaagtactaaggctacttttgctgttagtgacagttatttacagtttctcagcccccattgactctgccctctgtggcaatggaaggagaatatagagaagacaaaattaaatatagatggacctgagaaggacagcccaggatagaattcccatttgtgcctattccctgcctcccctcccctcccccatcctaccagttggttattttctcattgcatacgtgatgtgttcaactgcctagcctctccctaaagaagagagaagacaagtgggctgactgatctgctctaaatctactgtggtgattaaatcttggttacaacatcctgggaagtttcctgaacaactgtaaaataataaaattattttcagaatga

SEQ ID NO: 153409 - DNA, 212 bp, Homo sapiens
cgggggacctcccttgggagatcaatcccccgtcctcctgctctttgctccgtgagaaagatccacctacgacctcaggtcctgagatcgaccagcccaagaaacatctcaccaatttcaaatccgccactcccagaggccctggaactctggcccaaggctctctgactgactccttcccagatcttctcggcttagtggctgaagactga

SEQ ID NO: 153410 - DNA, 522 bp, Homo sapiens; identical to SEQ ID NO: 114701

SEQ ID NO: 153411 - DNA, 1134 bp, Homo sapiens; identical to SEQ ID NO: 134549

SEQ ID NO: 153412 - DNA, 642 bp, Homo sapiens; identical to SEQ ID NO: 115470

SEQ ID NO: 153413 - DNA, 423 bp, Homo sapiens; identical to SEQ ID NO: 151514

SEQ ID NO: 153414 - DNA, 453 bp, Homo sapiens; identical to SEQ ID NO: 114501
  misc_feature (1)...(453): n = a,t,c or g

SEQ ID NO: 153415 - DNA, 531 bp, Homo sapiens; identical to SEQ ID NO: 120915

SEQ ID NO: 153416 - DNA, 506 bp, Homo sapiens
agacaaaggagacacgttttatccgtggacccaaaactccggcgctggtcacggactgggaaggcagccttcccttggtgtttaatcattgcagggaggcctgccttggtccttcacccttagcagcaagtcctgctttcctggggcaggggcaagatttaattaacctcgccttcaaggtgtacaataatagaaaaaagttgcaattcctggcctccactgtgagacaaaccccagccacatctccagcacacaagaacttccaaacgcctgaaccgcagcggccaggcgttcctccagaacctcctcccacaggagcttgctacaagtaccagaaatctgaccaccaggccaaggaatgcctgcagcccaggattcctcctaagccgtgtcccatctgtgcgggaccccactggaaattggactgttcaactcacctggcagccactcccagagcccctggaactctggcccaaggctctctgactgactccttctcggcttag

SEQ ID NO: 153417 - DNA, 1059 bp, Homo sapiens; identical to SEQ ID NO: 114869

SEQ ID NO: 153418 - DNA, 1485 bp, Homo sapiens; identical to SEQ ID NO: 114306

SEQ ID NO: 153419 - DNA, 567 bp, Homo sapiens
atgctgagattggcagagggcagggtgctgacagcagttagggaaaaatctattaagcaatgtcactgttcccagttgagcaaagtccataccaaggagggagtgaaggagcagagaagcaagattttggtttgcctggcagagtatttctccagcacactgtctgctgattcatcctctcccactcattacgttagtgctttgatgaatcaaatcacctctgcccttcaaagtaacagcccagaagcactcaaatataaggataaggctaaagccatttctgttagagagaacaagaattcactaccagaagttgcagcggtgctggcagccgactggatggtgcccacctacattgagggtgggtcttcctcttccaagtccactgactcaaatgagcttgctacaagtgctggaaatctggccaccgggtcaaggaatgcctgcagcccaggattcctcctaagccatgtcccatctgtgcgggaccccactgaagatcggactgttcaactcacctggcagccactcccagagcccctggaactctggcccaaggctctctga

SEQ ID NO: 153420 - DNA, 471 bp, Homo sapiens; identical to SEQ ID NO: 115469

SEQ ID NO: 153421 - DNA, 987 bp, Homo sapiens
atgtcaggagccaagggattcacaggaggcattccaggggcaggagggggtgtgaaagagggtggggaaccaagggttggcatcctggatactgtggctgtggcacaggatgaggggctccacttgggggaaaagttggattgccctgcagagctcctcagggaggaggaaaggggcctggggaaagggtggattgataggtgtgggttcttggtctcgctgacttcaagaatgaagccgcggaccctcgctgtgagtgttacagttcttaaagatggtgtgtctggagtttgttccttcagatgtccagatgtgtccagagcttcttccttccggtgggttcatggtcttgctgactttaggagtgaagccgcagaccttcacaagtcaaggttttccggcttgggtagccaggtgtcacggcccagtgtccacctgcagctgctttctgtgtcagtcctctgcaccgccaaggtcatagaggtggttgagacaaaagagacatgttttatccgtgaacccaaaactccggcaccggtcatggactgggaaggcagccttcccttggtgtttaatcattgcagggacgcctctctgatgatacactcacgtttcaagggtgtcagaccacgcagggacgcctgccttggtccttcacccttagcggcaagtcccgctttcctggggcaggggcaagtacccctcaaccccttctcctttacccttagcgcacataagaacttccaaacacctgaaccgcagcagccaggtgttcctccagaacctcctcccccaggagcttgctacaagtgccagaaatctgaccaccaggccaaggaatgcctgcagcccaggattcctcctaagccgtgtcccatctgtgcgggaccccactggaaactggactgttcaactcacctggcagccactcccagagcccctggaactctggcccaaggctctctgactgactccttctcggcttag

SEQ ID NO: 153422 - DNA, 903 bp, Homo sapiens; identical to SEQ ID NO: 130395

SEQ ID NO: 153423 - DNA, 525 bp, Homo sapiens; identical to SEQ ID NO: 116093

SEQ ID NO: 153424 - DNA, 1151 bp, Homo sapiens
ggtgggcgccaaccccatcgaaagctggaaaaaacgcgggccgtgtctttaaagacagcgataagttagacgccaacgaccggatcctgaaagatcagacgcaagaatggtccggttctgcaaccttaccatctgacggaaaaacccgtttattttacactgactattccggtaaacattacggcaaacaaagcctgacaacagcgcaggtaaatgtgtcaaaatctgatgacacactcaaaatcaacggagtggaagatcacaaaacgatttttgacggagacggaaaaacatatcagaacgttcagcagtttatcgatgaaggcaattatacatccggcgacaaccatacgctgagagaccctcactacgttgaagacaaaggccataaataccttgtattcgaagccaacacgggaacagaaaacggataccaaggcgaagaatctttatttaacaaagcgtactacggcggcggcacgaacttcttccgtaaagaaagccagaagcttcagcagagcgctaaaaaacgcgatgctgagttagcgaacggcgccctcggtatcatagagttaaataatgattacacattgaaaaaagtaatgaagccgctgatcacttcaaacacgtccctggagtgtgatgttccccttcccgtgtccatgtgttctcatctggggatctctagagccgcacggcaggtttctacagaagaaggcttgagtcttgcccaagaatataattgtggtttttttgagacctctgcagccctcagattctgtattgatgatgcttttcatggcttagtgagggaaattcgcaagaaggagtccatgccatccttgatggaaaagaaactgaagagaaaagacagcctgtggaagaagctcaaaggttctttgaagaagaaggggatccttctagagcccgcagcggcagcttgctacaagtgcccgaaatctggccactgggccaaggaatgcccacagcccgggattcctcttaagctgcgtcccatctgggcgggaccccaccgaaaatcagactgttcaactcacctggcagccactcccagagcccgtggaactctggcccaaggctctctgactgactccttcccagatcgtctcggcttagcagctgaagactga

SEQ ID NO: 153425 - DNA, 500 bp, Homo sapiens
gcttagaaggagccagctacggggaaaccaaagcggacgtcgcagaaggaaaaagccaaaaaaaggcaaccgagtggaggtcacaagggcagaggcgaaaaggcgaagagaccagccaactaaaggattgtaaacgcaccaatcagctctctgtaaaacggaccaatcagctctctgtaatatggaccaatcagcaggatgtgggatcatacgccaatcctcttatggcagctgagccagcccaagctgtaaagcttgggtggagaccttcacccaagccacacattggagacaagtcagtatcattttggctcctgtggatgggaagcgtgcagcaagggcaaaaaatcggaccaccagccaagggaatgcctgcaggcccaggaattcctcataaagccatgtcccatgtgggggggggccccactggaaattggactgttcaactcacctggcagccactcccagagcccctggaactctggcccaaggctctctga

SEQ ID NO: 153426 - DNA, 603 bp, Homo sapiens; identical to SEQ ID NO: 114658

SEQ ID NO: 153427 - DNA, 672 bp, Homo sapiens
atggataccgttggccggaggcttcgggactccctgggccgaactgtggacctggggctgacaggcaaccatggagttgtgcaccccagtcttgcggacagtgccaacaagtttgaggagaacacctactgcttcggccggaccgtggagacactgctgctccgctttggcaagaccatcatggaggagcagctggtactgaagcgggtggccaacatcctcatcaacctgtatggcatgacggccgtgctgtcgcgggccagccgctccatccgcattgggctccgcaaccacgaccacgaggaaggacaaggttatctaggactgggagtgaaggtttctgacatggctcagccccacatcctgcacttcttgcccatccagcagggtagcccaggccaggagcgcaggcacgaccagaggcaaatgtcccactcaggaatatgccctatgcctctcagcaggcgcctggaccgcccaggagcttgctacaagtgccagaaatctgaccaccaggccaaggaatgcccgcagcccaggattcctcctaagccgtgtcccatctgtgcgggaccccactggaaattggactgttcaactcacctggcagccactcccagagcccctggaactctggcccgaggctctctgactgactccttctcggcttag

SEQ ID NO: 153428 - DNA, 765 bp, Homo sapiens
atggagaataaagaagctttcgtgtttcaggctcacaaagaagagatttttgagagggaaaaacagatggagcaggatctgaccagaagagttagggagttaggaagagatgctaacaacaggctctcaccagctgccaaggagaatgaaggcacatggctgtgttggccatttaaaaacaatagacaaaggagacacattttatccgtggacccaaaactccggcgccagtcacggactgggaaggcagccttcccttggtgtttaatcattgcagggacgcctctcttgattattcacccacatttcagaggtgtcagaccacgcagggacgcctgccttggtccttcacccttagcagcaagtcctgcttttctgaaggaaaggcaagatttaattaaccttgccttcaaggtgtacaataatagaaaaacgttgcaattccttgcctccactgtgagacaaaccccagccacatctccagcacacaagaacttccaaacgcctgaaccgcagcggccaggcattcctccagaaccaccttccccaggagcttgctacaagtgccagaaatctggccaccaggccaaggaatgcccgcagcccaggattcctcctgagccgtgtcccatccgtgcaggaccccactggaaatcggactcttcaactcacctggcagccactcccagagcctctggaactctggcccaaggctctctgactgactccttcccagatcttcttggcttagcggctgaagactga

SEQ ID NO: 153429 - DNA, 522 bp, Homo sapiens; identical to SEQ ID NO: 151515

SEQ ID NO: 153430 - DNA, 1350 bp, Homo sapiens
ttatacaatactgtcgctccgaggagcgaactgatgtaaagagcttaaactagttcttgatgcagatgacgttttaagcacagaagttaaaagagtgataacttcttcagcttcaaatatcaccccagcttttttctgctcatgaaggttagatgcctgctgcttaagtaattcctctttatctgtaaaggctttttgaagtgcatcacctgaccgggcagatagttcaccggggtgagaaaaaagagcaacaactgatttaggcaatttggcggtgttgatacagcgggtaataatcttacgtgaaatattttccgcatcagccagcgcagaaatatttccagcaaattcattctgcaatcggcttgcataacgctgaccacgttcataagcacttgttgggcgataatcgttacccaatctggataatgcagccatctgctcatcatccagctcgccaaccagaacacgataatcactttcggtaagtgcagcagctttacgacggcgactcccatcggcaatttctatgacaccagatactcttcgaccgaacgccggtgtattaattgcgttgcgctcactgcccgctttccagtcgggaaaacccccgccgccatgcatacgctggtaactttgaggcagctggtaacgctctatgatccagtcgattttaaaagagacgatgcctgagccatccggcttacgatactgacacagggattcgtataaacgcatggcatacggattggtgatttcttttgtttcactaagccgaaactgcgtaaaccggttctgtaacccgataaagaagggaatgagatatgggttgatatgtacactgtaaagccctctggatggactgtgcgcacgtttgataaaccaaggaaaagattcatagcctttttcatcgccggcatcctcttcagggcgataaaaaaccacttccttccccgcgaaactcttcaatgcctgccgtatatccttactggcttccgcagaggtcaatccgaatatttcagcatatttagcaacatggatctcgcagataccgtcatgttcctgtagggtgccatcagattttctgatctggtcaacgaacagatacagcatacgtttttgatcccgggagagactatatgccgcctcagtgaggtcgtttgactggacgattcgcgggctatttttacgtttcttgtgattgataaccgctgtttccgccctggcagccactcccagagcccctggaactctggcccaaggctctctgactgactccttcccagatcttctcggcttagcagctgaagactgacgctgcctgattgccttggaagccccgtagaccat

SEQ ID NO: 153431 - DNA, 933 bp, Homo sapiens; identical to SEQ ID NO: 117142

SEQ ID NO: 153432 - DNA, 483 bp, Homo sapiens
tcacagcagcagatttctagacccagtgtcatgtctccttgtccaaactgtggccccttcatggtagtgtggatcttctgagaagagctctaagtagtttgaatgtattgtgagaatcagattgaatctagcttcagaatctgagttttgcaggtctggcagccactcccagagcccctggaactctggcccaaggctctctgactgactccttcccagatcttctcggcttagcggctgaagactgacaccggccgatcgcctcggaagccccccaggagggctgctctgctggggagctgcaggatggcaccaatagctctgcttcgagcccaggtcaataataagaagaggggttgccatttccagcaagaggttgcaaacatcatttctctgggctccaattgtctgatggtgccctgttctgcctattatccatctgtcttcctcaatagctggtgcatccatttcttgggccctcat

SEQ ID NO: 153433 - DNA, 440 bp, Homo sapiens
agacttctaggagtatcaccaccagtccaaaggagtcagactctccagctggtcctgcccgccagtactacaccaagggcaacctggtccggatatgcctcggggctgtgatcctaataatcctggcggggtttctggcagaggactggcacagccggaggaagcgcctgcggcacaggggcagggctgtgcagaggccgcttccgcccctcccgcccctcccgcagacccggaaatcacacgggggagcttgctacaagtgccagaaatctgaccaccaggccaaggaatgcctgcagcccaggattcctcctaagccgtgtcccatctgtgcgggaccccactggaaatcggactgttcaactcacctggcagccactcccagagcccctggaactctggcccaaggctctctgactccttctcggcttagcggctga

SEQ ID NO: 153434 - DNA, 360 bp, Homo sapiens
atgacctcaggtcctcagaccgaccagcccaagaaacatctcaccaatttcaaatccggtgtcagaccacgcagggacgcctgccttggtccttcacccttagcggcaagtcccgcttttctgagggaggggcaagtacccctcaaccccttctccttcacccttagcggagcttgctacaagtgcccgaaatctgaccaccaggccgaggaatgcctgcagcccaggattcctcccaagccgtgtcccatctgtgcgggaccccactggaaatcggactgttcaactcacctggcagccactcccagagcccctggaactctggcccaaggctctctgactgactccttctctgcttag

SEQ ID NO: 153435 - DNA, 768 bp, Homo sapiens
atggtggtgtcccagaacttggtcctttcagatgttcagatatgtctggagtttcttcttccggtggggtcgtgggtcttgctgacttcaggagtgaagctgcagaccttcacagtgagcgttacagctcttaaaggtggcctgtccagagttgttcattcttcctggctgctcctcatcaggtccagccagttagggtttaggctctttttcatcaaatatgaaaacccagcccagttcatggctcatttggtggcaaccctgaaacgctttacagccctagaccttgaagggtcagaaggcttattctcattatgcattttattacccaatctgctcccaacattaaataaagctcaaaaattagattctggccctcaaaccccacaacaggacttaattaaccttgccttcaaggtgtacaataacagagaagagttgcaattacttgcctctgctgtgagagaaaccccagccacatctccagcacataagaacttcaaaacgcctaagccacagtggtcaggccttccttcaggacctcctcccccaggatcttgcttcaagtgccagaaatctggccactgggcaaaggaatgcctgcagcccaggattcctcctaagccatgtcccatctgtgtgggaccccactggaaatgggactgtccaactcacctggcagccactcccagagtccctggaactctggcccaaggctctctgactgactccttcccaaatcttctcagcttagcagctgaagattga

SEQ ID NO: 153436 - DNA, 1638 bp, Homo sapiens
agtgtcgcgttcgtctttgcttgtccagcagttgactacctggtgaaaatttcatgggaacttcaaggagacgaagaacaggatggacttagaaacatgatatggcaaacattgcagaaaacaaaggattatgaggaagatgtacgaatccaaaatgcaatcaatatagctcagggggcttctgaggcgatcgggcagcgtcagtcttcagccgctaagccgagaagatctgggaaggagtcagtcagagagccttgggccagagttccaggggctctgggagtggctgccagaaaataccagaaaatgaaaggaattgaaattaagagaagggagagattgaagtgtggcgccaagattgaaaggagaaagaggttgaaggatagggaggttggagaagagagtaaaaagaggccacttactggatttgaaattgaaccacccaaagtcactgtgatgcccaagaatcagtctttcacaggagggtctgaggtctccatcatgtgttctgcaacaggttatcccaaaccaaagattgcctggaccgttaacgatatgtttatcgtgggttcacacaggtataggatgacctcagatggtaccttatttatcaaaaatgcagctcccaaagatgcagggatctatggttgcctagcaaaagcccctaagttgatggtagttcagagtgagctcttggttgcccttggggatataaccgttatggaatgcaaaacctctggtattcctccacctcaagttaaatggttcaaaggagatcttgagttgaggccctcaacattcctcattattgaccctctcttgggacttttgaagattcaagaaacacaagatctggatgctggcgattatacctgtgtagccatcaatgaggctggaagagcaactggcaagataactctggatgttggctcacctccagttttcatacaagaacctgctgatgtgtctatggaaattggctcaaatgtgacattaccttgttatgttcagggttatccagaaccaacaatcaaatggcgaagattagacaacatgccaattttctcaagacctttttcagttagttccatcagccaactaagaacaggagctctctttattttaaacttatgggcaagtgataaaggaacctatatttgtgaagctgaaaaccagtttggaaagatccagtcagagacaacagtaacagtgaccggacttgttgctccacttattggaatcagcccttcagtggccaatgttattgaaggacagcagcttactttgccctgtactctgttagctggaaatcccattccagaacgtcggtggattaagaattcagctatgttgctccaaaatccttacatcactgtgcgcagtgatgggagcctccatattgaaagagttcagcttcaggatggtggtgaatatacttgtgtggccagtaacgttgctgggaccaataacaaaactacctctgtggttgtgcatgttctgccaaccattcagcatgggcagcagatactcagtacaattgaaggcattccagtaactttaccatgcaaagcaagtggaaatcccaaaccgtctgtcatctggtccaaggtaaatgatacatctagttatatttcctga

SEQ ID NO: 153437 - DNA, 671 bp, Homo sapiens
  misc_feature (1)...(671): n = a,t,c or g
atcgcccggctgattaattcggcacgagctgacacttaagtcagagcattctgtagctgtattttacagaactgtaattgcacagattgttcctcttacaagagaaatatccagagctctaagaaaacaactgatgaaaacgacatgcgtgacatttggtgctgaagacccaggtcagagagactcctttgggggaccagtccgctgtccttgccctcactctgtgaggagacccacctacgacctcgggtcctcagaccaaccagctcaaggaacatctcaccaatttcaaatcgggaccccactggaaaatggactgtccaactcacccggcagccactcccagagcccctggaactctggcccaaggctctctgactgactccttcccagatcttctcggctcagcagctgaagactgacactgcttgattgcctgggaagcctataggaccatcacagacactttggataactcttacagtgaaggaagacgggaannnnnnnnnnnnnnnnnnnnnnctnnnnnnnnnnnnnnnnnnnnnnnnnnnnnnnnnnnnnnnnnnnnnnnnnnnnnnnnnnnnnnnnnnnnnnnnnnnnnnnnnnnnnnnnnnnnttgtgatttgttcctgccccaccttaactgagtgattaaccttgtgaaattcctt

SEQ ID NO: 153438 - DNA, 455 bp, Homo sapiens
atgacctcaggtcctcagactgaccagcccaagaaacatctcaccaatttcaaatctgagacaaaagagacacattttatccgtggacccaaaactccggcgccagtcacggactgggaaggcagccttcccttggtgtttaatcattggagggacgcctctctgattatacacccacgtttcaagggtgtcagaccacgcagggacgcctgccttggtccttcacccttagcggcaagtcccgcttttctggggaaggggcaagagcttgctacaagtgccagaaatctgaccaccaaggcaaggaacgcctgcagcccaggattcctcttaagccgtatcccatctgtgcgggaccccactggaaatcggactgttcaactcacctggcagccactcccagagcccctggaactctggcccaaggctctctgactgactccttcttggcttag

SEQ ID NO: 153439 - DNA, 3233 bp, Homo sapiens
atgggctgcctggggacccagagagctcccagggcctttctgctgcttcctctacccctgcactttgctcagctctctaacctgactcagctccaggcagcggcttccctttccatggtgacccaccggagctctggaggtggtggggagcgaggagcgacagcagcaggaaccgaacagggcggcgcctgcctggcagcgtcactcttgcggggcctgtgggacgcaggtgaagttactcccattagggttagggttaggccatatgatcctttcaccctggctccgcttcacgagcacagtgaagcccagtgtgtcgcatcaccctctctgactgtgactaaggagaaatcgctgcttcccaagagcctgctggcgggttctcgggaagtagcgcgcagccgtgccctttgccatggacaggcccgcccaccacccaggccccaggtcacgcaacagcgcacccagctccagggacaacgcatcctccaatggaggccggcgacagagggtccccacagtcccaggagggggtctgattctgcaaagggaacacatcctcctaccactgggacctgccctccgcgccgcaggcaaggagccggctacagccgctacaattccggagagtcccggaggcgactcggacgacagcaggacctagtagcgcgcagcgacgagcagcgagatccagcgcctgcgacaaggagagaagacaaaatgatagaagagctgcagccctttggggagcacagacctaggagatccccaagccagggctgtgacaccctctttcaggctctgtggttcctggcatctccaagcttccagcggggagggcagctccaggtgctggccctctgcaaggctgcggctggaccaggtgcaccacaggcagcttctacagctggcaccagggaacatgggtatgcctggaagcttggagacaccaggaaccacagagctctgaagaggaagtcacagacctggctcagacggttcccagctggttgtcctgatgtctgctctgctctggctgatctcagggcttttatgggcctcagaggggaggaagtgtgtgccgattggtccatgggtggccatgggagtggggagtgcaggagggggactggtgggcagagggctgtggttcctaaatctccagttcaagaaaaaggcaaagagcccttgagtcttctacagtatttcatggtggatgaaaaagaaagatttctcagaattacctcagaacatgaagacaatgataatagcaacaatagtagtaatcatagcagtatcaatgagacaaaagagacatgttttatccatgaacccaaaactccggcgccggtcacggactgggaaggcagccttcccttggtgtttaatcattgcagggatgcctctctgattatacactcatgtttcaagggtgtcagaccacacagggacgcctgccttggtccttcacccttagtggcaagtcccgctttcctggggcaggggcaagtacccctcaaccccttctccttcacccttagcggcaagtcccactttcctgggacaggggcaagtacccctcaaccccttctccttcaccctcagcggcaagtcccgctttcctggggcaggggcaagtacccctcaaccccttctccttcaccctcagcggcaagtcccgctttcctggggcaggggcaagtacccctcaaccccttctccttcaccctcagcggcaagtcccgctttcctggggcaggggcaagtacccctcaaccccttctccttcacccttagcagcaagtcccgctttcctagggggcaagaaacccccaatcgcttatttccacaccccaacctcttatctctgcaccccaatcccttatttccgcaccctgacctcttatctctgtgccccaatcccttatttccatgcctcaaccccttctctgcttttctggagggcaagaaccccccaccccttctccgtgtctctactcttttttctgggcttgcctccttcactatgggagcttgctacacatgccagaaatctggccactgggccaaggaatgcccgcagcctgggattcctcctaagccgtgtcccatctctgtgggaccccactgaaaatcggactgttcaactcacctggcagccactcccggagcccctggaactctggcgcaaggctgactgactccttcccagatcttctcggcttagcggctgaagactgacactgcttgatcgcctcggaagccccctgggtatattgcatgatgttgaggtttggggtatgattgattctgtcacccagatactgagtatagtacacaatagttaatttttcaattgtctcttctccctctctccctccatagtagtccccagtgtcttttgttgccatcagcagctgtatgacactgtccccaggtctcatgtctgtataaacatacacatcataggatatttcagggaaggttggcgtgttatcatttgcatccatcacttgaatattgacgatgactggctcactttcttgtacaccatcaaatgctgttatcgaaaaggtgtaagtttgctgttcttccctgtccactggttgaagtaaggtgaggtagcgagtaataccagtctgtgtgacggtgaagactgaggtgtagtcattcagaaaaaggtgaagctctgggtcttttgtatcttctatgtccttgtccagagctactattcttaaaggtgaagtcaaattgagactgtccgaaatggttgctcccactggggcagattccaggatatagccttgataactgggcattgtaaaatatggactttgattgttttcatccagtatttcaatgtgtagaccggcaaaggcaggaagaggatgaccattgtcttgttcagccttaataaccaaatcaaatttctggtgaaagtctctgtttactggctccaggagactaagttctgctgtcctaggatgcatatggaaaaatcgtgggtaatcctcaggagtccctttgctccagttaccaacaagttcctcatctctatctgagaccacctcagcctggttttcatcattaatatcattatcagcattttggtcaaagccattcggtaagtctctagagagttccaaactttctcgcatcttcctatcttctacagagccctgcaaactgttccaatctctgcctgttacccagttccaaagtcgtttctgcat

SEQ ID NO: 153440 - DNA, 3981 bp, Homo sapiens
  misc_feature (1)...(3981): n = a,t,c or g
atggaattttgtatttcattaggccggaaaataactttttcaaacatttttccctacaacggggccaattggaaggttttcttaaaaaagtcccaaccattattgaatgcactggttgagcaggatgatgccgaacgcttgttccgccgcttccgagcggcaggggatttaccgtatggcgcttttggtgaaattttctgggaaacacagtgccaggagatgcagcagcttgccgacagagtcattgcctgtcgccagccggggcagagtatggaaattgatctcgcctgcaacggtgtgcagataactggctggttgccgcagctttgggatgctgaagggatcagcttcagtgtcttcagctttgggatgctgaagggatcagcttcagtgtcttcagctttgggatgctggagcttgctacacatgctggaaatctgccactgggccaaggaatgcccacagcacggtattcctcctaagccacgtcccatctgtgtgggaccccaccgaaaatcggactgttcatctcacctggcagccactcccagagcccctggaactctggcccaaggctctctgactgactccttcccagatcttctcggcttagcggctgaagactgacaccggccgatcgcctcggaagccccctgccaacgccaagcacaaagctgcctgcagagccagcctctatctgtggtccttgtgccaattatcactgccccactcatgccgcaggatataaagcagagtgacagggtcacaggactgccagaggaatacaggtaggggccaagatttgtactgcagcttgtggctgctttagcgcagaggaggtgtctttttctgtgtctcacaaaggcactatctatcaccagtctgagcacccacagaattgaccgcctggatggagaattggtctctaatttgcacaaaggcaaccatgggctggtagtaacccccattacaggccctggtgtgtgatgttccccttcctgtgtccatgtgttctcattgttcaattcacgtctgttgtttcctgactttttaatgatctccattctaactggtgtgagatggtatctcattgtggttttgatttgcatttctctgatggccagtgatgatgagcattttttcatgtgtcttttggctacataaatgtcttcttttgagaagtgtctgttcatatccttcacccactttttgatggggttgtttgttttcttcttgtaaatttgtttgagttccttgtagattctggatattagccctttgtcagatgagtaggttgtgaaaattttctcccattctgtaggttgcctgttcactctgatggtagtttcttttgctgtgcagaagctctttagtttaattagatcccatttgtcaattttggcttttgttgctgttgcttttagtgttttagacatgaagtccttgcccatgtctatgtcctgaatggtattgcctaggttttcttctagggtttttatggttttaggtctaacatgtaagtctttaatccatctcgaattaatttttgtgtaaggtgtaaggaagggatccagtttcagctttctacgtatggctagccagttttcccagcaccatttattaaatagggaatccttcccccatttcctgtttttgtcaggtttgtcaaagatcagatagttgtagatatgtggcattatttctgaggtctctgttctgttccattggtctatatctctgttttggtaccagtaccatgctgttttggttactgtagccttgtagtatagtttgaagtcaggtagcgtgatgcctccagctttgttcttttggcttaggattgacttggcaatgtgggctcttttttggttccatgtgaactttaaagtagttttttccaattctgtgaagaaagtcattggtagcttgatggggatggcattgaatctataaattaccttgggcagtatggccattttcacgatattcattcttcctccccacgagcatggaatgttcttccgtttgtttttgtcctcttttattttgttgagcagtggtttgtagttctccttgaagaggtccttcacatcccttgtaagttggattcctaggtattttattgtctgtttcaagcagagctctgtgcatctgggtcaccacacccaaagtatgatttaggtctcccttagggatgctcagcagtaggaagggctgtaaggcagcagctgccccacagatggaggcagttgaatgattcagcccccatctgggccaacgttgtcctcgctcctcttcctcagagatacaggctgctgtgcctcccagtgttttcatcgtcacaatgggttccacagatgacaggtctgtcttcccagactggagttgggaggtgggcaggaggttattggcaaggggagccctctggccatcattcttctctgtccaggccaccctgaaggaaggaactggggagggtggcctgtcctcctgaggcttgggaggtctttgacacatgctcagtaatgcctttagctcaatcctgaagttctcgttcagccagcagtatatgaaggggttatagcaggtgctgctcatggcaaaccagtggaaggcaaagtagagggcattgttggtgcggatgaccttgctggacaggaggaggacgtagcagttgagggggaaccagcagagggcaaagaggactaccaccagcatcaacatcttgatggtcttcttctttttgcgccgcagnncaaagtactgctctgtggtcacatcgccaatcatattacacagccacagtttcttggccacacgagcgtaggccacagagatgatgaggaggggcaggatgtagagcaggatgaaggtggccaagtccaggtacttccagaagaggtcagctggctcagggaagtctggcaggcagagggagcgcacaatgtcctcactattagagtggcccaaattctgaacaatgacaacaccaagtgctgatgaggatgtggagtaacaggagctcccattcatcgttggtgggggcgcaaaaagttgtacagccactttggaggagagtttgatggtttctctggtaaaatttgattgtgagtccatctggtcctggactttttttggttggtaggctattattattgcctcaatttcagagcctgttattggtctattcagagattcaacttcttcctggtttagtcttgggaggatgtatgcatccaggaatttatccatttcttctagattttctagtttatttgcatagaggtgtttatagtattctctgatgttagttcgtatttctgtgggatcagtggtgatatcccttttatcattttttattgcatctatttgattcttctctcttttcttctttgttaatcttgctagcattctatcaattttgttgatcttttcaaaaaaccagctcctcgattcattgattttttgaatgtttttgtgtgtctctaagtccttcagttctgctctgatcttagttatttcttgccttctgctaacttttaaatgtgtttgctcttgcttctccagttcttttaattgtgatgttagggtgtcaattttagatctttcctgctttctcttgtgggcatttagtgctataaatttccctctacacactgctttaaatgtgtcccagagattctggtatgttgtgtctttgttctcattggtttcaaagaatatctttatttctgccttcttttcgctatttatccagtaatcattcaggagcagattgttcagtttccatgtagttgtccggtttttgagtgagtttcttaatcctgagttcaatcttctgaagcctacttctgtcagctcatcaaagttattctccatccagctttgttccattgctggtgaggagctgtgttcctttggaggagaagaggagctctgattttcagaattttcaacttttctgctctgctttctccccat

SEQ ID NO: 153441 - DNA, 1128 bp, Homo sapiens
ctaatgctctcctttcccttgccccgcatcccccaacaggccttcattgttcaactcccacttatgagtgagaacatgtggtttttggttttctgctcctgtgtttgtctgctgagaatgatggtttccagcttcatccacgtccctggcagccactcccagagcccctggaactctggcccaaggctctctgactgactccttcccagattttctcagcttagcagctgaagactgacgctgccggatcgcctcggaagccccacaaagcctgtttggtggtctcttcacacggacacgcatgaaatttggtgcaatgactcagatcgggggacctcccttgggaaatcaatgccctgtcctcctgctctttgctccatgagaaagatccacctacaacctcaggttctcagactgaccagcccaagaaacatctcaccaatttcaaatccgagacaaaggagacacgttttatctgtggacccaaaactccggcgccagtcacagactagggaaggcagccttcccttggtgtttaatcattgcagggacacctctctaattattcacccaggtttcagaggtgtcagaccacgcagtgacgtctgtgttggtcctgcacccttagcagcaagtcctgcttttctggggaaggggcaagtaccccagccccttctctccgtgtctctaccccttctttgcctttctggggggcaagaaacccccaaaccctttgccttcacccttagtggcaagtcctgcttttctgggggaggggatttaattaacctcaccttcaaggtgtacaataatagaaaaaagttgcaattccttgcctccactgtgagacaaaccccagccacatctccagcacacaagaacttccaaacgcctgaaccgcagcggccaggtgttcctccagaatctcctcccccaggagcttgctacaagtgccagaaatctgaccaccaggccaaggaatgcctgcagcccaggattcctcctaagccttgtcccatctgtgcgggaccccactggaaattggactgttcaactcacctggcagccactcccagagcccctggaactctggcccagggctctctgactgactccttcttggcttag

SEQ ID NO: 153442 - DNA, 1309 bp, Homo sapiens
atggatgtagctggaagccgttatcctcagcaaactaatgcaggaacagaaaaccaaacactgtgtattctcacttataagtgggagcttaatgatgaaaacacatggacccctgagggggaacaacacacaatggggccttttgaggggtgggggcttccgaggcgatcgggcagtgtcagtcttcagccgctaagccgagaagatctgggaaggagtcagtcagagagccttgggccagagttccaggggctctgggagtggctgccagatgcagaaaaggccttcgacaaaattcaacagcccttcacgctgaaaactctcaataaactaggtattgatggatatctcaaaataataagagctatttctgacaaacccacagccaatatcatactgaatggaaaaaaactggacgcattccctttgaaaaccggctcccgaccacaccgacaggggtgttcgggctatagcggtcaggtttcagcatgcgatccgccaccgggcccaggcggagttcctgtcactctttctcaatctggctgccaccactggcaaggaggtcatgaatgtgagggccgtggcgacagacgcctcaagcaagggcgtcaaggcggcctattttcccggaaacaatccggcgcgttcatcgacagcatcgttgcccgaaaggggaacgccgacgagaatttcagcaacatccgtatcgcaggcgatggtggatcggctgcgatgtcgttcgactatgcgttcaagatcgacgacgtggtcccgaactctggcatggaacattggcttcttgtaaacacgaacaatggatggcggatcgtatcggtggcttggtcggctgctcctctccaggccgatctaggtcccaattcttcctcagcctctgctcctccaccctataatccttttatcacctctcctcctcacacctggtccggcttacagtttcgttccgtgactagccctcccccacctgcccagcaatttactcttaaaaaggtggctggagccaaaggcatagtcaaggagcttgctacacttgccggaaatctggccactgggccaaggaatgcccgcagcccgggattcctcctaagccacgtcccatctgtgtgggaccccactgaaaatcggactgttcaactcacctggcagccaatcccagagcccctggaactctggcccaaggctctctgactgactccttcccagatcttctcggcttagcggctgaagactgacactgcccgatcgcctcagaagccccctcgctcaatgccaatatcccatcccacagcat

SEQ ID NO: 153443 - DNA, 336 bp, Homo sapiens
  misc_feature (1)...(336): n = a,t,c or g
ggcacgaggttttctgaatggctattaatagtattagatcattacaactgatgtaagtttcaaaggttgtacaattatacnnnnnnnnnnnnngggaaacttttgggataacacaaaccctttttgaaaaaaaaatgggattgggagggttaaacccttaagcggtttaacttaaaaggaaacataggttgcttacccccctaaaaaggtttgacctgaaaaagggccttggccctttgtttccaatattacctttggcccaaagtggtagccccaaaaaaaacaagggggggaaaagggaaggaaattaaacggccctgtgaaagggccaggaag

SEQ ID NO: 153444 - DNA, 364 bp, Homo sapiens
  misc_feature (1)...(364): n = a,t,c or g
ggcacgaggttttctgaatggctattaatagtattagatcattacaacttatgtaactttcaaaggttgtacaattatacnnnnnnnnnnnnngggcaacctttggaataccacaaacccttttttaaaaaaaaatgggcttggaagggtttaacccttaagcggtttaacttaaaaggaaacataggttgcttacccccctaaaaaggtttgtcctgaaaaaggcccctggccctttgtttcccatattcactttggcccaaatttgtacccccaaaaaaaaccatggggggaaaagggtaggaaattaaactgccctgtcaaagggccatggaccacaaggggtcaaagaatgcctcctgct

SEQ ID NO: 153445 - DNA, 4544 bp, Homo sapiens
  misc_feature (1)...(4544): n = a,t,c or g
ggatgttgaacacctatgtgtgnnnnnnnnnnctttaccaactatgcacctatttttcaaacacctaaaagtaatgtctgtgaaacaggggttttctttttctacatattacagcaggaagggttcctatttatgtactggctgtatcaatactaacggggcatgataagcaaaattttaaactttggtagttaaacctttatgttgcctcccctctgggctgccagctgtggggatgtgcttctcccttaaggactttggcaagaataacaagttcattggaatttgactttctgacataaagcaaacagccttgccctgtcatgccaggcctttcatgtgaagttaccatttattagctgcttctgtctctccagggaaggatttcccttttataagcctgggccagggggatgatagtaagattccccatgtgataccagagttggaataggctgtagtgagattagggccaggactgtcccattttggattcttgaatggtttctgttacaacttgtcatggggaaaaagtaacacttattttttttttccncccttagaagacaaaaatactaaatgcatttgagaaagccggtagttttggggggagggggaaaaagcaactgctttcctgatctgcaacttggctggatgcttaagatgtccagtggacatgaatagcccaggggtctgacagcaatgaagaggactatgaccccaaattgtgagggaaaaggaagaagaagaagaagaccgacccctggggacatagaggactattaccgtgggagtagccagcgatgtggagcagcagggggctgatgcctttgatccccgaggagtaccagttcacttgcttgacctacaaggaatctgaagggtgccctcaatgagcacatgacccangcttagctttctgtccctaaaggtatcccattccagttggctaaacttatatttagttaattttccactggcaagtttcagagatattggacagatacaagtccaattctgctcaactgcttgttgaggctcgagttcagcctaatcccatcaaaaacatgttcccacatcccatccccctcaccactggtgcaggttgtggtatgcaggtttgtgcgaaaagggaaaacctactcttctctgggcctgtcagctttagttttgccgcagctgctgggagcagcactgctcatgttctcgtcaaggacggcgtgggcgtggggagtctcttgcatggctgcaggnactgtccacttccgtaacaccagtgggacttttgtgtttccatttgcttcccaatgaagaatttgaggagaggaaatacaggcgctacctcttcagggactatgtggagagtcattaccagctccagctgttgccctgggtgcagactgccccatgggttattcgggtacaggagcctagagctccgcccgagtacagtgcaaatcggtgcaacgaggtcttctggtttcaagtgtcgtcagatgtatcacgcacccacagacatgtgccacaatcccggaaatggctcacgaagttagcaagacgactctgaaacagccaactacattaagtgctcacactaaagactgtcccaagtgcaacatctgcatttgagaaggatggaggcttgcaatcacattgcaatgctccaaatgtaaacacgacttctgctggatgtgtctaggagattggaagactcatggcagtgaatactatgagtgcagtcgttacaaggagaatcctgacatcgtgaaccagagccaacaagcccaggctgangggaagccctcaagaagtacttattctactttgagaggtgggaaaaccacaataaaagcttgcagctagaggcacagacataccagcggatttcacgagaagattcaggagagggtcatgaacaatctggggacatggattcgactggcagtacctacagaatgctgccaagttctttggccaaggttccttctcttctctcctgttgcagtgtcgatacaccctgcaatacacctacccatattgcatattacatgggagtccggacccaggaagaagctgtttgaataccagcaggctcagctggaggctgagatcgaaaacctctcatggaaaagtggagcgtgcagacagctatgaccagaggggacttggagaacccagatgccataataacggaaccaacgggaggganaaacccctgcctgaaagatttcccatgacaccttaagttgggatgtggatgtgcccggggtgaggaagatttcgcttgctaggtctccccgggctgcccatactgcatgcctggcaggctctgcctttcatgacccccaggcaacagcccagggccccactcctgagagacactggcaacacctcttagttgatttctgttttcttctcttttcactttttgtttctacccagggtaggaggccatgttgaactggcctcttttcaggacttttatttccccctggatggttgttgggagggagggaaagtgttttctgaatggctattaatagtattagatcattacaacttatgtaactttcaaaggttgtacaattatacaaaaaaaaaaaaaaaggcaaactataggataacacagagccctttttgaaaataaattggcattggagtgttttaccctctagctgttttacttagaatgtaacatatgctgcctacccacctcaaaatgtctgtactgcaagagggccctgggccctttgttttcaatattcccgtgggcccaaagtggtccccccaaaaaaaacctgggggggcaaagggagcgaaataaaccggcctctggccaaggggcctggaaccaaagggggtcacaaaaggcctcctgccttaccgtggcagtacggagacagtccagaacatggtcttcttgccacggggtgttgttgtctctggtggtgctgcatgtctgtggctcacctttattcttgaaactgaggtttacctggatctggctactgaggctagagcccacagcagaatggggttgggcctgtggccccccaaactagggggtgtgggttcatcacagtgttgccttttgtctcctaaaagttaagggatctacttttgaagggaattgttccctcccaaataaatttgcctttacctttggatcctttcttttgtgcccagtattcaagtggtattagctctgagcagggtcacatttggccaaacctgacactgtcttgctgcattctcctttggcaaacatcagggtcagaattcaggatagcccttcctagggcactggactttctggcatgggggctgtgtttgcacaagttattttcatgttacctgggagagtgtccagaggctgctctgaggctgaaggtgtgttcccccttgcctgggttccagctgtcagagggataccatcctagggtctgggaatccaaggccacgagactccttggtttgtggtccgagatcctgtacttaaggagggtctggccagagggaacagaccagctttttgcacaatgaagcgcaagggaacaagtggtttgcctggtgtcctacctgtcctgaacctggtcctgtgggccattgaaaagttagatctgtgatctctggggtttttgtgggctttgttcaatgctttccactctagggcaggcagagcagtctatactctcccaagcctgcttgacctccaagtagagctgatacagagatctgtgaatattgtgatagaaattccttggtattcatacatttcagctgcaagtcagcaatttcccaggtaccatgtaagctataaaacagtcattcttaaagacagaagatagctgtgactcatgggaatcctgaggtccatggctggttgcaggttccctttttccttcctcaggttttgtctcttcctgtgttgtccccagcaagggagaagactgtggggtggattgggagaacagattaggagtatagcaaatgaacccagaatggaacagtggggagctaactgtgaatgaggagagtacctgctgcaggacctggaggtcaggtgtgaatgctgtattggcacagggaataaatatcctggcgtctggagccttcacctctccgtcaagtccttcctgtgatactgccatggcacaggatctgagttgcagctctgcaccctaaatcacaccctgggcattgtctgggctgcagggctgccaggttctgtacttgtgtccagctgtggccctggatgctggagctggagggttttctgtgctcagactgtagcctgtagctcttggcctgtgtagagccccctcctgtgccctcagtggctgtcgtttgttaacatcatcaggaagatgggaaaggtcaggcagaatttttctgccctacaaagggtggaagagaaaggacacagtattttcatgaatttaccatatatctttgtttttcttcaacgaaaaagttaattgaggcaatgtcatctgctcaaagttgagtggtttattcacaataaactgtaagtttctgattat

SEQ ID NO: 153446 - DNA, 917 bp, Homo sapiens
ctggaagaacaacactatgcttgctaaaccatcaactagtgttgatgtcccaatgccttctaccacctattctcgatgttcatcagaagagagagaaattgaggaccctgttgcatccccatcatccagcaattaattctatttcagtgcttcaaacatttttcaggaccactgtgctttcagctgtgtaaattaatgatgccctccaaatccttggttatggaatatttggctcatcccagtacactccggcttggctgttggagttgcttgtggcatgtgcctgggcctggagccttcgagtaatgctttgggatgctccccaaaagcaagacgagcaagacacacacagatacttgaaagtgaagcaagcatcttggggagacagccggggagtccaggatgattcttggtggttcgaaattgactttaaagatggggaaaaggggaaaggggctgccccagtgcttctcatgctgctgtttccagccctacaaagcagatttcaaagaagaaatcccctgaaatggctcaaaacaatggggaatactggtgggccagccccaaggttggtggttcaaaggttcctgatgaagaaaccctgattgcattaattggcccatgcaaaaatgctggggactgactgtaagtttaattcaagatgctggacgtactcagatttgcaccaggctctcaaactgtcctagggattgggccaggaccagcagacctaattgacaaagtcacttggtcacctaaaactttactaggtggactttgatatgacaacaacccctccattcacaagtgtttgaagcctgtcagattctaacaacaaaagctgaatttcttcacccaacttaaatgttcttgagatgaaaataaaacctattcccatgtaaaaaaaaaaaaaaaaa

SEQ ID NO: 153447 - DNA, 478 bp, Homo sapiens
  misc_feature (1)...(478): n = a,t,c or g
aggttaagacgccggnnaactgatannccttcgngtcagcagngccnggaatttgncgagtcccggctgcagcacctgggagaaggcagaccgtgtgagggggcctgtggccccagcgtgctgtggcctcggggagtgggaagtggaggcaggagccttccttacacttcgccatgagtttcctcatcgactccagcatcatgattacctcccagatacgtcagtatgttgtacaggtgatcttctccgtgacgtttgcattttcttgcaccatgtttgagctcatcatctttgaaatcttaggagtattgaatagcagctcccgttattttcactggaaaatgaacctgtgtgtaattctgctgatcctggttttcatggtgcctttttacattggctattttattgtgagcaatatccgactactgcataaacaacgactgcttttttcctgtctcttatggctgacctttatgan

SEQ ID NO: 153448 - DNA, 389 bp, Homo sapiens
  misc_feature (1)...(389): n = a,t,c or g
taacaaaccatcaggtttctggggaatgataaaaagtgttaccacttcagcatcaggaagtgaaagtatcctttgtccctctgcttgattctttttctcaactctggaccaagagcaaaagaaaaaaagtagtgttgggatagtcccttctaagggtacctgactacatcaggaggtccaaactcctaagagctaggcttaggaaataccatgtgtacagtcatctttccagcacctgcacaatatcataaaatcattgtctttgagctgaagtggtcctaaaaagtcagcctttnnnnnnnnnnnnnnnnnnnnnnnnnnnnnnnnnnnnnnnncacaccgtgggttgtggcaaagctagaaacataactgagggctcctcctcatag

SEQ ID NO: 153449 - DNA, 924 bp, Homo sapiens
atggccaaagaagagcctctggcctacatctgccaagatatatgttggattcccggagttgcctatattctcaatttcctgtttcatagccagcaacactacttcagagcaactttcccaacctctgacgcaggtagaactagagtttcattcaacctacatgtgcctataggtcctcactgcggcaatgacatctctcagctcagtaatggccacttggagcaggaatatgatctttatatggaagactcagtggatccttatcaccttcatagaaaggaagtggatgctttggaagaattaagcaggcagctttttctggaaacagctgatctatatgctaccaagggcactgtagtcatcaatgtggccaatgacatgacggccatgcttattggcaaaggaggggttatcctctacacccagcgtggattctgcccccaggcaatattcatgtccatttcctttgaaaatggaaagctcaaggctgccagaggaacttactttagttccagccaatacctgctgatgatgctggaggtattcaaggctgtgaaggaggaaatccagttcaggagggttgagaagattgtagaatcctttgaactggaaagagccacaaagcacagggtgctttatgtcttctgcctgagagaatcgacagaaagggaacttctagaactgagaaccaaagtatccaaacaggagtggctccttcagagcacagctgagcatctgaagatcgccaaccagcagaaagagagcatggagcagttcatcgtcagccagcggtctcccaaacttcttaggaagagctccaaattaataaaggatgcctttcataatgagctgatgggagatgaaaatatcaaaaactatgcctataaactggagatgtcgcttactggaaacaacatcaaataa

SEQ ID NO: 153450 - DNA, 2203 bp, Homo sapiens
atggggggtgcctccgcccggccagccgccccgtccgggaggtggggggtgcctctgcccggccgccccttctgggaagtgatgagcccctctgcccggccaccaccccgtctaggaggtgtacccaacagctcattgagaacgggccatgatgacgatggcggttttgtggaacagagaagggggaaaggtgattctgaggggcagctaggattgagaatcaaacttgtaagagtggtgttttcctggcagctggtcatggcttttgataaggcagagctgcctagctctcccaaggtgctggtgttgaccactgtcactcgtgccactggtggcgtggggcttcagactttgcggagactgcaggagaggcctggtattggacagctgggggctctctgtctgatttgtactgtacgtctctgtgggcatgaagaaatgacctccaccttcaacccccgagaatgtaaactgtccaagcaagaagggcaaaactatggcttcttcctgcgaattgagaaggacaccgagggccacctggtccgggtggttgagaagtgtagcccagcagagaaggctggccttcaagatggagacagagttcttaggatcaatggtgtctttgtggacaaagaagaacatatgcaggttgtggatctggtcagaaagagtgggaattcagtgactttactagttctggatggggattcctatgagaaagcagtgaaaacacgggtggacttgaaagagttgggtcaaagtcagaaggagcaaggtttgagtgataatatactttcccctgtgatgaatggaggtgtgcaaacttggacccagccccggctctgctatctcgtgaaggaaggaggcagctatggcttctctctgaaaactgtccaaggtaaaaagggggtgtacatgactgatattacacctcaaggtgtggctatgagagctggagttctggctgatgatcacttgattgaagtgaatggagagaatgtagaggatgccagccatgaggaagtggttgaaaaggtgcgagagggacccaggcgagtagggtatggattcgaccgccaacaaatggcagcagccctacagaagaggggcctgactgttaaaaacaaacaaacagaaagcaacaacaacatcaacaaaaaaagaccccacaaaaaccccatccaaaggtcagcagcctcaaaaatcgaagaattagaaaaaaactattttaaaattcaatatggaagcaaaaaagagcccgtacaagtcaagacaactgtaagcaaaaagaacaaagctggaggcatcacgctacctgacttcaaactatactacaaggttacagtgaccaaaacagcatgctcccgttattttcactggaaaatgaacctgtgtgtaattctgctgatcctggttttccaatggtgccttttttacaattggcctattttattgtgagcaatatccgactactgcaataaacaacgactgcttttttcctgtctcttatggctgacctttatgtatttcttctggaaactaggagatccctttcccattctcagcccaaaacatgggatcttatccatagaacagctcatcagccgggttggtgtgattggagtgactctcatggctcttctttctggatttggtgctgtcaactgcccatacacttacatgtcttacttcctcaggaatgtgactgacacggatattctagccctggaacggcgactgctgcaaaccatggatatgatcataagcaaaaagaaaagactgagaggaccaggagtggtaggtttcctgttgatttattcacctgtaggacagattgcagaagatcttactcttattcaacaggaagtggatgctttggaagaattaagcaggcagctttttctggaaacagctgatctatatgctaccaaggagagaatagaatactccaaaaccttcaaggggaaatattttaattttcttggttactttttctctatttactgtgtttggaaaattttcatggtgaagttttggtcccaacacatttccttcattcttgttggaataatcatcgtcacatccatcagaggattgctgatcactcttaccaagttcttttatgccatctctagcagtaagtcctccaatgtcattgtcctgctattagcacagataatgggcatgtactttgtctcctctg

SEQ ID NO: 153451 - DNA, 523 bp, Homo sapiens
acagaaaatgggcatgtactttgtctcctctgtgctgctgatccgaatgagtatgcctttagaataccgcaccataatcactgaagtccttggagaactgcagttcaacttctatcaccgttggtttgatgtgatcttcctggtcagcgctctctctagcatactcttcctctatttggctcacaaacaggcaccagagaagcaaatggcaccttgaacttaagcctactacagactgttagaggtgatactatgaccatgagtagcatcagccagaacatgagagggagaactaactcaagacaatactcagcagagagcatcccgtgtggatatgaggctggtgtagaggcggagaggagccaagaaactaaaggtgaaaaatacactggaactctggggcaagagatgtctatggtagctgagccaaacacgtaggatttccgttttaaggttcacatggaaaaggttatagctttgccttgagattggcctcattaaaatcagagactgtaaaaaaaaa

SEQ ID NO: 153452 - DNA, 2912 bp, Homo sapiens
tttcgtcgcagtcccggctgcagcacctgggagaaggcagaccgtgtgagggggcctgtggccccagcgtgctgtggcctcggggagtgggaagtggaggcaggagccttccttacacttcgccatgagtttcctcatcgactccagcatcatgattacctcccagatactattttttggatttgggtggcttttcttcatgcgccaattgtttaaagactatgagatacgtcagtatgttgtacaggtgatcttctccgtgacgtttgcattttcttgcaccatgtttgagctcatcatctttgaaatcttaggagtattgaatagcagctcccgttattttcactggaaaatgaacctgtgtgtaattctgctgatcctgggttttcatgggtgcctttttacattgggctattttattgtgaggcaatatccgactacttttgtctcctctgtctcaggtggcataaacaacggactggcttttttcctgtctcttagggctggacctttatgtatttcttcggggaaactaggagatccctttcccattctcagcccaaaacatgggatcttatccatagaacagctcatcagccgggttggcgtgattggagtagactctcatggctcttctttctggatttggtgctgtcaactgcccatacacttacatgtcttacttcctcaggaatgtgactgacacggatattctagccctggaacggcgactgctgcaaaccatggatatgatcataagcaaaaagaaaaggatggcaatggcacggagaacaatgttccagaagggggaagtgcataacaaaccatcaggtttctggggaatgataaaaagtgttaccacttcagcatcaggaagtgaaaatcttactcttattcaacaggaagtggatgctttggaagaattaagcaggcagctttttctggaaacagctgatctatatgctaccaaggagagaatagaatactccaaaaccttcaaggggaaatattttaattttcttggttactttttctctatttactgtgtttggaaaattttcatggctaccatcaatattgtttttgatcgagttgggaaaacggatcctgtcacaagaggcattgagatcactgtgaattatctgggaatccaatttgatgtgaagttttggtcccaacacatttccttcattcttgttggaataatcatcgtcacatccatcagaggattgctgatcactcttaccaagttcttttatgccatctctagcagtaagtcctccaatgtcattgtcctgctattagcacagataatgggcatgtactttgtctcctctgtgctgctgatccgaatgagtatgcctttagaataccgcaccataatcactgaagtccttgggaggaactgcagttcaacttcttattcaccgttgggtttggatgtgatcttcctggtcaggcggttctctctaggcatactctttcctctatttgggcttcacaaacaggcaccagagaagccaaatggcccccttgaaccttaaaccctacctacagactgataaaaggcccagtggtttccaaaaatttaggatataaagaggggggaaaaaatggaacccccgggccctgaacattttaataaaacaaacaaaatgcctatggtaagccatttttccacccttccataagccatactcccttcccccgtcagggtgaatacctatgacccatgaagtagcatcagcccagaacatgagagggagaactaactcaagacaatactcagcagagagcatccccgtgtggatatgaggctggtgtagaggcggagaggagccaagaaactaaaaggtgaaaaatacactggaactctggggcaagacatgtctatggtagctgagccaaacacgtaggattttccgttttaaggttcacatggaaaaggttatagctttgccttgagattgactccttaaaatcagagactgtaacacttttgccttacgttcattttatcaagcatagcttggtatttattatgcttgtgtgatctaacatgagttagcatcccacacctcctcttctgatcctgccccattaaaataaccaagaggttatctgttcttttccgggaaaggggtggtatgcacctgaaatagattttaccaaaagagagatttcaggtatgtcattttttcttgatttcctgtgaacttagtattataccctactttcaattcggtagtgatgtttcctttttttttttttctatctgcccctcacgctgtggggtgaaaccgtgaataacttaactgggggaataagtcacttgtgaaagggaaatgttgaaaaatttttagaacactcagacatgcaatttaagaaaattctgaatgttattactaaggtcttattctgtactttattgtgttttgggtttctagaggcaaatgaaggttaaagcataaaaagtgaatccaaaacaaaagcactatcaagcatactcaaaaggcatttgttaatggtatttattctagcaaccacaacattgttacaaaagcacaattttaataggcttatctgctaagatgcttttataagcagctgtcacctatacagaagtaatgaatcatctttggtgctcaaggaacctgtagaagtaagagacatcatcatacagagaaatgtagttaagttaagttgaagcttggaaaagatcacatgaaaaaaatctagctcttgccttatctcttcctaagttaagcataaattagccgtctgcaatagccgcctgtaagacaaatgataacagaagacaatcacacatggtgaatggtttccagtggagtttttcttctaaagagacagtaaacaggtcacaactcattccttgagaaaggattcctatt

SEQ ID NO: 153453 - DNA, 482 bp, Homo sapiens
gcggagaggcaccagttccgggacttccgggatctgaacaaggatgggcacctgtatggaagtgaggtgggccattgggtgttgccccctgcccaggaccagcccctggtggaagccaaccacctgctgcacgagagcgacacggacaaggtgcagtgacggggcctcggcaggagcgaggagcggtgtgggcattgcgggccagactccaaaaaggagcaagacctgggcctggagctcagggtcccttttaggtgggataaaaaaagagggacagagagagggaggaaaagagagggcacggggccccaagctcagctttaagaaccgccccaacccctccagctccaaatttgagcctcccccacatagactgaaactcccctggccccagccctctcctgcctggcctggcctgggacccctcctctctgccaggaggcaataaaagccagcgccgggataaaaaaaaaaaaaaaaaa

SEQ ID NO: 153454 - DNA, 1518 bp, Homo sapiens
  misc_feature (1)...(1518): n = a,t,c or g
agcggccgaattgggcacatttgcgggaacgcagagcggagcgtggagagcggagcgaagctggcataacaggggaccgatgatgtggcgaccatcagttctgctgcttctgttgctactgaggcacggcgcccaggggaagccatccccagacgcaggccctcatggcacggggagggtgcaccaggcggcccccctgagcgacgctccccatgatgacgcccacgggaacttccagtacgaccatgaggctttcctgtgacgggaagtggccaaggaattcgaccaactcaccccacaggaaagccaggcccgtctggggcggatcgtggaccgcatggaccgcgcgggggacggcgacggctgggtgtcgctggccgagcttcgcgcgtggatcgcgcacacgcatcagcggcacatactggactcggtgagcgcggcctgggacacgtacgacacggaccgcgacgggcgtgtgggttgggaggagctgcgcaacgccacctatggccactacgcgcccggtgaagaatttcatgacgtggaggatgcagagacctacaaaaagatgctggctcgggacgagcggcgtttccgggtggccgaccaggatggggactcgatggccactcgagaggagctgacagccttcctgcaccccgaggagttccctcacatgcgggacatcgtgattgctgaaaccctggaggacctggacagaaacaaagatggctatgtccaggtggaggagtacatcgcggatctgtactcagccgagcctggggaggaggagccggcgtgggtgcagacggagaggcagcagttccgggacttccgggatctgaacaaggatgggcacctggatgggagtgaggtgggccactgggtgctgccccctgcccaggaccagcccctggtggaagccaaccacctgctgcacgagagcgacacggacaaggatgggcggctgagcaaaagcggaaatcctgggtaattggaacatgtttgtgggcagtcaggccaccaactatggcgaggacctgacccggcaccacgatgagctgtgagcaccgcgcacctgccacagcctcagaggcccgcacaatgaccggaggaggggccgctgtggttctggcccccttccctgtccaggccccgcaggaggcagatgcagtcccaggcatcctcctgcccctgggctttcagggaccccctgggtcgggcttctggtccctgtcacacccccaaccccaagggaggggcttgtcaatangtcccagaggataagcaatacctatttcttgacttgagtctcccaagcccaagacccagggaccctgggccccaaagcttcagctctaagaaccgccaccaacccctccagctccaaatctgagcctccaccacatagactgaaactcccctggccccagccctttcctgcctggcctggcctgggacacctcctctctgccaggaggcaataaaagccagcgccgggaaaaaaaaaaaaaaaaa

SEQ ID NO: 153455 - DNA, 862 bp, Homo sapiens
cagaagaggcccctgtaatggccgatatcaccacccagtctatcctcaccccacagctgtgcagcgggaacctcctgctggcccacgtgcttgccacagcccgtgctggcacgacgctccagcagttcgaagccctggccaatctactagcccacatgacgcagttacctggccatttctccacggttcccgtgagggccccacacccaggcgcacaagaacccctcctgcattccgtcctcacacgcaggcctgtccatctacttgctactgtcacactcttgccagcagaagaggcccctgtaatggccgatatcaccacccagtctatcctcaccccacagctgtgcagcgggaacctcctgctggcccacgtgcttgccacagcccatgctggcacgacgctccagcagatcttcgcggagcggatcagcggccggagcgtttggcggactctgcgtggatttggagctcacagcgtcttgcgacttggaagcgggttcagaggacaggacagaacacttgggcaagtgaatctctgtctttcgaagccctggccaatctaccagccaacatgatgcagctacctggccatttctccacatttctggtgagggccccacacccagccgcagaaaagcccctcctgcattccatcctcacacacaggcctgtccatccacttgctactgtcacactcttgccagcagaagaggcccctgtaatggccgatatcaccgcccagtctatcctcaccccacagctatgcagcgggaccctcctgctggcccacgtggctgccagagcccatgctggcactacactccagcatgtcggcgtctgcgggccacactaccggtga

SEQ ID NO: 153456 - DNA, 1682 bp, Homo sapiens
gtttgggacgctgggttctgcttttccagaatcctgccctttccaaaaggaagacggtatgattaagttccagattcaagggatacatgtgcaggaaagggtgacattcaaggatgtggctgttgtcttcaccaaggttttagctggcactattggataaagcccagataaacctgtaccaagatgtgatgctggaaaacttcatgaacctcatgttatggattcccttgccagttagcttccagttgggttcagccaatggggaaagccagcaagagatccagggaagggacaagagtgaagtcagaatatttattcccccaggtttttccctagaggttgctgtggaatggctatattccatatccattgaccaaagagatgcacatcccaagactgaccctaagcttcgacccgaggaggcacagcgcaagtcgctgtcacgaaacgtgaagatgcactgttttgtcaaacccagggctgctccccaaaccgagcccacgctcgagcccacgctcttcccatcctatcccggcgtgcgtccagtaccatggcgcatgcgcaaggaggcctatggcctacaatccccagaaagccccgcgcgcagcagtggccattcgcaaggctaccctggtgaagatcttcacagagcggagcagcggccggagcgttttgcgggctctgcgtggacttggagcttacagcgtcttgcgacttggaagcggattcagaggacaggacagaacacttggttggaagccctggccaatctactagccaacatgacgcagttacctggccatttctccacattcctggtgagcgccccacacccagccgcagaaaagcccctcctgcattccatcctcacacacaggcctgtccatctgcttgctactgtcacactcttgccagcagaagaggcccctctaatggccgatatcaccgcccaggctatcctcaccccacagctgtgcagcgggaccctcctgctggcccacgtggctgccagagcccatgctgacaccaacctccagcatgtcggcatccctgcgggtgacactaccggtgacatggccagcatgaccctcctccctggcagtgacactgttgatctgaaggacacggcaccctgcattgtagctgctccagttccagccatggctaaaaagggccaaggtatagctcaggccattgcttcagagggtgcaaaccccaggccttggcagcttccacgtactgttgggcctgtggtcaatggagaagggaaatgtggggttggagcccccagagtccccactgaggcattgcctagtggagctgtgagaagagggccaccgtcctccagaccccagacccaccaacagcttccaccatgtgcctggaaaagatgcaggcactcaacgccagctcatgaaaatagccaagtgggctataccctgcagagccacagaggcagagatgcccaaggccttgggagctcatcccttgcatcagcatgcctggatgtgagacatggagtcaaaggagattattttcgaactctgagatttaatgactgccctgctgggtttcagactggcatggggcctgcagcccctttgttttgcctgatttctccctttcagaatgggggcatttacccaaaggctgtagccccattgtatcttggaagtaactag

SEQ ID NO: 153457 - DNA, 845 bp, Homo sapiens
ctgctccatccaggaagaatgggactctggagctttaagtgctcgggtgatcactcagaacagtcccaccccactatttacaaggatctcctgggactcccatccctccatcctctcttggcccggccagcggaaccaggagggtggagagctggtggcagccccaaatgagcaggagggaagcagcaaagggggtgcaaggcctgtaacaatatgtgattctcagaataggccctgctgcccacctccccccagtcctgctttgccccaggctgacccctctttgaagacctggcttctcctcaaccacatcaggtgggacacagactccatgatttgcatggaggattcaagctaataaggattcaagctaataaggattcaataaaggttcaggtcaggttgagaggggtgcagggagtcgggcactgcatgggaggagcagctcttccctccaccagtctctcctcctgcctcacgccctttcctgctcctttaaatagcagacacactactctggcgcccccacttccacaaccagaaaatccagcccaaagaactactccctaaatataatgcccatagtgatgaaggtgggggtttgaccctttaccccagtattagtcccctcctcacattttcactgagaatggggatacattccatcaataatttgagatgtttctttggaggagtgggggagagggcctccagatgcctgaagaggaatggagggaccatccaaatattcctccccctacttctccccagaaaggatggtgtccccaaagctgggctggtaggggcaggggcagggggaagggaagaaagacaaaaaaaaaaaa

SEQ ID NO: 153458 - DNA, 395 bp, Homo sapiens
caaatgccatgactgtggggccattcttgaagaatacgatgaagagacacttgggctagccatcgtggtcctctccacattcattcacttaagcccagacctggcagccccgctgctgctggatatcatgcagtctgtgggaagattggcatccagtactaccttttctaatcaagcagaaagcatgatggttcccggcaatgcggcgggggtggccaagcagttcctgcgctgcatcttccatcagttggcccccaacggcatcttcccgcagctgttccaaagcacgatcaaagatgggacttttttacggaccttagcctcgtctctgatggacttcaatgagctgagctccatcgcagctctcagtcagctcctagagggtctaaataaca

SEQ ID NO: 153459 - DNA, 1095 bp, Homo sapiens
  misc_feature (1)...(1095): n = a,t,c or g
gggtttgttggaaccattttcaaaactgctcagctttgtaattcagaatgccgtcttcactctggcctacctggtggagctgtgtggcttatgttaccgagctttcactaaggaacgagataaattctacttgtctcgtagtggttgttctaaaagcttctgcaggcgcctaaagctcaaatctcctttaccagatacaaaccttcttctgcttgttcagtttatttgtgccagatgctggaaccaaactagactgagtcaacaatcctgagcaagcagatgatagcctctgtacctgggatgttgggactgcaagcgatggagtgtgtgaggcagtacatcaacgaagtgctggatttcatgggcagacatgcacacgctgaccaaactgaagagccacatgaagacatgttcccaggcctctgcatgaagatacctttgggggacatctcaaagtggggctggcccagattgcagccatggacatctcacggggcaaccacagagataacaaagctgtgatccgctatctgccttggctttatcatcccccctctgcaatgcagcaaggacctaaagaattcattgagtgtgtctcccatatccgactgttgtcctggctgctgctgggttccctcactcacaatgcagtgtgcccaaatgcctcctctccctgcctgcccattcctctggatgcaggctcccacgttgcagaccatcttattgttatcctgattggatttccagagcaatcaaagacctccgtgctgcacatgtgctccctcttccacgcgttcatctttgctcagctgtggacagtttattgcgagcaaagtgccgtcgctacaaatctccaaaatcagaatgaattcagcttcacggcgatactgacagcactagaattttgggagtagggtgacacccagncatccttcagctaatgggcccattaacaaagtgatgggtaggaaatgggtgttgttntccatgtggattagtttaatgggagggaatttgccagggaatgcaatttggaccnttttttgtcaaggntggatacccatgtngggttgcccaatggnttccagttcaaaa

SEQ ID NO: 153460 - DNA, 5597 bp, Homo sapiens
atggctcttggctgggtgtggtggctcacgcctgtaatcccagcactttgggaggccaaggcgggcagactgcctcaggttggtggctactgggataagtcctgtagcacagtgactcagctgaaggaaggtctcaaccgaatcctctgcctgatcccctataatgtgatcaatcaatctgtctgggagtgtattatgccggaatggctggaagccatcagaacagaagtcccagataatcagttaaaagaattcagggaagtattaagcaaaatgtttgacattgaactctgtcctctgcctttctcaatggaggagatgtttggttttattagttgtcggtttacaggatacccctcctctgtgcaggagcaagctttactgtggcttcataaaattaatgacagagaaagtgacttgatttgggcccagattgacatgaagttgtaccagacagcaggatcggatgggtcattgagatcagagtggggatggactggagaagcagtgctagtccaggagaaagggctgaaggaacaagggaaagagttcctggggcaccaaacgggagctgaaactgtaagaaagggctggttggagaagttacggagtgctggagatgctcccagagatgtagcacccaagtgggcagggagaggggagaaatactcctgcctctctctcctccaggtctcaggaattctgctggtgagtgttgcctctgatcctggccgacgagttcagcacaatatgcttagtccatttcatagtcctttccagagtccgtttcggagtcctttgcgtagtccgtttcgtagccctttcaagaattttggacacccaggaggaaggactattgactttgattgtgaagatgatgaaatgaatctaaattgtttcatcctcatgtttgatcttctcctgaagcagatggagttacaagatgatggaatcacgatgggtttagagcacagcttatcaaaggacattatttctattataaacaatgtcttccaagccccctgggggggatcccacacctgccagaaggacgaaaaagcaatcgagtgcaacttatgtcagtctagtatcctctgctatcagcttgcttgtgaactcctggagagactagctcctaaagaagaaagccggctggtggagcccacagacagcctggaggatagcctcctttcttccagaccagagtttatcataggccctgaaggggaggaggaggagaatcctgcaagcaagcatggggagaacccaggcaactgcaccgagcccgtggaacatgctggtagcctgtggagggtcgtcaaatccgagttctctcagctgtcttccctggcagtccctcttctcctccatgccctgtcacttcctcatggtgctgacatcttctggacaatcataaatggcaatttcaacagcaaagactggaagatgaggtttgaagcagtggaaaaagttgctgtaatttgtagatttctggatattcactcagtaaccaaaaaccacctgctgaagtactccctggcacatgccttctgctgcttcctgacagcagtggaggatgtcaaccccgcagtggctaccagagctggtctcctgcttgacaccataaagaggccagcattgcagggtctatgtctttgtcttgacttccagtttgatactgtggttaaagacagacccacaattttgagcaagcttttactcttgcactttcttaagcaggatattcctgctctgagctgggagttctttgtcaatagatttgagacgctttctttggaagcccagctacatttggattgtaacaaggaatttccttttcctacaagacaacaatctcctgagaatgacaacaccatcaaggacctgctcccagaagacgctgggatcgaccaccagacagttcaccagctgattacagtgctcatgaagttcatggccaaggatgaaagcagcgctgagtcagacatcagcagtgcaaaggccttcaacacggtcaagcgacacctgtacgtcttactcggctatgaccagcaggaaggttgcttcatgattgcacctcaaaaaatgcgcctgtcaacttgctttaatgcattcattgcaggaattgcccaagttatggactataacattaacttgggaaaacaccttctccccttagtggttcaggtgctcaaatactgctcttgtcctcaactcgggcaataatttccaacagccgcctcgttgctccctctggtccctaaagcctcacatccggcagatgtggttgaaggccttgcttgtcatcctttacaagtatccataccgagactgtgatatcagcaagatcctgctgcatctgattcacataacagtcaatacactcaatgcgcagtatcatagctgcaagccccatgccacggcaggacctttgtacagtgacaacagtaacataagcagatacagcgaaaaagaaaaaggtgaaatagaactggctgaatatagagagacgggtgcattacaagacagccttctccactgtgtgagagaagaaagcattccgaaaaaaaagctacgctctttcaaacaaaaatctcttgatatagggaatgcagactcgcttttgtttacattagacgaacatcgtaggaagtcgtgcatagatcggtgtgacatagagaagcctccgacccaagctgcgtatatcgcacaaagaccaaacgaccctggacgttctagacagaactctgctacgaggcctgacaatagtgaaatccccgagaacccagctatggaagggtttccagatgctcgaaggcctgtcataccagaggttaggttaaactgtatggagactttcgaggtgaaagttgactcgccggtaaagcctgctcctaaagaggatttagatctgatagatctatcctcagattcaacctcggggcctgaaaaacactctatactctcaacctccgacagcgactctcttgtatttgagcctcttccccctctcagaatagtcgagagtgacgaagaagaggagacgatgaaccaaggcgatgacggcccctccggtaaaaatgctgcctcttctccctccgtccccagccatccctccgtcctcagcctgagcacagctccgcttgtacaaaaggtggaagaggatggagctgaggaatccgaatttaagaataagattgttcccaggcagaggaagcagaggaagattgctgttagtgctatccagagagagtacctcgacatctccttcaacattctggacaaactgggagaacagaaagatccagatccttctactaaaggactttcaactttggaaatgccacgagaatcttcatctgcccctacgttagatgcaggtgtgccggaaacaagtagccattcctcaatatcaactcagtataggcagatgaaaaggggatccctgggagttctgacaatgagccagttaatgaagcggcagctggagcatcagtctagcgccccccataacatcagcaactgggacactgaacagatacagcctgggaaacgccagtgtaacgtgccaacgtgtcctaaccctgacctggagggacagccattgaggatgagaggtgccaccaaatccagcctgctatcagcaccaagcatagtcagtatgtttgtgcctgcacctgaagagttcactgacgagcagccgacggtgatgacggacaaatgccatgactgtggggccattcttgaagaatacgatgaagagacacttgggctagccatcgtggtcctctccacattcattcacttaagcccagacctggcagccccgctgctgctggatatcatgcagtctgtgggaagattggcatccagtactaccttttctaatcaagcagaaagttggcccccaacggcatcttcccgcagctgttccaaagcacgatcaaaggtaattcatccactgaggatccaggcaccacaaatttgcctcatcccagacacccaaacactaaatccgatcgttgactttccagatgggacttttttacggaccttagcctcgtctctgatggacttcaatgagctgagctccatcgcagctctcagtcagctcctagagggtctaaataacaaaaagaatttaccagcagggggtgctatgattcgctgtttggaaaacattgcaaccttcatggaagctttgcctatggattctcctagtagcctctggaccacaattagcaaccagtttcagacattttttgccaagctgccttgtgttttacctctgaagagtttgttggaaccattttcaaaactgctcagctttgtaattcagaatgccgtcttcactctggcctacctggtggagctgtgtggcttatgttaccgagctttcactaaggaacgagataaattctacttgtctcgtagtgttgttctagaacttctgcaggccctaaagctcaaatctcctttaccagatacaaaccttcttctgcttgttcagtatgagaacaaaatgaatgagaaggcggagcgactggtgctgaaacttctgaactctgcacagcagcagtttcagtttatttgtgcagatgctggaaccaaactagctgagtcaacaatcctgagcaagcagatgatagcctctgtacctggatgtgggactgcagcgatggagtgtgtgaggcagtacatcaacgaagtgctggatttcatggcagacatgcacacgctgaccaaactgaagacctccgtgctgcacatgtgctccctcttccacgcgttcatctttgctcagctgtggacagtttattgcgagcaaagtgccgtcgctacaaatctccaaaatcagaatgaattcagcttcacggcgatactgacagcactagaattttggagtagggtgacacccagcatccttcagctaatggcccataacaaagtgctgatacctatgtggttgccaatgattcagtcaaatatcaagcacttatctgcgggactccagcttcgcctccaggctattcagaaccacgtgaaccaccacagcctaaggacgctgccgggctcgggccagagcagtgctggcctggcagccctccgaaagtggttgcagtgcactcagttcaaaatggcccaggtggagaacccagtcctcggaaagcagcctctcaattttatcctctatgagtggactccctcggcgcctcagtgtcaacactctggtttagcaataatgggtttaaaaacaaacaatttggatccccaagcaggttgggggaaccatattgggtacctgtacaatcctctttcctagtttagtaaaagatgtgccaaaggcccagagagggcccgaaaatgaagcctttccttgctacacatatttcctgatgactaccttgggctatctgattaagtgtttccttacattattttttaaaaaccaaatcatttttctttaactaacttctattttttttaagaaaaaaaaatagaactggtgggtactcacagaaaagttgtataagtccccctgttgctatttttgatgcatagagaataaatagggtttttgaaaaaaaaaaaaaaaa

SEQ ID NO: 153461 - DNA, 1365 bp, Homo sapiens
ctttcttctcgtcggtgttcccggctgctatagagccgggtgagagagcgagcgcccgtcggcgggtgtcgagggcgggttgcctcgcgctgacccttcccgccctccttctcgtcacacaccaggtccccgcggaagccgcggtgtcgcgcgccatggcggagctgagcggctcttgagagtctcatcgagatgggcttccccaggggacgcgcggagaaggctctggccctcacagggaaccagggcatcgaggctgcgatggactggctgatggagcacgaagacgaccccgatgtggacgagcctttagagactccccttggacatatcctgtggacgggagcccactttctcagagcaaggcggccctttgaaggatctggttcttgcttgccggagaaggcaaacccgctttgagttgaaagaggaaagacaggaacaaactaaagaggatgtttggagcttggttggcccagaaaggcagccgggaggcgtgaagaaagagagggacgggaaggcattggaacgggaacggcagcgcagggagacaagggcaagaggttgtcagcagcacgacagcggctacaggaagattaagatgcgccggggctgctgctgaggagaggcggagggaaaaggccgaggagtttagcagccagacaaagagttagagaaaagatcgagagggacaaagcagagagagccaagaagtatggtggcagtgtgggctctcagccaccccaaggtggcaccagagccaggtccctgttccctcttctcccaagccaggagcctccccacaaagggggaggatgataagtgtcgcatacaaggtcaggctgcccagatgggaccctcactgaccccagacgttccgggcccgggaacagctggcagctgtgaggctcctatgtggagctcccaccgtggggaggaacttaggtggtggggccagggaccctgtgcaaattgcctcagtggccttcccccagacgggcctttctcagaagcctgactatggagcgtgcctctgcaggagctgggtatggctgccaagactagaaaccaggactagaaactgggggagtagggaggcatgccctaggaaaaggagggatgcaaagagaaggggctttgtgaacatggtgcaaggcccaggaattttgggagcaaaaaccaagtatccttgtggttcaagcctgttttcttccatcttcaggactcgtgccttctgctgttctcattgtggccaagaaatgtcccagctgagggcctttgtcccattgtccctctgtgaccccttcatctttgataaagcactgacatctccttcctaataaatagaccctgagttctgtaaaa

SEQ ID NO: 153462 - DNA, 754 bp, Homo sapiens
aatacatttccaacaagagcactggccaagtcagcttcttctgagagagtctctagaagacatgatgctacactcagctttgggtctctgcctcttactcgtcacagtttcttccaaccttgccattgcaataaaaaaggaaaagaggcctcctcagcccctctcaagaggattggggagatgacatcactggggtacaaacttatgaagaaggttctcttttatgctcaaaaaagtaaggaagccattaatgggttattcatcacctggggggattgtcaatactctcaagcactaaagaaagtatttgcccaaaatgaagaaatacaagaaatggctcagaataagttcatcatgctaaaccttatgcatgaaaccactgataagaatttatcacctgatgggcaatatgtgcctagaatcatgtttgtagacccttctttaacagttagagctgacatagctggaagatactctaacagattgtacacatatgagcctcgggatttacccctattgatagaaaacatgaagaaagcattaagacttattcagtcagagctataagagatgatggaaaaaagccttcacttcaaagaagtcaaatttcatgaagaaaacctctggcacattgacaaatactaaatgtgcaagtatatagattttgtaatattactatttagtttttttaatgtgtttgcaatagtcttattaaaataaatgttttttaaatctggaaaaaaaaaaaaaaaaa

SEQ ID NO: 153463 - DNA, 433 bp, Homo sapiens
atggatcggatataccggaccgaccatttcgagttaatggcgggccgtagccgctgaggggattgcttataaccgcttcccgcacggggaaagtctaccctgcctgccactttctgctcgccgccagcgccggagctcgccagcatgtctgtggtaccgcccaatcgctcgcagaccggctggccccggggggtcactcagttcggcaacaagtacatccagcagacgaagcccctcaccctggagcgcaccatcaacctgtaagtgcggcgcggccttggcgggcatttctctcgtgaaagctcctatagactctccgacgcgcccccggcttttcggcgcgcttcacgcctctgcaccttcccgcctccaactcccgctggcggatgcgcgccttcctccctctctcaggcccctttctcatcctccagcg

SEQ ID NO: 153464 - DNA, 1946 bp, Homo sapiens
  misc_feature (1)...(1946): n = a,t,c or g
gcgctgtcctgttaatggcgggcagtagccgctcgaggggattgcagataaccgcttcccgcacggggaaacgtctaccctgcctgccactttctgctcgccgtcagcgccggagctcgccagcatgtctgtggtaccgcccaatcgctcgcagaccggctggccccggggggtcactcagttcggcaacaagtacatccagcagacgaagccccttcaccctgggagcgcaccatcaacctgtaccctcttaccaatttatacttttggtacaaaaagagcccctcttacgagaaggacaagctctgttggcagccagattttcagcgcattgaggggaagaattttgataaaattggaatgaggaggactgtagaaggggttcttgattgtacatgaggcaccggttaaccccatggtgttacttgctgcaactgggaacaaattttcttccaaattaccttggttggttgaacttaaccccgggagaagatgaagtttgaagggcttaaaacggcttaatgaccagagatacctgggtccgtccaggatggagttttgccaagacctggggtccattgaccgattgccattgggtaacctggtgggagacccaaatttttgaaccctccctcagtatcccatatattccctgcacatattaccacagcctaaggaaccataagaaagttgtttcctggttccagccttcaagaaaaagcccttgttttgcagttccctaaaaaatttacaagctggtagcctgcaaccccattgtttgaattgtatgacaatgcgaccaggatatggacccatcatttctagtctccctcagctgttgagcaggttcaattttatttacaactgaattcctgcgcagtggagaagtaaaagaagccgcttgtctctgtgagcacagctatatacagtttaggattaattttgttagaaaagtttttttggttttatctcttttgcgatccctaaattgtccacctttctatttgtttgataagtaaaattaatatgaaggaactagatagtggtgtaaacaaatgtgataatgtttatttactttcgggtctgctcatacttttttgtacaacattaaagaaaatggactttttttattttaatttctcattaaacttctaaaattcttataggtgaggatcatttttccccccaccttatgatggtgaatgttgcaacacaatgacaggtttaagtcagtcaagtttattggacccttgctttgataccattcttgggcacatactccaagattgtattagattttggtgaatgaagagcttccattacttctgaaacctatatttatctgagtgagtccaaggtgcaactcctaaatgaattgtgttgcagagaactcccagtataattcactgaccagtacgttttataaccatccaggccttggtttgcaagcaacagaccttaaacatacaggaaactattaaaattggctcgatcagtagtcataggaattggtataaggaagagactccatttaggagcctcagagttttctttcacataatgggggtatttaattatttgtgctgttgcngaaaattatgtgtcttattcttaaagccatgggtaaaaattagggatctgtgaaggaaatttctaaaattggatgtattaggttttgaactctgagattgcacaaatattcaattaactttgaagttgtgtacatagagaagaaaatttggttttagcaaatgacagagccttcaaaaatatttttggaataatgtgaatcaaccgaaaacctgggggcaaggcagaggaccaggttttctccaggttaagagaaaagcgaaattgtaaaaactttaaaaaatactgataaattccggatcaaatttgggggaataaaaaatattagagccaaggaaaaaaaaaaaacaaaccaa

SEQ ID NO: 153465 - DNA, 1715 bp, Homo sapiens
  misc_feature (1)...(1715): n = a,t,c or g
gcgcgctcgcatccccaagatggcggccgttaaggacagttgtggctaaggagaaatggccacagggaatgggcggcggcgtccacctggggattcctgaggccgtgtttgtgtattatttttnatattaaaggaagatgtatcattacttcatgaaacagcctgggaatgagactgcagatacagtattaaagaagcctggatgaacagtaccagaagtataagtttatggaactcaaccttgctcaaaagaaaagaaggctaaaaggtcagattccctgaaattaaacagactttggaaattctaaaatacatgcagaagaaaaaagaagtccaccaacttcaatgggagaccaagattctttgctggcagattaaccctgtatttgcaaaagctttcagttcctcctacccgataaaggggggtctggggttgggggctaatgtaatgcttgaatatgatattgatgaagctcagggcattgttgggaaaagatttattcgactgccacaaagattcttgattcccgggggggaaggaccttgacttttctttcgagatcaatttactaccacagaagtcaatatggccaggggtttattaattggggatgttaaaaaggaaggaaacaaggatggactctaccaagaacaaagcattaatgctgggccaatttaaaaatgtgggtttagtttttccaaacatgtttatctttaaatacccctttattccttacaggtttgacattaactttggaatgtttaaccagccaaggaattttaaggaaaagataaacaccattttatttatttataabkkkcaaaattagtttcaaatatttttgacattgtgatttttttttccacatttctcagcaaagctaatggtattttaatatcattattttttgcctgtcataagaaaactcttagctgaaaggcccgaaaactgtgaagacagcctatggaagctgaaatgccggacgcctagcacagtttacctttttcccctttcctaatcggctgatgttacctctcacttgatgtggttaaaccattttagaggtagagaagacagacagtttgaatatttgtaaacttgtttttctttggtatatttaggacttagtggtcctctgttgctattgtcttctataagtggagtttcatgacttactgcttaaccgaataactaactactatgatattctggaccattttaggaaatggtaaatttgcctggctaccacattaaggggggctattaaagactaccattttttctaacctccagataagtgccagtgtcctttgcaaatgcccaacgatacgtggagatcctgggccccaaccgtgaaataaaaattactcattccaaaacccctgcccaagggtgattttggtaggttccttaaccaggttctcccaggagccatccttggaaccagggaatatttaagataaatgtgaaatctgccaatggctgaaaagagttgtgagcttttttattccatgataaaaccttataggaatagtataaaaaatccctgtggaaagctactagtacattgaccagcgctgggtgatacagattctgataaaaacataaatgtattagttcatctccatgtagtaaaaagtatacttatacaatgttttgtacttgtatttcatgaaattaaaacgagtgatgctaaaacggccttcgtggcctc

SEQ ID NO: 153466 - DNA, 518 bp, Homo sapiens
aggagcgcatcatggagtggcatcgccatacaatgaccgaatgttctgcgcaagagcccaagagccatgatatctacctgaggctgttggtcaagttatacaggtttctggccagaagaaccaactccacattcaaccaggttgtgttgaagaggttgtttatgagtcgcaccaaccggccgcctctgtccctttcccggatgatccggaagatgaagcttcctggccgggaaaacaagacggccgtggttgtggggaccataactgatgatgtgcgggttcaggaggtacccaaactgaaggtatgtgcactgcgcgtgaccagccgggcccgcagccgcatcctcagggcagggggcaagatcctcactttcgaccagctggccctggactcccctacgtccgctccaagggccggaagttcgagcgtgccagatgccgacgggcccgccgaggctacaaaaactaaccctggatcctactctcttattaaaaagatttttgctgacagtgaaaaa

SEQ ID NO: 153467 - DNA, 696 bp, Homo sapiens
atgggagtggacatccgccataacaaggaccgaaaggttcggcgcaaggagcccaagagccaggatatctacctgaggctgttggtcaagttatacaggtttctggccagaagaaccaactccacattcaaccaggttgtgttgaagaggttgtttatgagtcgcaccaaccggccgcctctgtccctttcccggatgatccggaagatgaagcttcctggccgggaaaacaagacggccgtggttgtggggaccataactgatgatgtgcgggttcaggaggtacccaaactgaagcataacaccagggatgtggtggtgaaagttccggaagtgttgagaactgctgctgtcagcccaggggtgctccgggtagtaaacgatagtgttggttaccagggctctgctgcgccaaggcagtggagggtatgtgcactgcgcgtgaccagccgggcccgcagccgcatcctcagggcagggggcaagatcctcactttcgaccagctggccctggactcccctaagggctgtggcactgtcctgctctccggtcctcgcaagggccgagaggtgtaccggcatttcggcaaggccccaggaaccccgcacagccacaccaaaccctacgtccgctccaagggccggaagttcgagcgtgccagaggccgacgggccagccgaggctacaaaaactaa

SEQ ID NO: 153468 - DNA, 784 bp, Homo sapiens
  misc_feature (1)...(784): n = a,t,c or g
cggatacattaccagacagnttgctgttcgattaatcactnctatagaattngcctcgagcaagattcggcacgagggccgagcaggaggcgccatcatggtgagtggaccatccgccatacaaaaggaccgaaaaggttcgggcgcaaaggagcccaaagagccagtatatctacctgagcctgttgctcaagttatacaggttttctggcccagaagaacccaactccaacattcaaaccagggttgtgttgaagaggttgtttatgagtccgcaccaaaccggcccgcctctgtcccctttcccggatgatccgggaagatgaagctttcctggccgggaaaacaaagacgggccgtggtttgtggggacccataactgatgaatgtgcggggttcaaggaggtaccccaaactgaaggtatgttgcactgcgccgtgaccaagccgggccccgcaagccgcaatcctcaaggcagggggcaaagatcctcacttttcgaccagctggcccttggacttcccctaaagggcttgtggcactgtcctgctttccgggtccttccaaaggcccgaaaggtgtaccggcattttcggcaaaggccccaggaacccccgcacaagccacaccaaaaccctacgttccgctccaagggccggaagttcgagcgtgccagaggcccgacgggccagcccgaggctacaaaaaactaaccctggatcctactctcttatataaaaagatttttgcctgacaaaaaaaaaaaaaaaaagggcggccgct

SEQ ID NO: 153469 - DNA, 1581 bp, Homo sapiens; identical to SEQ ID NO: 135380

SEQ ID NO: 153470 - DNA, 1800 bp, Homo sapiens
atgtggtttgcctactccccgttcaccttctgccatgattggaagcttcctgaggcctctgcagaagccaaacggatgccagcactatgcttcttgtacagcctgcagcaccccttgtgtgaggatggggtatgcgctcatgaggcaggagtatggggaatcgggggtctgatcattgcttatgtgaagggctatgaagaggtttctcagaagttcacctccatacggcgagtccgtggtgataattactgtgcactgagggccacgctgttccaggccatgagccaggctgtggggctgccgccctggctgcaggacccggagctcatgctggttgtttttgtagccattttgcttcacagtcacctggaatgccgggagcccctgctcatcccgatcctctccttgtacatgggcgcacttgtgcgctgcaccaccctgtgcctgggctactacaagaacattcacgacatcatccctgacagaagtggcccggagctggggggagatgcaacaataagaaagatgctgagcttctggtggcctttggctctaattctggccacacagagaatcagtcggcctattgtcaacctctttgtttcccgggaccttggtggcagttctgcagccacagaggcagtggcgattttgacagccacataccctgtgggtcacatgccatacggctggttgacggaaatccgtgctgtgtatcctgctttcgacaagaataaccccagcaacaaactggtgagcacgagcaacacagtcacggcagcccacatcaagaagttcaccttcgtctgcatggctctgtcactcacgcttaaagacagtgtacagaaaccagacatcagcctgacggggcgcttagtccagacactcccgacacgcatgcgccatcaacgtggagaaagcaaagatgtggcgcctctggcctcttggctttccgagcccagcaccagctcggaggcttcccaaacaagttccaagttgactattaatagtcaaggagaaggaaaggctaaacagaagctggagtgtggaactttatcaatagtcctcagatcctgtgagaaaaaccaggaaaggattaaagctgcagagaaaaggaataggagttggacaaccctctgcgggcttggcgcatggcgccccctgctgtttgagttacctgtgattgttcaaaccccagatcagactaaccgcttccagttccgataccccgcgaagacccagtctgggctttgtagttttttccatagttttgacctcctcacattggaggcctttgtcaaagtctggtttcctggttgcctgctcattttgctctgtttcgtgatgttttggacacccaacgtgtctgagaaaatcttgatagacatcatcggagtggactttgcctttgcagaactctgtgttgttcctttgcggatcttctccttcttcccagttccagtcacagtgagggcgcatctcaccgggtggctgatgacactgaagaaaaccttcgtccttgcccccagctctgtgctgcggatcatcgtcctcatcgccagcctcgtggtcctaccctacctgggggtgcacggtgcgaccctgggcgtgggctccctcctggcgggctttgtgggagaatccaccatggtcgccatcgctgcgtgctatgtctaccggaagcagaaaaagaagatggagaatgagtcggccacggagggggaagactctgccatgacagacatgcctccgacagaggaggtgacagacatcgtggaaatgagagaggagaatgaataa

SEQ ID NO: 153471 - DNA, 2240 bp, Homo sapiens
cagcagagctgccccttcaccaccccagtcaccacccttagcctgattgggcaggcgatggctcatagccaggaaggctgcctccctcaggcttcccaaaaccaatcaagggcatacgcggctcagccacacttttgcactcatattcccgtatgcttccgcttaaatgtactcatgaaaaattttaagatggtttgctgtcactcatcccctgacccagacgggttacacagatctggcagtggacacaccctccaacacagcatgaaaagagcataggaaaacccaggtccagctaagccctacctcaaagtaatttggcctttggttcctcctcttgaaagcaggtggatacaaactgtttggctataaaattgtgaatctatggaactgtagaataattaaagcttccaacactaaaccacaaaggcaagtagtgtctgtccacactgatggggcaccacctgcaccaagccccagactccagtgcgctgggggcatcagacatctgtcatagtcacaaggagcaagaagttctaggttccctcaccactccctcctacgctcctccagtcttcaaaaatgccttgaaataacccactttgggacccaattcttaatctgttgcaaaacaatctgcttaaaatagccttaattaagatgtaagtccaaaccattgctcttcccttcataaaaaggagaaggtaagattaccagaggttgtcatgactatgccagtaacagatctatccccagaattataccacttaaagcagactgttagaagccccctcagtgccagtgggcagcacgtcagtctcataatcctcaaggtcctgagttaaagcagactgtataggaagatctatagaaacccgttactactaaaggggaaaaaaaaatactgtacttaaaaaaattagaagccagtttaccattagagagagttttgatttgagatataaagaacatattcctctcccaaaactggagtttcctctggatacaaaagtatttggccttctgggagaagatatggtttgcaccggtccaacaggtgtggctctgaagggcccccactggaaatatattggcatcatagatgaggggaaagacttggttaatttctcttatcaaaagctagtcttcaggacatcctggtccacttggcttcccaggggcccaagggttcttctcagagattgttctttaaagacccccaaacctgcagcccaagcccaggagcccacctgtgcatcttcgcccacgtcgccagggcttttcagggagcatgcgttctctcatagactgggtctccctcacacactctgacggggatgttatagtgccgatcgtcctcagcaatgagcgttaccactggcccagtccttgggtgggtcggtggggtagactgtgatgaattcttccgtgttgtacttggagaagcccggttacaccctggatggtgtggcgcaccagcattagggcaagaaggaaccatttccaacctgttccaagaccaccagtgtgtcccacctggttgaggtggttcctcagaagctgtcctgggtcatttgatgtgtcccgagcaaacagaagcacagagaaaaatggtacttcctttcctttctctttatcattatatagttcaatggctctgtttagcattagaaattttacagcttcatagaggctatattcctccgccctcatttgtgaatagttcatcacaagctatctgtcttgcttcagcagttctcatttcagccaaagcctgcccacttcttcctcagcagagtaagggactctttaattttatcaaccaggtcctcattcttcccatcaaatttcagtccaagtttccattgcttgatccagttgtatttgcttatgagtttttctggtaacagcatgagctccgggtcctgcagccagggcggcagccccacagcctggctcatggcctggaacagcgtggccctcagtgcacagtaattatcaccacggactcgccgtatggaggtgaacttctgagaaacctcttcatagcccttcctgctctcctccctgcagtcctcattcctgtgcacaccaagacaagactgctcggccgggcactgcatctcgggccgcggctgcccgctggccgccgccttcccgccgtcccgcgccgtggccgccgcctcccgcgccggcgtctcggcgcagctcgcgcctggccacgcttcgggctggggcat

SEQ ID NO: 153472 - DNA, 1026 bp, Homo sapiens
tttggggccagagtgggcgaggcgcggaggtctggcctataaagtagtcgcggagacggggtgctggtttgcgtcgtagtctcctgcagcgtctgggggtttccgtgcaggccctcgaaaccaggacccttcgcgtgccctagccgagttatggccgacgaaggccgtgatgcgtgctgaagggcgacggccccagtgcagggcatcatcaatttcgagccagaaggaaagtaatggacccagtgaagggtgtggggaagcatttaaagggactgactgaaggccttgcatggatttcatgttcatgagtttggagataaatacagcaggcttgtaccagtgcagggtcctcactttatccctctatccagaaaacaacggtgggcccaaagaatgaagagaggcatgttgaagacttggggcaatgttgactgcttgacaaagatggtgttgggccgatgtgtctattgaaagattcctgtgatcttcactcttcagggagaccatttgcatcatttgggccgcacactggtggtcccatggaaaaagccagatgacttggggcaaagggtgggaaatgaaagaaagttcaaagacagggaaacgctgggaagttcgtttgggcttgtggtgttaatttggggtccgcccccaataaacattccccttgggatgtagtcctgaggcccccctaacctcatcctgttatccccgcctagcctgtagaaatgtatccctgataaacatttaaacactgttaatctttaaaagtgtaattgtgtgacgtttttcagagttgctttaaaagtaccctgtagtgagaaactgatttatgatcacttgggaagatttgtatagttttataaaactcagttaaaatgtctgtttcaatgacctgtattttgccagacttaaatcacagatgggtattaaacttgtcagaatttctttgtcattcaagcctgtgaataaaaaccctgtatggcacttattatgaggctattaaaagaatccaaattcaaaaaa

SEQ ID NO: 153473 - DNA, 2845 bp, Homo sapiens
gtgcaccgtactaccagctggtgatgagataagggacttgtgccaaaatataaatcaattaaatccctaagcacgctgctgggttcagctgacattttcccatcgcacaactttctggagtaaggaagaggtgcacctatttgcattctgggaccagaccctcctctcctgggaggccaacacgccatctcagaccagcagaccctagacatgcgctgcacctggaagtggcaccgccctggtcatctccttcaccagagcctgcaacaggctgattctagtttgcaaaaatcccttttcatgtagtattggctggaatacttctatgcaaaagatcacacactatctgttttgcctgaggtacagtttataaatgaaaggtgggttaaatgcttgagtacttctttttttcaaaacagcattcaaaataatgagatggttcctttgcatcctacaaatatgatgacgaagggttttgttagcacccttgcgaactcagagttagctgttttcatgaatgcttcaagtttctgcccatgaccagctagagacaggctccctaaccctgtctcccagccccagccaccctgcaatagcttcctcgctctccagcatgacagagcactccacacccatcttgcagggtcttccccagacctggagccaagcaccctgccaggactgcttcttttgctgtgaagcaaccccagcctgggccccagaactgttcactgctgggggatctgccaccattgctctaccttgtcagtgggcagagttagaagcaacaggcttaactcacaaatatcttatgaggacatagtcatgcttataaaattgttctgaaacactcctgttttctctccccgaatatttctgtgacatggttttttttttttattttttgagatggagtttcgctcttgctgctcaggatggagtgcagtgctgcgatctcggctcactgcgacctccacctcctgggttcaagcgattctcctgcctcagcctcccgagtagctgagattataggcacatgccccccaccgtgcccggctaacttttgtatttttagtagagacggggtttcaccatgtcggccaggctggtctcgaactcctgacctcaggtgatccacccacctcggcctcccaaagtgctgggattacaggcatgagccaccacacccagctgaaggggtcttttattcaacaaaacagacactgagcatgggatgctggaggcatgtaaaggacaagagctgctcctttgtgacatccatctcttcctcctgccccagtgcactgactttggccatcagcccctgcccagaccaccacaggccccctcacatgtttcaggtttggggtctacttggtgtgatgagtaatcaagaccagggttggcaaacaggttatatctcgtgccgacgtcagttagttggtagagacatcctggagggtggtggtggggattgtggagctgaagagaaggtacttgctgttcttcactctaggtgtgccctggcagcccgtcatgtgtcgaggctaagcctcctctcacagggcacagagcacaccagagccttcgtctgcttccttccactctccctcatttagtactctttggcactcgccttgtgccagattggtaagacacccacaggccgcccccctcaccgtgctcatggtctggagtgtgttatgataagggccttgtggaaggacacagtgagctctggaagccactctctgcctggggagcctgggcaggcttcagagatgcaagaccttcagctgaccttaaagtgtgagaaggagtttgctggatagggagggtgggaagagaaggtgggaggagcagctggggccaaggcatccagagagaaaaggcccagctggctgcagtggctgaagctctacaggctgggatggtggggatggtggggatggtggggatgggtgggagctgaggctgggaggtggttggcttggggctggttgcaaagcgcctgttgtgccaaggctgagctcagacttgatccagaaggcagtggggagccacaggaggcttccagcaagggatggggatgtcagatgggcatgggtgctgtggaataccacagggggctcgatgcttctgttgagcctgaggaaatggcccagagagcacccaggagagccctgaagagagagtatagaccagggcttctcaaacttttttttttttttaagacggagtcttgactctgtcacccaggctggagtgcagtggcatgatctcagctcactgcaacctccgcctcctgggtttaagtgaaagtgattctcctgcctcagcctcctgagtagctgagattacaggtcccctgccaccatgcccgggctaatttttttgtattttttttttttagtagagacggggggtttcaccgtgttagccagggatggtctcgatctcctgacctcaggtgatccacccgcctcagcctcccaaaagtgctgggattcagaaaaactcttttttttttttggagacaagagtttccgcttttgttgcccaggctggagtacaatggtgtgatctcggctcaccgcaacctccgcctcccggggttcacgccattctcctgcctcagcctccccagcagctgggactacaggcgcacgccaccaggcccggctaattttgctgtgtgtaattaatttcaaatagtccaggattgctctactatttagtatttgtcatgtcaatttcaattactttttttgtactgaaatttttaccctatttgagtaaagagcattaaagatagaaatgttatactttagtcttgaagatacct

SEQ ID NO: 153474 - DNA, 532 bp, Homo sapiens
gaggaggaggtcctagatgtggtcctgtctgatgtaggcaccggcaggctcagctcctccaaatggttgtccatcccagacgactggggggttggtggaggatcttcgcaaggcaagaacacatctgctgcatccgggtccccaaggtcaataagttctacttgctccagtgtgtccacattcacttccatggatgagatactacctatggggggtctctgcgactcgagatgcagatgggacagaggaaagacaaactctgtctctggctgtaaaatgtcctcgaagaatttttgccgctccgaaaggcggagctgctggcgctccagggcggcccgaggatttgggtccatgtcagctccaggtgagggcgttgaggatgaaggacatcatggagagccggcctggaggggtggaaaagcccaggatcagtgacagactcgacgatcgaagtgtctgagcgtggcccggcctcaccggcgggctcccaaaacagcgctgcccgacaggaccatggaggagaggcgctcaa

SEQ ID NO: 153475 - DNA, 365 bp, Homo sapiens; identical to SEQ ID NO: 132893
  misc_feature (1)...(365): n = a,t,c or g

SEQ ID NO: 153476 - DNA, 452 bp, Homo sapiens
tacgctcagcttggcacgagggtcccggaactggcctctgtcacccactttactccaccactccccataaacaagtgccagcctgtctcatgttcaaacttaggaagttagtcccagcactaagagcccaaaagctggatagcaaaactggtgatactcaccaggtgagggcgttgaggatgaaggacatcatggagagccggcctggaggggtggaaaagcccaggatctgagggggaatcacaaatggaaatatactggagaagtgacttggcagagccccaggatctcagcaagcctcctaaggaacaagcattcttcccagagcacagaagataatacctccctacatctgtacggcagcctatttccaataggtgctttcatagacatccattatgggatttcatttgtttctcacagcaggtggaaagggattattctcattttac

SEQ ID NO: 153477 - DNA, 1872 bp, Homo sapiens
tgccttcactcttccttctgcgcatgtgctcagttcgctatccggctgcttgtacctggttcaggaggttcaggcagaggttgcacccactacgcctgcgcaacctcagccccgcccctccgctgctttccccggaaacgtttctttcctacgcagccgctcctgccgccgtggtcgctggagctttgcctctctaggccggcagcgcctctcctccatggtcctgtctgtcagcgctgttttgggagcccgccggtagaggccgggccacgctcagacacttggatcgccgagtctggcactgggcatggcgggtcagttccgcagctacgtgtgggacccgctgctgatcctgtcgcagatcgtcctcatgcagaccgtgtattacggctcgctgggcctgtggctggctgctggtggacgggctattgcgaatcagcccctcgctggaccagatgttcgacgccgagatcctgggcttttccaacccttccaaggccggctctccatgatgtccttcatcctcaacaccctcaacagtgcccatgggcttgctgtacttcatccggcgaggaaaagcagtgtctggatttcactgtcactgtccatttctttcacctccttgggctgctgggttctaacagctccccgttttccccttcgggcggctgaaccttggtgggcttgggtccaaagcccgttgttgcattgcactcattggctgtcatcggggagtacctgtgcatgcggacggagctcaaggagatacccctcaactcagcccctaaatccaatgtctagaatcaggccctttggacatcctgctgacacttgggccccttaacaccttgggctgctcagaccctccagattgaggtccagcccagatctgagaggaaccctggaaatgtgaagtctctgttggtgtgggagagatagtgagggcctgtcaaagaaggcaggtagcagtcagcatgacagctgcaagaatgacctctgtctgttgaagccttggtatctgagaggtcaggaaggggacctctttgagggtaataacataattggaaccatgccactcttgagccccaaatacctgtcaccagcctgttgttttaaaaaaaaaaaaaaatccagggatatttgatgggagcaaaccacttctttagtcatctgtcttacctccctgggaccgcttgtaacttttgcagtgttgccgaatcacagcagttacctttgcaatgttgccgaatcacagcagttctgttggagaaacgcttggtttccggatccagagccacagaaagaaatgtaggtgtgaagtattagggctgctgtcaggggagagggatgggcagatgggagggcatcaaggcacaagggaaaatggcacaacctgtgcccctgtttattacacacgtttcatgttgcaccccaaggaacctatgactttctttccagtttcctttttaccagggtccccatcctgctgccagctctcaacattgccaggccattagggcccagagaagaatccccagtgttggtccaaagccttaaccatcattaagacactgcctgtcttctaggaatgaccaggcaccccagctccccactggactcacaatatttttttttcctgcctttatttagaattctttggcgggaagggtatgatgggttcccagagacaagaagcccaaccttctggcctgggctgtgctgatagtgctgagggagataggaatttgctgctaagatttttctttggggtggagtttcctcctgtgaggggcttgcagctatccttcctgtgtatacgaaatacagtattttccatggttctgcctgcacttactttgtaatgccacggcg

SEQ ID NO: 153478 - DNA, 528 bp, Homo sapiens
atgaggagacaggactgtccaaatccaatgaagaagataagaagctccagtcctgtgcagcaagaacgagtgtccagtctatatttccagtctgccaggggaggtcttggagtagatgtctccgccctcgggactgtcactcacgtgtctccgtcctcatctgcacgggtggccatggcgatgtcagcagaaagggggtgttccatggggcacatcatggggtataggggtgtaggcaggttcaccagaggaaacggggaccatgcccgagtggggtacaaaggcaaccctcctgaagtgtccatctccggctatgatgacaactggtacctcggccgtactgatgccaccctgagctgtgacgtccgcagcaacccagagcccacgggctatgactggagcacgacctcaggcaccttcccgacctccgcagtgcccagggctcccagctggtcatccacgcagtggacagtctgttcaatacaccttcgtctgcacatcaccaatgccgtggatgggccgcgctga

SEQ ID NO: 153479 - DNA, 609 bp, Homo sapiens
attcagagtgcccctccggcctcgccatgaggttcttcctgtcgctcccggtccctggtggtggttctgtcgatcgtcttggaaggcccagccccagccccaggggacccccagacgtctcccagtgccttggataagctgaaggagtttggaaacacactggaggacaaggctcgggaactcatcagccgcatcaaacagagtgaactttctgccaagatgcgggtgcccctccggcctcgccatgaggctcttcctgtcgctcccggtcctggtggtggttctgtcgatcgtcttggaaggcccagccccagcctagggggctccagaagtctccaacccctttgatggcctggaggagttaggaaagaccctggaggactacactcgggaattcatcaaccgcatcacacagagtgaacttcctgccaagatgtgggattggttttcagagacatttcggaaagtgaaggagaaactcaagactgactcatgaggacctgaagggtgacatcccaggaggggcctctgaaatttccaacaccccagcgcctgtactgaggacgccctccatgtgtgtccaatgtggtcacacgcccaggtgtgacc

SEQ ID NO: 153480 - DNA, 1913 bp, Homo sapiens
  misc_feature (1)...(1913): n = a,t,c or g
gagcagaacagggaggctagagcgcagcgggaaccggcccggagccggagccggagccccacaggcacctactaaaccgcccagccgatcggcccccacagagtggcccgcgggcctccggccgggcccagtcccctcccgggccctccatggcccgggccgctgccctcctgccgtcgagatcgccgccgacgccgctgctgtggccgctgctgctgctgctgctcctggaaaccggagcccaggatgtgcgagttcaagtgctacccgaggtgcgaggccagctcgggggcaccgtggagctgccgtgccacctgctgccacctgttcctggactgtacatctccctggtgacctggcagcgcccagatgcacctgcgaaccaccagaatgtggccgccttccaccctaagatgggtcccagcttccccagcccgaagcctggcagcgagcggctgtccttcgtctctgccaagcagagcactgggcaagacacagaggcagagctccaggacgccacgctggccctccacgggctcacggtggaggacgagggcaactacacttgcgagtttgccaccttccccaaggggtccgtccgagggatgacctggctcagagtcatagccaagcccaagaaccaagctgaggcccagaaggtcacgttcagccaggaccctacgacagtggccctctgcatctccaaagagggccgcccacctgcccggatctcctggctctcatccctggactgggaagccaaagagactcaggtgtcagggaccctggccggaactgtcactgtcaccagccgcttcaccttggtgccctcgggccgagcagatggtgtcacggtcacctgcaaagtggagcatgagagcttcgaggaaccagccctgatacctgtgaccctctctgtacgctaccctcctgaagtgtccatctccggctatgatgacaactggtacctcggccgtactgatgccaccctgagctgtgacgtccgcagcaacccagagcccacgggctatgactggagcacgacctcaggcaccttcccgacctccgcagtggcccagggctcccagcttgttcattcacgcagttgacagtcttgttcaataccaccttcgtctgcacaagtcaaccaaatccgtgggcattggcccgcgctgagcaggtcatcttttgtccgagaaaccccccaagccntcgccccgagatgtgggcccgctggtgtggggggccgtgggggggacactgctggtgctgctgcttctggctggggggtccttggccttcatccatgcatgagggtgaggaggaggaggaagagccctggaggagcaggaggaggagccagtggcgacgggggattctacgatccgaaagcttcaggtgttgggaaatggggaccccgtcttctggacaccagtagtccctggtcccatggaaccagatggcaaggatgaggaggaggaggaggaggaagagaaggcagagaaaggcctcatgttgcctccacccccagcacttcgaggatgacatggagtcccagctggacggctccctcatctcacggcgggcagtttatgtgtgacctggacacagacagagacagagccagggccgggccctcccgcccccgacctgaccacgccggcctagggttccagactggttggacttgttcgtctggacgacactggagtggaacactgcctcccactttcttgggacttggagggaggtggaacggcacactggacttcttcccgtctctaggggtgcatggggagcccggggagctgagtagtggggatccagagaggacccccgcccccagagacttggttttggctccagccttcccctggccccgtgacactcaggagttaataaatgccttggag

SEQ ID NO: 153481 - DNA, 2051 bp, Homo sapiens
  misc_feature (1)...(2051): n = a,t,c or g
atggcccgggccgctgccctcctgccgtcgagatcgccgccgacgccgctgctgtggccgctgctgctgctgctgctcctggaaaccggagcccaggatgtgcgagttcaagtgctacccgaggtgcgaggccagctcgggggcaccgtggagctgccgtgccacctgctgccacctgttcctggactgtacatctccctggtgacctggcagcgcccagatgcacctgcgaaccaccagaatgtggccgccttccaccctaagatgggtcccagcttccccagcccgaagcctggcagcgagcggctgtccttcgtctctgccaagcagagcactgggcaagacacagaggcagagctccaggacgccacgctggccctccacgggctcacggtggaggacgagggcaactacacttgcgagtttgccaccttccccaaggggtccgtccgagggatgacgctggctcagagtcatagccaagcccaagaaccaagctgaggcccagaaggtcacgttcagccaggaccctacgacagtggccctctgcatatccaaagagggccgcccacctgcccggatctcctggctctcatccctggactgggaagccaaagagactcaggtgtcagggaccctggccggaactgtcactgtcaccagccgcttcaccttggtgccctcgggccgagcagatggtgtcacggtcacctgcaaagtggagcatgagagcttcaaggaaccagccctgatacctgtgaccctctctgtacgctaccctcctgaagtggccatctccggctatgatgacaactgggacctcggccgtactgatgccaccctgagctgtgacgtccgcagcaacccagagcccacgggctatgactggagcacgacctcagggcaccttcccgacctccgcagtggcccagggctcccagctggtcatccacgcagtggacagtctgttcaataccaccttcgtctgcacagtcaccaatgccgtgggcatgggccgcgctgagcaggtcatctgtgtccgagagacccccaacacagcaggcgcagggcccacaggcggcatcatcgggggcatcatcgccgccatcattgctactgctgtggctgccacgggcatccttatctgccggcagcagcggaaggagcagacgctgcagggggcagaggaggacgaagacctggagggacctccctcctacaagccaccgaccccaaaagcgaagctggaggcacaggagatgccgctcccatctcttcactctgggggcctgagagcacagcccactcaagaccccctactttgatgctggcgcctcatgcactgagcaggaaatgcctcgataccatgagctgcccaccttggaagaacggtcaggacccttgcaccctggagccacaagcctggggtcccccatcccggtgcctccagggccacctgctgtggaagacgtttccctggatctagaggatgaggagggggaggaggaggaagagtatctggacaccgatcaaccccatctatgatgctctgtcctatagcagcccctctgattcctaccagggcaaaggctttgtcatgtcccgggccatgtatgtgtgagctgccatgcgcctggcgtctcacatctcacctgttgatcccttagctttcttgccaaggatctagtgccccctgacctctggccaggccactgtcagttaacacatatgcattccatttgtaaatgtctaccttggtggctccactatgacccctaacccatgagcccagagaaattcaccgtgataatggaatcctgggcaaccttatcttcatgagggcagggaggtggggaaggtgcttctgnacaacctctggatcccaagggactcctctcccagactggtggaccttagaccatacctctcaaacccccaatggcntcgaacttcccccaaaatcncaaagaaagaccctagaacttataatttggncttcagggtagtaaattcccaatagggctgctggaagtggggngctgaagggntcc

SEQ ID NO: 153482 - DNA, 2710 bp, Homo sapiens
atgcctggccaatgcagagtgccctccgccttccatgaggctcttcctgtcgctcccggtcctggtggtggttctgtcgatcgtcttggaaggctactggtcagacgaggaaagcagcccagagcactgaccacaggggaaaacatctccgggcatactgggagcagctgctgggggccactggtcaggctgcgggggtcactggttggactgggagagccagtgcaggccactcggacggcacgcttggggccattagttacactgggagaggccatcgcaggccacaggttgcagtggggtcctctggttaaaatcgacgatgccagcccaggctgctggtccagtggggcgagtgccaaggccctggtcagaataacgaggagaaggtccgcgattcctggtgagatcccagctcgggtcactggctacactggtcgatcaggccccccgctgcaggctggtcaccccgcagcggccgagctgcagcccgggctcagtctccccgccgccgtgaacatggagcccccggacgcaccggcccaggcgggggcccccggctgctgttgctcgcagtcctgctggcggcgcacccaggagcccaggatgtgcgagttcaagtgctacccgaggtgcgaggccagctcgggggcaccgtggagctgccgtgccacctgctgccacctgttcctggactgtacatctccctggtgacctggcagcgcccagatgcacctgcgaaccaccagaatgtggccgccttccaccctaagatgggtcccagcttccccagcccgaagcctggcagcgagcggctgtccttcgtctctgccaagcagagcactgggcaagacacagaggcagagctccaggacgccacgctggccctccacgggctcacggtggaggacgagggcaactacacttgcgagtttgccaccttccccaaggggtccgtccgagggatgacctggctcagagtcatagccaagcccaagaaccaagctgaggcccagaaggtcacgttcagccaggaccctacgacagtggccctctgcatctccaaagagggccgcccacctgcccggatctcctggctctcatccctggactgggaagccaaagagactcaggtgtcagggaccctggccggaactgtcactgtcaccagccgcttcaccttggtgccctcgggccgagcagatggtgtcacggtcacctgcaaagtggagcatgagagcttcgaggaaccagccctgatacctgtgaccctctctgtacgctacccatccatgaagtgtccatctccggctatgatgacaacttggtaccgtcggccagtactgatgccacccgtgagcctgtgacgtccgcagcaacccagagcccacgggctattgactggagcacgacctcaggcaccttcccgacctccgcagtggcccagggctcccaagctggtcatccacgcagtgaaccagtcttgttcaataccaccttcgtcttgcacagtcaccaatgcccgtgggcattggggccggcgctgaagcaggtcatctttgtccgagaaacccccagggcctcgccccgagatgtgggcccgctggtgtggggggccgtgggggggacactgctggtgctgctgcttctggctggggggtccttggccttcatcctgctgagggtgaggaggaggaggaagagccctggaggagcaggaggaggagccagtggcgacgggggattctacgatccgaaagctcaggtgttgggaaatggggaccccgtcttctggacaccagtagtccctggtcccatggaaccagatggcaaggatgaggaggaggaggaggaggaagagaaggcagagaaaggcctcatgttgcctccacccccagcactcgaggatgacatggagtcccagctggacggctccctcatctcacggcgggcagtttataccccaccaagccctgtgccaggcagtgctggggctgcagctgtggcctgcacagacccagtgccgtcctccggtgtgcacggccataatgaccacaagaatagcagcagtatgtttaggatgaaggcccttgctcagttgtcaccttacaagacccccaacacagcaggcgcaggggccacaggcggcatcatcgggggcatcatcgccgccatcattgctactgctgtggctgccacgggcatccttatctgccggcagcagcggaaggagcagacgctgcagggggcagaggaggacgaagacctggagggacctccctcctacaagccaccaaccccaaaagcgaagctggaggcacaggagatgccctcccagctcttcactctgggggcctcggagcacagcccactcaagaccccctactttgatgctggcgcctcatgcactgagcaggtaggagctcatgggaagacaaaggaaatgcctcgataccatgagctgcccaccttggaagaacggtcaggacccttgcaccctggagccacaagcctggggtcccccatcccggtgcctccagggccacctgctgtggaagacgtttccctggatctagaggatgaggagggggaggaggaggaagagtatctggacaagatcaaccccatctatgatgctctgtcctatagcagcccctctgattcctaccagggcaaaggctttgtcatgtcccgggccatgtatgtgtga

SEQ ID NO: 153483 - DNA, 467 bp, Homo sapiens
  misc_feature (1)...(467): n = a,t,c or g
tgtgcgtggnnntcttgtttgtcgtgggcagaggaacaaccaggaacttgggctcagtctccaccccacagtttggtggatccgtcccggataagacccgctgtctggccctgagtagggtgtgacctccgcagccgcagaggaggagcgcagcccggcctcggcaccgatgaagacgccattattagcgtccttgcctaccgcaacaccgcccagcgccaggagatcaggacagcctacaagagcaccatcggcagggacttgatagacgacctgaagtcagaactgagtggcaacttcgagcaggtgattgtggggatgatgatgcccacggtgctgtatgacgtgcaagagctgcgaagggccatgaagggagccggcactgatgagggctgcctaattgagatcctggcctcccggacccctgaggagatccggcgcataagccaaacctaccagcagcaatc

SEQ ID NO: 153484 - DNA, 431 bp, Homo sapiens
  misc_feature (1)...(431): n = a,t,c or g
aatgacgactaccggnttggaannaccgggtcgacgatttcgtcgaggcctgcctctccgatagctcctgtttttgtcgtcccggcccggggccccaggtgcgcttgccctagagagggattttccggtctcgtgggcagaggaacaaccaggaacttgggctcagtctccaccccacagtggggcggatccgtcccggataagacccgctgtctggccctgagtagggtgtgacctccgcagccgcagaggaggagcgcagcccggcctcgaagaacttctgcttgggtggctgaactctgatcttgacctagagtcatggccatggcaccgatgaagacgccattattagcgtccttgcctaccgcaacaccgcccagcgccaggagatcaggacagcctacaagagcaccatcggcagggacttgata

SEQ ID NO: 153485 - DNA, 442 bp, Homo sapiens
  misc_feature (1)...(442): n = a,t,c or g
ngcgccgcncntcggaagaacttctgcttgggtggctgaactctgatcttgacctagagtcatggccatggaaccaaaggaggtactgtcaaagctgcttcaggattcaatgccatggaagatgcccagaccctgaggaaggccatgaaagggctcggcaccgatgaagacgccattattagcgtccttgcctaccgcaacaccgcccagcgccaggagatcaggacagcctacaagagcaccatcggcagggacttgatagacgacctgaagtcagaactgagtggcaacttcgagcagggagccggcactgatgagggctgcctaattgagatcctggcctcccggacccctgaggagatccggcgcataagccaaaccttaccagcagcaatatggacggagcctttgaagatgacattcgctctgacacatcgttcat

SEQ ID NO: 153486 - DNA, 2230 bp, Homo sapiens
cggtctcgtgggcagaggaacaaccaggaacttgggctcagtctccaccccacagtggggcggatccgtcccggataagacccgctgtctggccctgagtagggtgtgacctccgcagccgcaaaggaggagcgcagcccggcctcgaataacttctgcttgggtggctgaaactctgatcttgacctagagacatggccatggcaaccataggaggtactgtcaaagctgcttcaggattcaatgccatggaagatgcccacaccctgaggaaggccatgaaagggctcggcaccgatgaaaacgccattattagcgtccttgcctaccgcaacaccgcccagcgcctggagatcaggacagcctacaagagcaccatcggcaggagacttgatagacgacctgaagtcagaactcgagtggcaacttccgagcaggtgattgtggggatagaagatgcccacttagcgtgatgacgtagcaagagctgcgaagggccatgaagggagccggcacttgatgagggcttgcctaattgagatcctggcctcccggacccctgaggagatccggcgcataagccaaacctaccagcagcaatatggacggagccttgaagatgacattcgctcttgacacatcgttcatggttcaagcgagtgctggtggtctctgtcagctggtgggagggatgaaggaaattatctggacgatgctctcgtgagacaggatgcccaggacctgtatgaggctggagagaagaaatgggggacagatgaggtgaaatttctaaactgttctctgttccccggaaccgaaaatcaccctgttgcatgtgtttgatgaataccaaaaggatattcacagaaggattattgaaccagaagtattaaattctgaaacatctggtatcttttggaagattgctctgcttgggctaataggtaaagtgcatgaggaacaaatctgcatattttgctgaaaagctcctataaatccgatgaagggcttgggcacccgatgataacacccctcatcagagtgatggtttcctcgagccagaaaatggaccatgttggatatcccggcccacacttccaagagactcctatggaaaagtcccctgtactccgttcatcaagaacagggtagccacatctggagacttacaggaaatgtactgcttgttctctgtgggagggagatgattaaaataaaaatcccaggaagggacagggagggttcttcaacacttttgaattttttttaactttcatttttcttacactggctatttatcctttatcttcaggattgcttattttccccttttaaaacggcctacagctgcctcctaggaatatagactgtctgtattattattcacctataattaggtccattatggatgctttaaagctgtacttgcatttcaaagctcataagatataaatggagcattttaaagtagaaataaatatgtattccatgttttaaaaagattacttctacctttgtgtttcacagacattgaatatattaaattattcccatattttctttttcagtgaaaaattttttaaatgggaaggactgttctaaaatcacttttttcccctaatccaatttttagaaggtggctagtagtttcttcatttgaaattgtaagcatcccggtcagtaggactgcccatccgagtttccaatatttcataggtcaaagccttgaaagcattctacaaaatctcttttttttaggttttgtccataggcatcagttgatcccgtactaagtttttcatggggaggacttccttcatgcacatcttatgttgaaacaactttctgtagtcaaagtataccaaaaccaatttatctgaactaaattctaaagtagggttatacaacccattatacatctggttccaaaacataaaggctgaacatcccataattattatagttaatgtcttaatcccagcttgcaagtgaatggaaaaaaaaataagctttcaaactaggtattcagagcattacatcattcccagaatacctagtttgatataaagaaaactttttttgtgctaaaaatactttttaaaatcaattttgttgattgtaggtaatttcaatttgcactgtgcctttcaactccagaaacattctgaagatgtacttggatttaattaaaaagttcactttgtaaaaaaaaaaaaaaagggcggccgct

SEQ ID NO: 153487 - DNA, 4611 bp, Homo sapiens; identical to SEQ ID NO: 136743

SEQ ID NO: 153488 - DNA, 465 bp, Homo sapiens; identical to SEQ ID NO: 136744

SEQ ID NO: 153489 - DNA, 501 bp, Homo sapiens
  misc_feature (1)...(501): n = a,t,c or g
gctccatagggcntgatgcactccagcgggccccgtgggccgggcaccggcagctcatcctggttctggagggggagctctacctcattcctttcgcccctcctgaagggaagctcctccaatgagtacctctacgagcgcttcggcctccttgctgtcccttccatccgctccctcagcgtgcagtccaaggtaaggctcacacacatggtggggggccgggggcttgttttcgggtcacgaggcaccgtctatctggtcggactgggctgtgttacgaaggcatagctgtgatctcctcaaaagtgttgattttatgatttgcacgcaggtagcgtgactttagagtaggtctgtccaaaagtggggcacggccctcatgacccctggccattctttgctgccttgggaagccacagtttgtgtcatgtctaagtttctttgctgtgacatcagggtacggagctgctctgaggaattccagcacactgcctatggtgc

SEQ ID NO: 153490 - DNA, 1545 bp, Homo sapiens; identical to SEQ ID NO: 136745

SEQ ID NO: 153491 - DNA, 4228 bp, Homo sapiens; identical to SEQ ID NO: 136746

SEQ ID NO: 153492 - DNA, 7245 bp, Homo sapiens
  misc_feature (1)...(7245): n = a,t,c or g
cgctcttgatttcccgggccgacgatttcgtccaacagccagctttatatgggcatcagtcttgtttgaaacaatccgacatgaggcagaggtgagcacggactacaaactctccctctttgacctgcagacatcatcctaccaggccttgcagcgggtgctcgtcagcctaggccatcatgatgaagccctggctgtggcagaaaggggacggacaagggcatttgctgatcttctggtggaacgacaaacaggacaacaagactccgacccctactccccagtcactattgatcagatcttagagatggtaaatggccagaggggactagtgctttactattccctggctgcaggctatctgtatagctggctgctggctcctggggcaggaattgtgaagtttcatgaacactacctgggtgagaacacagtggaaaactcaagtgacttccaggccagcagcagtgtaacccttccaacagcaaccggctcagccctggagcagcacattgccagtgtccgggaggccctgggggtggagtctcactactcaagggcctgtgccagcagtgagacagagagtgaagcgggagacatcatggaccagcaatttgaagagatgaacaacaaactcaactcggtcactgaccccactggctttctgcggatggttcgccgcaataacctgtttaacaggagctgccagagcatgacgagcctgttcagtaacactgtgtcaccgacccaggacgggacctcctctcttcccaggaggcagagctcgtttgccaagcccccgctccgtgccctgtatgacctgctcatcgcgcccatggaagggggcctgatgcactccagcggccccgtgggccggcaccggcagctcatcctggttctggagggggagctctacctcattcctttcgccctcctgaagggaagctcctccaatgagtacctctacgagcgcttcggcctccttgctgtcccttccatccgctccctcagcgtgcagtccaagtctcacttacggaagaacccgcccacatactccagctccacatccatggcggctgtcatcggcaaccccaagctaccatcggccgtgatggacaggtggctgtgggggcccatgccatcggccgaggaagaggcctacatggtgtccgagctgctgggctgccagcccctagtgggcagtgtggccaccaaggagagggtcatgagtgccctgacccaggctgaatgcgtccactttgccacccacatctcctggaagctgtcggccttggtcctcacgcccagcatggacggcaaccctgccagcagcaagagctccttcggccacccctacacgatccctgagtccttgcgggtgcaggacgatgccagtgatggggagagcatctcggactgcccgcccctgcaggagctgctgcttactgccgccgacgtcctggaccttgcagctgccctgtgaaggctggtggtggttgggctcttccagggagtccaccagcaaattcacagccgacggggtcttcgcgttgacaagggctttcttggctgcgggcgctcagtgtgtcctcgggtctctgtggcctgtgccagtggctgcttttaagatgttcatccatgccttctactcatccctgctgaacggcctgaaagccagcgccgccctgggggaggccatgaaggtggtgcagagcagcaaggccttctcgcacccctccaactgggcagggttcatgctcatcgggagtgacgttaagctgaacagcccctcatcactcatcggccaggccctcacagagatcctgcagcacccggagcgtgcgcgggacgccctgcgagtgctgctgcacctggtggagaaatccctgcagcgcatccagaatgggcagcgcaatgccatgtacacatcccagcagagtgtggagaacaaagtgggcggcatccctggctggcaggccctcctcaccgctgtgggcttccggctggaccccccaaccagtggcctgccagcggctgtcttcttcccaacctccgacccgggcgaccggctccagcagtgcagcagcacactccagtccctgctgggtctgcccaatcctgccctccaagccctttgcaaactcatcactgcctccgagacgggcgagcagctcatcagccgggctgttaaaaatatggttggaatgctccaccaggtgctggttcagctccaggctggcgagaaggagcaggacttggcatcagctcccattcaggtctccatcagcgtccagctgtggcggctcccgggatgccacgagttcctggcagctctaggttttgatctctgtgaagttggtcaggaggaagtaatcctgaaaaccgggaagcaagctaatcgacggactgtgcacttcgcgctccagtccctgctgtctctgtttgattctactgagctacccaagcgcctcagccttgacagctcctcctccctcgagtctcttgcttcttgcttcagtctgtttccaacgccctgcccttgggttaccagcaaccccccttctctcccaccggtgcggacaggaatngcctcagatgccatctctgtgtacagtctgagctccattgcctcctcaatgagctttgtctccaaacccgagggtggatcagagggtggaggccccggaggacggcaggaccatgaccggtccaagaacgcttacctgcagagatccaccctgcctaggagccagctgcctccccagacccgccctgcaggcaacaaagatgaagaagaatatgaagggttttctatcatcagtaacgagcccttggcgacctaccaagaaaaccgaaacacatgcttctcaccagaccacaaacaaccccaacctgggacagccggaggcatgagagtctcggtgagctccaaagggagcatcagcactccaaattctccagtgaaaatgactctgattcccagccccaactcacccttccaaaaggtgggaaaactagcaagctcagatacaggagaatcagaccagtctagcacagaaacggacagtaccgtgaaatcccaagaagaaagcaacccaaaactggatccacaagagttagcccagaaaattctggaggagacacagagtcatctcattgcggtggagcgtcttcagaggagcggcggccaggtgagcaagagtaataaccctgaagacggcgttcaggcgcccagcagcactgctgtcttcagagcgtcagaaaccagtgcgttcagcaggcctgttctctcccatcagaagagtcagccatcaccagtcactgttaaaccaaagcccccagccaggagctcctccctgcccaaggtgagttccggatatagcagccccaccacctcagagatgtccatcaaagacagcccgagccagcacagtggccggccatcgcccggctgcgactcacagacttcccagctggaccagcctctctttaaactgaagtaccccagctctccttacagcgctcacatttccaaatcaccaaggaacatgtccccaagctccggccaccagtctcctgctggcagtgcaccctccccagctctctcctactcctcagctggatctgctcgctcaagtccagcagacgctcccgacatagacaaactgaaaatggcagccattgatgaaaaggtgcaggctgtccataacctgaagatgttctggcagagcacaccccagcattccacagggccaatgaagatcttccggggggctcctggcacgatgacttccaaaagggatgtcctcagtctgttgaatttgtcaccacggcacaataagaaggaggagggagtggataagcttgaactgaaggagctgtccctgcagcagcatgacggagctccaccgaaagcccctcccaacggacactgggcgcaccgagaccacctcgctgggctcactgccgctgcccgccggccctcccgccacagcccccgcgcgccctttgaggcttccttctgggaaatggctacaagttcctgtctccagggaagattttttcccttctttccaaatgcttaaagcatcttttattacccattgattttgagcaggcttgcagatgggggcctggcgtttgcttcagcccttccctgagtgcattcccctcacagccaccagcaccctcatgatgctgtgctctgcaggcgaggggcaccaccacgtccaaaggctgccacacacactggtggcttttctgggccacattcaccaaaagccaggacttctgtggggctggtacaggaggctcatggaatttcctacacacttcaccaaatgtttgtttacctttgaactccctgcttctcatctttgatatgattcttcaccaggattttgtacaaaaatgatccatggttcctggggtggggagaggaaagggagccacatattttgctaagaggtatatatgcagtaccttttataccacagaaatacaaatagagctttttcctaaggctttcggttgcctggttgggggtgggatatatgaaatttcagttgaattctacaggaaagtgttatattagcccaaaaacagaaaaatggtttttaaaatgccaatgatttgtaattaaattgtagcaattttggtctcatgatagtgtaatatctcagcaacaatgcaataattcacattgaaacagcgcttccattctgaactcctgctctgcaaatgtcttttgggtcccgctgtcaaccaaacttgaattttcttaaaaaaaaaattatgtaactcttatccaggcattttagaactatgcaattgtgatttaaaatgcaactttgtgcttttaaaacattattgaccttttttgtatatggataaacaacttttggttttattatcaatagtactttgcatttatagctattatttttaaaagctcaaaaagttttttaaaatgtcaaattttgaatagtcatcaataagtaattatcaagtttggaaggaaaggttgaaatgactccgtttccttataagcaaaaaaaaaaaaaaaaaaaaaaaaaaaaaaaaaaaaatttccatggctaactagatttaaccagaatcccgccttccaggctcctgttcccttttattagctgctgaattttattcccttttcccaactccaggtccctcagttgtcttatatctaaatcctttgccaggtccccacaatcccagcacctgcctctgtgagctgcccccaggccctcaccttggccctggccagcctcctgtgctcctgctgtctgaaggactggcccctcccccactgctgaagccacacgtacagatcctaagcaacagggccttttgctgggacgtatgcctggattatggccaaccgggaagagagagatgtatcttaaaaagtggaggtggacttctcctacagctctgacggtaacttaaattgttgccagcttgaggcaagacaagggaatcatctagttaggggtaaccattaatttattttataaagaaaggaaatgctgaaagtcgtattagtactgagtttagttggagaatttagataagtaagtatcttttaggtaattctaaaattaaaatcctacccacctcactacagggttcctcatgaaggtgggcggccacctggcctgggccaccagcagcacatggagcagacctgaggggcctggcagggggcactgacctcaggatccccaggtgggggttttaaccatgggtgggatctcagcttctgcgcatacactgacaatctcacctgttcctcagtgtactcctctgaaaagaagaaaggataatatttatccaatctgtgttctcctgagctccatcctaggggtttttaatttaaccaacagccatgttgacaaaagccaacaataagcatgtcttattctagccctgatcccaacactgaaagcgaagtactttataaagaagccagcaattatgagggtttctttatgttagtaggggaaaaaatggtaataaaagtaccagtgtagcaagtgaagaccaaatttatagcactgtgcattagatagcaaaatcaggttcttaacaatgaaaagtaaacctcaagtttctaaatccatatgcagatggttaggctgtccctctcttagcaaatctctcagcctccttctttcccaagtgccaaggatccctggagtaaagctctggggtctgtgctctctttctgtgaggggaaggctgcggccctatttgcccctctctagcaaacacccccaccaccctgccgcttcctgtggttattgagccagctaggagttactcatggactctaacctggttttagtcccatgtacatcgttgttttaggtttcatactgaagagccaatggtttatgtggttttattctgtcttaaatataagtttcaaggaagggaaaacaaaagtgataaaatgatagaacagtctagaggccactgtaaagtcaccgccactttacgtgtatgtcagtcttggtgttcttgtatgagtaaaatggatgtaaaatcataaaatcacagtgaatgtttcaggctacactggaaaaagtatgcacttagaattaaaggaaattgtataattcaccaagatttctttgtgtagatcaggggttggcaactatgacccacaggctaagactggtcagcggtctggtttttcacagccatgagctaagttacctttttaaagggttatataagtaattacatcatatttttgattttgcctttggcccacaccacataaaatattcaatacctggccnnnnnnnnnnnnggaaaaaaaacccccctttgccccccagaaaaaaggcccgggggggaatttgggttaatggaacccttttcttcgggggtaaaagaaattttccttgcctccacctttaaaaagggggggaaaaagggcccccccaaacagcgctgggaaaatttgggaattaaaaaaaaagggggggttcaacatgggggcccgggggggctcaaacctctgacctaaggggaacccccccccttggccccccaaaagggggggaaaaaagggggagccctgggcccaaccaaaaacggggctttaaaaaaattcgggggcccccggggtggggggagaaaaaggggaaacccgttgtttccccccccaagaaaacaccccgcncggtggggaaacacgcccgggcccgggggccccct

SEQ ID NO: 153493 - DNA, 793 bp, Homo sapiens
  misc_feature (1)...(793): n = a,t,c or g
ccactgaagcgctcagatggctgtaacgacggccgacccacgcgtccgcccacgcgtccggacacaactgtgttcactagcaacctcaaacagacacgcatggtgcatcttatctcctgaggagaagtctgccgttactgccctgtggggcaagggtgaacgtggatgaaagttggtggtaaggccctgggcaggctgctgggtggttctacccttggtacccaanaggttctttgaagtcctttggggatctgtccactcctggatgctgttaatgggcaaacccctaaggtgaaggtctcatggtcaagaaagtgcctcggtgccctttagtgatggccctggcttcacctgggacaaccttcaagggtcacctttgcccacactgaagtgagcttgcacttgttgacaagcttgcacgtgggatccctgaagaactttcaggcttcctgggggcaacgttgctggttttgttgttgcttgggcccattcacttttgggaaaagaatttcaaccccaccagtgcaagcttgcctaatcaagaaaattggttggcttggtgttggctaaatgcccttggccccacaagtatcacctaaagctcgcctttcttgctgtccaatttctatttaaaggtttcctttggtccctaaagaccaactactaaactggggggatattatgaagggccttgagcattttggattttgcctaataaaaaacatttattttcatcgcatacaagaataaaacaagcgcggccgattaagaggatacttcaggggcgcaagat

SEQ ID NO: 153494 - DNA, 790 bp, Homo sapiens
ccactgaagcgctcagatggctgtaacgacggccgacccacgcgtccgcccacgcgtccggacacaactgtgttcactagcatcgctcatacagacacgcatggtgcatctgactcctgtggagagagtctgccgttactgccctgtggggcaaggtgaacgtggatgaaagttggtggtaaggccctgggcaggctgctgggtggtctacccttgggacccagaggttctttgaagtcctttggggatctgtcccactccctgaagcctgttaagggcaaacccctaaggtgaaaggctccatggcaagaaaagtgcctcggtgccctttagtgatggccctggctcacctgggacaaccctcaagggcacctttgcccacactgaagtgagcttgcactgtgacaaagctgcaccgtggatccctgaagaacttcaggctccttgggcaacgtgcttggtctgttgttgctgggcccattcacttttgggaaaagaatttcaaccccaccagttgcaggcttgcctaatcaagaaaattggttggcttggtgttggctaaatgcccttgggccacaagtaatcacttaagcctcgctttccttgctggtccaatttccaattaaaaggtttcctttggttccctaaagaccaactactaaactggggggatattattgaaagggccttgagcatcttggattttgcctaataaaaaacatttattttcatcgcatacaagaataaaacaagcgcggccgattaagaggatacttcaggggcgcaagat

SEQ ID NO: 153495 - DNA, 1163 bp, Homo sapiens
ctttccgctcggctgttttcctgcgcaggagccgcaggggccggtaggccagcccatggcgcccaagccggaaatggccatgggtcttgaacgccccacttccaccaagggactggcaagcgggcggcgtggcccacgtggttcaacccagccggccccggaatattcctcaggaggtaaggccccggcaaagcccaaaggcgccgcagcatcgcccctgcgccccgcggtcgggttcccatccggcccaatcgtgcgctgcccccacgggttcgggtacccacacgaaaggttgcgcgccggcccccggcttccagccttgaggaagctcagggtggccggcattcacaaagaagggtggcccggacccatcggcattttctgtggatccgaggaagccggaccaagtcccacggagtccccttcagggcaaacgttcagcgtgttgaagaagtacgcctccaacttcatcctctttccccagagaagccctcgggcccccaagaagggagacaggtctggctgaagaactgaaactgggccaccccagcttgacgggaccgggtcatgcccgtccggaacgtctataagaaaggagaaagctcgagtcatcactgaggaagagaagaatttcaaagccttcgctagtctccgtatggcccgtgccaacgccccggctcttcggcatacgggccaaaaagagcccagggaagccgcagaacagggatgttgaaaagcccacaataaagccctgcctggggacttggaatcagtcgggcagtcatgctgggtctccacgtggtgtgtttcgtgggaacaactgggcctgggatggggcttcactgctgtgacttcctcctgccaggggatttggggctttcttgaaagacagtccaagccctggataatgcttaaccttctggtgttgaagccctgttggttgtttggttagtgactgatgtaaaacggttttcttgtggggggggtaccaaaggctgacttcagagtggacttgtgttttttctttttaaagaggcaaggttgggctggtgctcacagctgtaatcccagcactttgagattggctgggagttcaagaccagcctggccaacatgtcagaactactaaaaataaagaaatcagccatgaaaaaaaaaaaaaa

SEQ ID NO: 153496 - DNA, 3300 bp, Homo sapiens
  misc_feature (1)...(3300): n = a,t,c or g
atgaaactccttaagtccatactcttaaccattttgctcgatttctctctccacacctgtgcatccttggtgcccgctcttcagtggatactcttgttgttaataacagtactggtagtggaagggattgccgtggcccaaaaaacccaagatggacaaaatattggaatcaagcatattcctgcaacccagtgtggcatttgggttcgaaccagcaatggaggtcattttgcttcgccaaattatcctgactcatatccaccaaacaaggagtgtatctacattttggaagctgctccacgtcaaagaatagagttgacctttgatgaacattattatatagaaccatcatttgagtgtcggtttgatcacttggaagttcgagatgggccatttggtttctctcctcttatagatcgttactgtggcgtgaaaagccctccattaattagatcaacagggagattcatgtggattaagtttagttctgatgaagagcttgaaggactggggatttcggagcaaattattccatttattccagatccagactttacttacctagggaggtattttaaattcccatcccagattgtcagttcgagctctccgggagctggatggggatagtgccgctctagtcaggtagaacaagaggagaaaacaaaaccagggccaagcctttgattggcatctgggacctttaaagccattccaaaagcttaagatttatttgaggttcctagattatcaaatggagcactcaaatgaatgcaagagaaacttcgttgcagtctatgatggaagcagttctattgaaaacctgaaggccaagttttgcagcactgtggccaatgatgtaatgcttaaaacaggaattggagtgattcgaatgtgggcagatgaaggtagtcggcttagcaggtttcgaatgctctttacttcctttggtggagcctcccctgcacaagcagcactttccttttgccatagcaacatgtgcatcaataattctttagtctgtaatggtgtccaaaattgtgcatacccttgggatgaaaatcattgtaaagaaaagaaaaaagcaggagtatttgaacaaatcactaagactcatggaacaattattggcattacttcagggattgtcttggtccttctcattatttctattttagtacaagtgaaacagcctcgaaaaaaggtcatggcttgcaaaaccgcttttaataaaaccgggttccaagaagtgtttgatcctcctcattatgaactgttttcactaagggacaaagagatttctgcagacctggcagacttgtcggaagaattggacaactaccagaagatgcggcgctcctccaccgcctcccgctgcatccacgaccaccactgtgggtcgcaggcctccagcgtcaaacaaagcaggaccaacctcagttccatggaacttcctttccgaaatgactttgcacaaccacagccaatgaaaacatttaatagcaccttcaagaaaagtagttacactttcaaacagggacatgagtgccctgagcagggccctgggaaggaccgagtaatgggagggagatttccctgttgaaattttattgttcagggggcgagaagattctgcacaaggcttccatatccattgactttctaatcttctgctaatggtgatgtgaattcttagggtgtgtacggtacgcagcctcccagggcacccanacttgtttcccagcagcccaacccttttctcccatcacaactacgaagaccttgatttaccgttaacctattgtatggtgatgtttttaatctctcaggcagtctatatatgttaaaccaatcaagggaacttactctattcagtggaaacaattaatcatctctattgcttggtgtcatttatagggaagcactgcccagttcaaaggagcattagaaggaggtggttgggatgggagccagggctccagggctgcctcttcgtttttaggcaacaaggaaggactggctcttgactgataacagctctgtcaatattttgatgccacaataaacttgatttttctttacattccttttatttttcctttctctaaatttaatttgttttataagcctatcgttttaccatttcattttcttacataagtacaagtggttaatgtaccacatacttcagtataggcatttgttcttgagtgtgtcaaaatacagctagttactgtgccaattaagacccagttgtatttcacccatctgtttcttcttggctaatctctgtacttctgccttttaattactgggcccttattccttattttctgtgagaaataatagatgatatgatttattacctttcaattatatttttctcagttatactagaaaatttcataatcctgggatatatgtaccattgtcagctatgactaaaaatttgaaaaagataaaaatttctagcaagcctttgaagtttaccaagtatagtcacattcagtgacagcccattcattccagtaaagaatcatttcattcactttgggagaggcctataattacatttatttgcaatgtttctcttcgctagattgttacatagctcccattctgttggttttgcttacagcatatggtaaccaaggttagatgccagttaaaattccttagaaattgggatggagccctgagattggcctccctaaccggggacatgacatttttcccagctcctatcaagaataacaacctccccacttttttttaaaactgcacttttgacctttttttatgggtataaaaacaataatttaataaacataaaagctcattgtgttttttagacttttgatattatttgatactgtacaaactttattaaatcaagatgaaagacctacaggacagaatcctttccagtgttcacatcagtggcctttgtatgcaaatatgctgtgttggaacctggacgctataacttattgtaaagaaccttggaaatgtggaacataagctctttctttaccttttgttactgtatttagtttgtgataaatttttcactgtgtgatatttatgcctctaaatcactacacaaatcccatattaaaatatacattgtacctgaccctttaatcatgttatttatgccaccaaggttgtggatcttaaggtatgtatggaaaggaactcatttatcaaattgtaagtaatacagacatgccatttaaaagaggtaaattcttgttttctatattttgttagtaaattctcaatgaaataaaaaaaaaa

SEQ ID NO: 153497 - DNA, 426 bp, Homo sapiens
actgaaggtgatccacatggtacatgacattcttcctgttttcttcacaagacaaggatgatgtttaaatgggcatttgtttgcggaatgacttggagagttcctctctttcagccatcttttctcaaagactaaggctgggagatccttgttcatttgtaacatcaggaactgcttcttttcctccttctctcttctagaagactgtcaaggagcccgagtgagggaagcagaccaaccatggtcttggagaaaagaaaatagggtttccatcccttctttggtgttttccgccgtcggccgcaggcgcctcgtctcagataaagtggatccagccctgcggctccggagctccgcctctgcccgggtgctcaggcaaacgtagagcatagtcacggccgccgttgacgaaatcgtcgccccggg

SEQ ID NO: 153498 - DNA, 352 bp, Homo sapiens
tttttaaggttttaaattttgtttttaaagaggaaaaaaaatataacatcatggttacacagaggctctggagattccctgggttcacaatcctacttctgccatttactagctgtgcgatcttgaacaaatttctgagcttctctgagcctgtttcctcatctctgggagatccttgttcatttgtaacatcaggaactgcttcttttcctccttctctcttctagaagactgtcaaggagcccgagtgagggaagcagaccaaccatggtcttggagaaaagaaaatagggtttccatccccacagttgtctcagagcatggaggctgaaagtctgtgagggcaagagtg

SEQ ID NO: 153499 - DNA, 1733 bp, Homo sapiens
  misc_feature (1)...(1733): n = a,t,c or g
atgtcccgtgagcggcccccgggcaccgacattccccgcaacctgagcttcatcgccgcgctaacggagcgcgcctactaccgtagccagcggcccagcctcgaggaggagccggaggaggagccaggcgagggcgggacgcggttcggggcccgatcccgcgctcacgcaccgagtcggggccgccgggcccgatctgcaccagccggaggcggcggggcccgggcgccccgcagccgtagcccagacacccgcaagagagtgcgtttcgccgacgcactggggttggagctggctgtcgtgcgccgcttccgtcccggtgagctgccccgggtgccccgccacgtgcagatccaattgcagagggacgccctccgccacttcgcgccctgccagccccgcgcccgcggcctccaggaggcgcgcgccgccctggagccggccagcgagcccggcttcgccgcccgcttgctgacgcagcgcatctgcctggaacgcgccgaggcgggcccgctgggcgtggccgggagcgcgcgcgtggtggacctggcctacgagaagcgcgcgccagccgcctacgccggtccggccccgcccccgccgcgcgccgaccgcttcgccttccgcctgcccgcgccgccgattgggggcgccctgctcttcgccttgcgctaccgtgtgacaggtcacgagttctgggacaacaacggcggccgtgactatgctctacgtgggcccgagcacccgggcagtggcggagctccggagccgcagggctggatccactttatctgagacgaggcgcctgcggccgacggcggaaaacaccaaaggcacccgggggcggggcgacccgatgtggcggggaggagtaggagagaccaggattggcggganggtccaagggagtcaagccggggagggcgaaaaggactttcagcctccatgctctgagacaactgtggaagggatggaaaccctattttcttttctccaagaccatggttggtctgcttccctcactcgggctccttgacagtcttctagaagagagaaggaggaaaagaagcagttcctgatgttacaaatgaacaaggatctcccagccttagtctttgagaaaagatggctgaaagagaggaactctccaagtcattccgcaaacaaatgcccatttaaacatcatccttgtgcttgtgaagaaaacaggaagaatgtcatgtaccatgtggatcaccttcagttcaaagttgcagcaaagtgaagaaagaaactactggaagccaccccagcaatgcactgtttagtcatcaattaggagcccatgggaggataatagggagactgggtggaggctcagtgtgtaataatctcttgtctaatgtatgtgtgtcactgccatgttgtatgaacaatagtgagggctcacatttacttaacacttgtgtgcgcaaatctgggtttttcttcctttccagaactatgactcgatcataaaatctgttttgtttgcatgcatgcccaaaacaaccctgtaagtagaacattgtcattatctctgttttagagatgaggaaacaggctcagagaagctcagaaatttgttcaagatcgcacagctagtaaatggcagaagtaggattgtgaacccagggaatctccagagcctctgtgtaaccatgatgttacattttttttcctctttaaaaacaaaatttaaaaccttaaaaaaa

SEQ ID NO: 153500 - DNA, 2448 bp, Homo sapiens
  misc_feature (1)...(2448): n = a,t,c or g
tttcgtggcggaggcggtgccatgacgcgcctcgggggcggtcctcgggcgcgcaccgctctcttacactcgggcctcagaagtccgtgccagtgaccggaggcgacagcggcagcgagtgggtccttgtgagctagaagaatcctgcaaaatttttctctctatccatctggcgaagacttgaagggatacaaagtaattcaggctcaaactgctttttctgcaaaccctgccaatccagcaattttgacagaagctttctgctcctatccctcacgatggaaatctctatcccagactgtatccagagtctctctcaatacatggggctgagtttaaatgaagaagaaataccgtgcaaatgtggccgtggtttctggtgcaccacttcaggggcagttggtaggcaagaccttccagtataaactatatgggtgggctcctgttaactgggtaattgatgttgggaattcgtaggagcaggaaatttaaggcaagggattccgtgaagtcattttgtgtaaggatcaagatgggaaaaattggactccaggcttaaatccatagataatgggtatatttgttcagctagtccaggctaattcctccagcctcattgggttggtctgagaatttggggaccaagtacttcagatcaatggtgaaaactgtgcaggatgggagctctgataaagcgcccaggtggtccaacaggcctttttgagagaagattaccatgaccattcgtgacaggccctttgaacggacgattaccatgcataaggatagcactggacatgttggttttatctttaaaaatggaaaaataacatccatagtgaaagatagctctgcagccagaaatggtcttcttcacgggacctaacctctgtggaaattcaatgggacagaatgtcattggattgaaggactctcaaattgcagacatactgtcaacattctgggactgtaggtactattacaatcatgcctgcttttatctttgaacatattattaagcggatggcaccaagcattatggaaaagcctaatgggaccacaccattcctgaggtttaaaattcacgggcaccatgggaaatgtaggctggaacgtctccagtttccttctttgggccaacttctgtattatgcacgtgaagccttcccggaggccagcgagcatatgctgcatgaggacctttctatcttacattatggctgggaatcttactctttcatctgataccttgttcagatttcaaaatagtcgtacgccttatcctggttttacagaggtgaaactttcaagagatttactgactttactagaatagtttctctactggaaacctgatgcttttataagccattgtgactaggacgactgttacaggcttagctttgagtgaaaaccagtcacctttctccctaggtaatgagtagtgctggttcatattactttaggtcctatagcatacttgcatctttaacatgctatcatagtacatttagaatgattgcctttgatttttttttttaaattctgtgtgtgtgtgtgtaaaatgccaattaagaacactggtttcattccatgtaaagcatttaaacagtggtatgtaaggtttccaagagattggtgatggattccttaaaattttaactacccttcacttaatatgcctgaactgtcgccctaaactatggttaagcatctagactaaaaggcccaaaatttaattagtgctgccctttctaaaaaaccccaaaatgtagttcccctattaacctgaaatgtaccactagccccagaaccagtttaatggtacttactgagctaatagcatagctggcttagttgtttttgagattttttagtcaacacataataggaaacttcctttcttctaaaagttgcccagtgcccacttttaaggaagtgaatcacccatatgtgatgtaaaagttattacacttaaacaggataaacttttgacccccccttttgttcatttgtgggattaaagtggtaaaaaacttaattttgggcatttggactcttaagattatgtaacccaggctactttgggatggtcttagaatattgttctgataacttgttccttttcctgactcctccttgcaaacaaaatgatagttgacactttatcctgatttttttcttctttttggtttatggctattctaattaaatatgtataaataaagttacattttagtctgtcaaaagcaaaaacaaaaaatagcaccgataacaaaaaganggggggggccccttttaaaaatattttgggggggccaaaatttacnnnnnnnnnnacaaattannnnnnnnnnnnnatgggggccatatataaacccccccggggttttttgggaaagcccccttcttttggggggggcaattttgcgcacatcttccctaaag

SEQ ID NO: 153501 - DNA, 519 bp, Homo sapiens
tttgtggtctgtgacggtcaatgtctttacttctaaagcatacattggactcactatatattaacatcaaaagtggctacctaaaatggagtcattctttttaaaaatccaaatcctcacatttttatataagatccaaaatgacatgaaattaaactctacaatgttatgaatagtataacaaactgctttcagaaagcaaaatgaaaggaaaagaaattagcagttgggacggttgtaggcctgggttccatgtcttttgaggcattgtgacagagagccagcaccaaggggaaggaccagcccctccctgtggccacaggaaggaactcagtcaagacagaggaggtgggccgtggctgggtcagccttccttacagtgacagagaagccatggtgggcatctccctgcccctcaagggcccttgggtgggccccatgataattcttcttttagaccagggaggggtggggctggaagagggcaggggatagagcagggttcaaaatgattatttt

SEQ ID NO: 153502 - DNA, 480 bp, Homo sapiens
ggcacgaggtggcggccgggcagcatggcggggctggagctcttgtcggaccagggctaccgggtggacgggcggcgcgccggggagctgcgcaagatccaggcgcggatgggcgtgttcgcgcaggctgacggctcggcctacattgagcagggcaacaccaaggcactggctgtggtctacggcccgcacgaggcgagtgggcgcgcgggatggggaatcgtgtggccgtgggagctgcggggcagccgggctgagcgctggctcggggacttgaggggcaacggccggcgcgcctcagtctacacagccgatgctcagcaccgcatctcactcggagtaaacgcaagtccttagtgtgctgcgcggtggtcctgcctttctcatcggcctctgtccctgcgccctccttcctctttgcggctcttcaacgtgctaggcactcccccactcgctccctctcctttcagctctactccg

SEQ ID NO: 153503 - DNA, 900 bp, Homo sapiens
gggtcgacccacgcgtccgagtaggcagagagcggacctggcggccgggcagcatggcggggctggagctcttgtcggaccagggctaccgggtggacgggcggcgcgccggggagctgcgcaagatccaggcgcggatgggcgtgttcgcgcaggctgacggctcggcctacattgagcagggcaacaccaaggcactggctgtggtctacggcccgcacgagatccggggctcccggcctcgaagccctgccggacaggggccctagtgaactgtcaatatagttcagcgaccttcaagcacaggtgagcgcaagcgacggccacatggggaccgtaagtcctgttgagatgggcctgcagctccgccagactttcgaagcagccatcctcacacagcttgcacccacgctcccagatttgatatctattgttgcaggttgcttacagggcagatggtgggacctaatgcagcttgtgtgaatgcagcccacgctgggcagtgctggatgccgggatacccatgagagactttgtgtgtgcgtgctcagctggctgtcgtggacggcacagccctggcgggacttcagccatgtggaggaagcagctggtggcccccagctgggccctggccctgctgccaagccttcaggacagattgcgctgcttgaaatggatggcccggctgcacgaggaccacctggagcgggtgttggaggctgctgcccaaggctgcccgagatgtgcacaccctcttagatcgagtggtccggcagcatgtgcgtgaggcctctatcttgctgggggactgaccacccagccacccatgtccagaataaaaccctcctctgcccgcaaataaaaaaaaaaaaaaaaaaaaaaaaaaagtcgtatcgatgt

SEQ ID NO: 153504 - DNA, 791 bp, Homo sapiens
ctgagaagacacaggtggaatccacatggaagaggccccagaaacctacattcccagcagggctgtatctttgttcttcaactggaagcaggaattcaggactctggaggtcacactccgggatttcagcaagttgaataagcaagatatcagatatctggggaaaatattcagctctgccacaagcctcaggctgcaaataaagagatgtgctggtgtggctggaagcctcagtttggtcctcagcacctgtaagaacatttattctctcatggtggaagccagtcccctcaccatagaagatgagaggcacatcacatctgtaacaaacctgaaaaccttgagtattcatgacctacagaatcaacggctgccgggtggtctgactgacagcttgggtaacttgaagaaccttacaaagctcataatggataacataaagatgaatgaagaagatgctataaaactagctgaaggcctgaaaaacctgaagaagatgtgtttatttcatttgacccacttgtctgacattggagagggaatggattacatagtcaagtctctgtcaagtgaaccctgtgaccttgaagaaattcaattagtctcctgctgcttgtctgcaaatgcagtgaaaatcctagctcagaatcttcacaatttggtcaaactgagcattcttgatttatcagaaaattacctggaaaaagatggaaatgaagctcttcatgaactgatcgacaggatgaacgtgctaaaacagctcaacgcacttgagctgcccctggggctgg

SEQ ID NO: 153505 - DNA, 2037 bp, Homo sapiens
ttaaagaaatctcggcagagggaagtcagaaactcgccaggagctgaaagctctgcctgcagcggggcctagatcgtgagcgcctgcggaacaggtgagggaccgaaaggaccagaactctgaaggggaacattttgggagacagccgctcctgccaaggggcccgacttcaactccaatgacccctcctctgggtggctgagggatttcaaggtcgcttcgggaccaaataagataaaccgaatcagctacagccgaaaccctcaccccaacagccaactcaccatgataaggagctgcacagctcccgccggaagccgttctgggtgctcgagttttcccagaacggaaggggtggggcaccagtgggcgattggctgtgaggaaagcgtgggaggaagtgcgtgctctggcctccggcttccgtccccttcccggctgtccctgcactccgtggcggaaggcggctagagcggctccctctgagctctccgagagattggtcgggacctcactggcagacatattcttcacctgttctggttttagttctcggataggacccagtgctgcatcttttgccaaagctgttaggtcacttcctgagtatccatcagtcattctgagaacagcctcatcaagctcttgtggcctattagttgcacccattacaagtactctgtcatctccagcagactgtacaccatcaaattctattagaaattcagtttttaggcgtctactagcatcgtgctccccttctcttctttcacacaaaaggctatcaacttcatctgtaataacactgagatcatcatcatcaaattgccacccaacaagcctagcttcttgcagaaaagttaacttggataacacttggctaagttttctgactaatgctggatcaggtagaaattctttagtactaaagtcaaaaaacactaattgcttaagattctcaaatacacccatgaaggcaagccatccatcactgctcacacgatttcccgccaaattcaactgctggaagtttttcagagggttctttccaaaaaatgcacctaaaattctaatctctgtatctgtgagtctccagtttttcaacccaagcttgacgagttgtgggacctcctccaaatgtttcaacaggctgctcaggctgccttgcacgtcacagccccagggcagcatcagtgcggtgagctgttctagcacgttcatcctgtcgactggaagaaacaaagagcagttcagggactggatggtctcaaaaattgatacaaatatgagaacagaaatctgacctagttttatagcatcttcttcattcatctttatgttatccattatgagctttgtaaggttcttcaagttacccaagctgtcagtcagaccacttggtatatttgtaaaaccagtcctcaatccttgagttgctccaattcctggaactccaagtccttgattaagcatgctgctgtaaggtgtgtgtccatgattgagaccaaaaccataaggccttgtttgtgtgtttagaagaataactgggttcacatttttcccaggagtgttaaatgaaaattctggaggtggactactaggtttagctggagttgatgtaactgggttcaaatcatcagtaccctttaaaagaggcattgggattacgtgatgatctgaaaagtttaggacattggctgcaacaggcccagacaataaggcaggcctaatccagtcatccttgaaaatttgaacagttagagtagacactagagtgtacagcctgttggtcacatgagcaagaaccatttgttcattggcatctcgtcgaattcttacatgcactgatccagccaatgagccaaaacctagggtccaaaaatgttcatttcggacttctaaaactccatctaaggtagatacctctctgatgagtttgtccaactgaccaataacatggggtggtgttgttggttcagcatccttaacccaaaaatccaaaatgcaaaatactccagtatttcctttgagcatcat

SEQ ID NO: 153506 - DNA, 3018 bp, Homo sapiens
atggaggtcgcgcgctctggcgcgatctctctctcgctgtctcgcgcgcacacacgcggtggcgcgcgggagcgtcgggggccaaactccgagtcgttcctctggtggatggcctgctggcgtgccgatgtctgttgtgtgctcttccgccagcattctcccttcaacgtcctctggacgtccagctgcttgtatgttcttccgccgatgtgttcctctcgacgtccagccgctttgaatttcataaaggacaatagccgagcccttattcaaagaatgggaatgactgttataaagcaaatcacagatgacctatttgtatggaatgttctgaatcgcgaagaagtaaacatcatttgctgcgagaaggtggagcaggatgctgctagagggatcattcacatgattttgaaaaagggttcagagtcctgtaacctctttcttaaatcccttaaggagtggaactatcctctatttcaggacttgaatggacaaagtctttttcatcagacatcagaaggagacttggacgatttggctcaggatttaaaggacttgtaccataccccatcttttctgaacttttatccccttggtgaagatattgacattatttttaacttgaaaagcaccttcacagaacctgtcctgtggaggaaggaccaacaccatcaccgcgtggagcagctgaccctgaatggcctcctgcaggctcttcagagcccctgcatcattgaaggggaatctggcaaaggcaagtccactctgctgcagcgcattgccatgctctggggctccggaaagtgcaaggctctgaccaagttcaaattcgtcttcttcctccgtctcagcagggcccagggtggactttttgaaaccctctgtgatcaactcctggatatacctggcacaatcaggaagcagacattcatggccatgctgctgaagctgcggcagagggttcttttccttcttgatggctacaatgaattcaagccccagaactgcccagaaatcgaagccctgataaaggaaaaccaccgcttcaagaacatggtcatcgtcaccactaccactgagtgcctgaggcacatacggcagtttggtgccctgactgctgaggtgggggatatgacagaagacagcgcccaggctctcatccgagaagtgctgatcaaggagcttgctgaaggcttgttgctccaaattcagaaatccaggtgcttgaggaatctcatgaagacccctctctttgtggtcatcacttgtgcaatccagatgggtgaaagtgagttccactctcacacacaaacaacgctgttccataccttctatgatctgttgatacagaaaaacaaacacaaacataaaggtgtggctgcaagtgacttcattcggagcctggaccactgtggagacctagctctggagggtgtgttctcccacaagtttgatttcgaactgcaggatgtgtccagcgtgaatgaggatgtcctgctgacaactgggctcctctgtaaatatacagctcaaaggttcaagccaaagtataaattctttcacaagtcattccaggagtacacagcaggacgaagactcagcagtttattgacgtctcatgagccagaggaggtgaccaaggggaatggttacttgcagaaaatggtttccatttcggacattacatccacttatagcagcctgctccggtacacctgtgggtcatctgtggaagccaccagggctgttatgaagcacctcgcagcagtgtatcaacacggctgccttctcggactttccatcgccaagaggcctctctggagacaggaatctttgcaaagtgtgaaaaacaccactgagcaagaaattctgaaagccataaacatcaattcctttgtagagtgtggcatccatttatatcaagagagtacatccaaatcagccctgagccaagaatttgaagctttctttcaaggtaaaagcttatatatcaactcagggaacatccccgattacttatttgacttctttgaacatttgcccaattgtgcaagtgctctggacttcattaaactggacttttatgggggagctatggcttcatgggaaaaggctgcagaagacacaggtggaatccacatggaagaggccccagaaacctacattcccagcagggctgtatctttgttcttcaactggaagcaggaattcaggactctggaggtcacactccgggatttcagcaagttgaataagcaagatatcagatatctggggaaaatattcagctctgccacaagcctcaggctgcaaataaagagatgtgctggtgtggctggaagcctcagtttggtcctcagcacctgtaagaacatttattctctcatggtggaagccagtcccctcaccatagaagatgagaggcacatcacatctgtaacaaacctgaaaaccttgagtattcatgacctacagaatcaacggctgccggatttgattatttacagtctttcacctcaaggccctgaagttttgaacaagagggttaagttggaagtacaagttctcgaatcaaactgctggagctcaaaatccaggttatttctaccccagccccagaaaccagccgtgaccgagacccagaggtccgcttccggccacggccgaacagctgcaccgtgcgtaccgggaacggtcaaggcgcagcttggaaccgctgcaaaaggcctccgggcgtaccggacagagtggctggtgctgcgggacggctgcatgcactgcgacgccgacgggctgcacagcctgtcctaccaccctgcgctcaacgccatcctggccgtcactagccgcgggaccatcaaagtcatcgacggcacctcgggggccacactgcaggcctccgcgctcagtgcgagccgaaaattaggatttgaaggtgtgtctgagtctcaccattggaggagagcacttctgggtggcgtaaaccttggtccagggacgggactttcagatgcgtga

SEQ ID NO: 153507 - DNA, 3890 bp, Homo sapiens
  misc_feature (1)...(3890): n = a,t,c or g
atgaacaagaaggtatctggtctacaagaactcgaggcctcactgaaacggaaagcaaatacaaagaaactttattttaaaaacatgtcttggtctcccaagaagagggcaattggattgctcagccagagacccttgcaggcagacacacaagcggctggacgtcgagaggaacacatcggcggaagaacatacaagcagctggacgtccagaggacgttgaagggagaatgctggcggaagagcacacaacagacatcggcacgccagcaggccatccaccagaggaacgactcggagtttggcctggaggtgaatttcataaaggacaatagccgagcccttattcaaagaatgggaatgactgttataaagcaaatcacagatgacctatttgtatggaatgttctgaatcgcgaagaagtaaacatcatttgctgcgagaaggtggagcaggatgctgctagagggatcattcacatgattttgaaaaagggttcagagtcctgtaacctctttcttaaatcccttaaggagtggaactatcctctatttcaggacttgaatggacaaagtctttttcatcagacatcagaaggagacttggacgatttggctcaggatttaaaggacttgtaccataccccatcttttctgaacttttatccccttggtgaagatattgacattatttttaacttgaaaagcaccttcacagaacctgtcctgtggaggaaggaccaacaccatcaccgcgtggagcagctgaccctgaatggcctcctgcaggctcttcagagcccctgcatcattgaaggggaatctggcaaaggcaagtccactctgctgcagcgaattgccatgctctggggctccggaaagtgcaaggctctgaccaagttcaaattcgtcttcttcctccgtctcagcagggcccagggtggactttttgaaaaccttcggtgatcaactcctggatatacctggcacaatcaggaagcagacatttttggctcatgctgctgaagcatgcggcacgaggggggttgggccttcttgatggctacgatgaattcaagccccagaactgcccagaaatcgaagccctgataaaggaaaaccaccgcttcaagaacatggtcatcgtcaccactaccactgagtgcctgaggcacatacggcagtttggtgccctgactgctgaggtgggggatatgacagaagacagcgcccaggctctcatccgagaagtgctgatcaaggagcttgctgaaggcttggtgctccaaattcagaaatccaggtgcttgaggaatctcatgaagacccctctctttgtggtcatcacttgtgcaatccagatgggtgaaagagaagttccactcttacacacaaacaacgctgtttccattaccttttaatgaactgcttggtacagaaaaacaaacacaaacataaaggtgtggctgcaagtgacttcattcggagcccggaccactgtggagacctagcttctggagggtgtgttctccccacagtttgatttccaacatgcaggatgtgcccagcgtgaatgagtcatgtcctgctgacaactgggctcctctgtaaatatacagctcaaaggttcaagccacagtatatattctttctcaagtcattcttatgtttacacagcaggacgaagactcagcagtttattgacgtctcatgagccagaggaggtgaccaaggggaatggttacttgcagaaaatggtttccatttcggacattacatccacttatagcagcctgctccggtacacctgtgggtcatctgtggaagccaccagggctgttatgaaaccacctcgcaacaagtggatcaacacggctgccttctcggactttccatcgcctagaggcctctctggagacaggaatctttgcaaagtgtgaagaacaccactgagcaagaaattctgaaagccataaacatcaattcctttgtagagtgtggcatccatttatatcaagagagtacatccaaatcatccctgagcccaagaaatttgaagctttcttttcagggaaaagcttatatatcaacttaggggaccattccccgattacttatttgacttctttgaacatttgcccaattgtgcaagtgccctggacttcattaaactggacttttatgggggagctatggcttcatgggaaaaggctgcagaagacacaggtggaatccacatggaagaggccccagaaacctacattcccagcagggctgtatctttgttcttcaactggaagcaggaattcaggactctggaggtcacactccgggatttcagcaagttgaataagcaagatatcagatatctggggaaaatattcagctctgccacaagcctcaggctgcaaataaagagatgtgctggtgtggctggaagcctcagtttggtcctcagcacctgtaagaacatttattctctcatggtggaagccagtcccctcaccatagaagatgagaggcacatcacatctgtaacaaacctgaaaaccttgagtattcatgacctacagaatcaacggctgccgggtggtctgactgacagcttgggtaacttgaagaaccttacaaagctcataatggataacataaagatgaatgaagaagatgctataaaactaggtcagatttctgttctcatatttgtatcaatttttgagaccatccagtccctgaactgctctttgtttcttccagtcgacaggatgaacgtgctagaacagctcaccgcactgatgctgccctggggctgtgacgtgcaaggcagcctgagcagcctgttgaaacatttggaggaggtcccacaactcgtcaagcttgggttgaaaaactggagactcacagatacagagattagaattttaggtgcattttttggaaagaaccctctgaaaaacttccagcagttgaatttggcgggaaatcgtgtgagcagtgatggatggcttgccttcatgggtgtatttgagaatcttaagcaattagtgttttttgactttagtactaaagaatttctacctgatccagcattagtcagaaaacttcagcccaagtgttatcccaagttaacttttctgcaagaagctaggcttgttgggtggcaatttgatgatgatgatctcagtgttattacaggtgcttttaaactagtaactgcttaaataaagtgtactcgaagccnnnnnnnnnnnnnnnnnnnnnnnnnnnnngggggggcccctttaaaaaaacccctggggggccccaatttaacccgggcggggaaaaaaaaattttttcccttaagggggggcatataaaaacccccttgggattttttggaaaaaaccctttttttgggggggggaaaatttggnnnnnnnnnnnnnaaaaatttaaaccctttagggnnnnnnnnnntttttaaggggaaaagggggaaaaaaaaccccaaatcccttggggttgaaaaatttgggnnnnnnnnnnannnnnnnnnncnnnnntnnnccctctntccccccccttttcctttgctttctctcttctacctcctctccatgcgttctccggtgccttgtcttcctctttcctgtcttgcgcccttcttaccatcaatcttccttatctatttttcaatcgactctcttccggtcccttaactgtatcaacggctaatgcatccatcataaaatatactcttttagcactctaatctataatccccaaatacctcacctgacctcactcctcttgcctcccgtagttcataaaatctctcttgccacccattacaatacatgcctatttcgctccagacaatctccattctagcatacactaatcgtacg

SEQ ID NO: 153508 - DNA, 561 bp, Homo sapiens
  misc_feature (1)...(561): n = a,t,c or g
tttgtggaaggggcaggaaatcccccatgcgagtaacacagcacagtggggcgggggttgaggaggaccaggtacaggggtcccccgagacgtcttagttttcttttggtcaagcccncactgatggacagaccagcgaggcgcatgcagctgggggctctgatgtgctgcaggctgtgatagggccagcggggacgggggctcaggaagggatctggagccagtggtgcagggatgatggaacacacgcacacagaggcacacccacacacttgggtttgcaccagcacacatacctgcacacacacactcggagacacagattacatgcacctccatgtatgcgtctctatccacatgtacgtggcccacacacaagtctctggctctcggcatgtctgcacacacattacacatgttctcacacacaaagctcctctcacgctaacatgcaggtaggcacgtgccaatgcccaaacaggttacatgcacctatgtgcccacgccttcccccacacatgtgctcggccatgcctgtgggtgcaggccccatgcgtctcc

SEQ ID NO: 153509 - DNA, 426 bp, Homo sapiens
gatggcctcttgcaaatgtgacctgacggtggcaaaagtcttctttcaaagcccattcatagggcctgctctttccccagcactgtccagctcatcgtcctcgtcgctgtcttcgtcctcgcagttctgcaggaaggggatctgccccagcactgagccgcccaagcgctctttgccatctttgcctgccgcgttcctctctatctgctcctcgatctgtttcaccagcagcgactccccaccactgagccctgcagggcctggtggagccctgggggccccttcactcggctccactgcaccgttgagctccagcgagcggcccagcagggaacgtacgcgcttggcccgcatgtcgaggatggtgtctgagtagaccacctcttccaggtactgtaggagaaggtgccgcatctcgtgccttct

SEQ ID NO: 153510 - DNA, 708 bp, Homo sapiens
cactatgggcgcttggactgcaagtgtatcacgctcttccagaacaacacgaccaacagatactataaggaatttccgctgtcagaaatcctcacggtggagtccgcccagaacttcagccttgtgccgccgggcaccaacccacactgctttgagatcgtcactgccaatgccacctacttcgtgggcgagatgcctggcgggactccgggtgggccaagtgggcagggggctgaggccgcccggggctgggagacagccatccgccaggccctgatgcccgtcatccttcaggacgcacccagcgccccaggccacgcgccccacagacaagcttctctgagcatctctgtgtccaacagtcagatccaagagaatgtggacattgccactgtctaccagatcttccctgacgaagtgctgggtctgggctgcccacggacagggatctcggtggggcctgtccaccacaggaccacgacatgcaggggctggcggagcgcatcagtgttctctgaggtcctgtgccctcgtccagctgctgccctccacagcggttcttcacaggatcccagcaatgaactgttctagggaaagtggcttcctgcccaaactggatgggacacgtggggagtggggtggggggagctatttccaaggcccctccctgtttccccagcaattaaaacggactcatctctggcaaaa

SEQ ID NO: 153511 - DNA, 329 bp, Homo sapiens
ctgtgagcccggaaagcatgtataggttccacatctagcccgcattcctgtgggatgacagaggagcctgatgtcactgagaccctgtacccccgtccccagatgcccctgcccccggctctgagcttgctgccctccttcttggccgtgaccgccttctgcaggttccagagcttgagcgtgccgcctcggaggcggtgagcagagccgactggatcgcagctgaggtcgttgcgttggtgacggtgagatctgccaagtcccccaggctcacctccccgccccgatagtgtccatgatgaagacgtctgaggagaagccaaaggaac

SEQ ID NO: 153512 - DNA, 394 bp, Homo sapiens
gcgagggaggcaaggcccatagcttcctggggcacatccccctaatgagggtggagcaatcggtgcgacacacgacgcggaaatccagcaccacgctgcgggagggtcgggtggtccattacagtaacaaggacacgctgaaaaagcggcactattggcgcctggactgcaagagtatcacgctcttccaaaacaacacgaccaacagacactataaggaaattccgctggcagaaatcctcacggcggagcccgcccagaacttcagccttgtgccgccgggcaccaacccacactgctttgagataggcactgccaatgccacctacttcgtgggcgagatgcctggaggcactccgggcgggccaagtgggcatggggcttaggccgcccg

SEQ ID NO: 153513 - DNA, 300 bp, Homo sapiens
tcgccctccgggaccgtcgcggtcccctcccgcccccccgccgtcgtcccggcggccattgctccaagatggcgtgctgtgcgtgctgtgcgcgggtgacggccgggccggtgccgggcctgggttggggtgtcggaggtccgggacagcgctcacctgtaactcggcgcgctcggcctcccagcgggcttctcggcttcgaagcgcgcccactcgtgccttggacttcccgttctccatttcgatgtcagtgtacagcatgtggccatctcgttgaatttgtcctttagcatcttccat

SEQ ID NO: 153514 - DNA, 5616 bp, Homo sapiens
agcggccgccgcggtcgccgccgccgcctcctcctgccgtccgctcggctcaggcgcgggccctggccccactggggcggccccggtctccgcccctgcccccgggccgggcccggcaggtaagggaggcggcggcggaggcagccccgggcccacggcgggcccggagcccctgagcctgccggggatcctgcactttatccagcacgagtgggcgcgcttcgaagccgagaaagcccgctgggaggccgagcgcgccgagttacaggctcaggtggccttcctttcaggagagaggaaagggcaggagaatctaaagacggacctggtgcggcggatcaagatgctagagtatgcgctgaagcaggaaagggccaaatatcataaactgaagtttgggacagacctgaaccagggggagaagaaagcagatgtgtcagaacaagtctccaatggccccgtggaatcggtcaccctggagaacagcccgttggtgtggaaaggagtggctgcaacttctcctacagtacctggaagaggtgggctacacagacaccatcctcgacatgcggtccaagcgcgtccgttccctgctgggccgctcgctggagctcaacggggcagtggagccgagtgaaggggcccccagggctccaccaggccctgcagggctcagtggtggggagtcgctgctggtgaaacagatcgaggagcagataaagaggcctgcccgcttctcggtcgagtggggtgcttaccgaaggcacaccctgggtgcctcgccagcagggagtggagcacacgtggtcgccaccctcaggaatctctggcttgttcactctcatcagcaattgtcagttaagcagaacaagaacgcggcaggcaaagatggcaaagagcgcttgggcggctcagtgctggggcagatccccttcctgcagaactgcgaggacgaagacagcgacgaggacgatgagctggacagcgtgcagcacaagaagcagcgtgtgaagctcccatccaaggctctggtgcccgaaatggaagacgaggatgaggaagacgactctgaggatgctatcaatgagtttgatttcctgggctcaggagaggatggggaaggggctccagaccctcggcggtgcactgtggatgggagcccccatgagctggaaagccgtcgggtcaaactccaaggcattctggctgacctgcgggatgtggatgggctgcccccaaaagtgactggcccgcctcctggcacaccccagccccgggccacatgaaggttcctttggcttctcctcagacgtcttcatcatggacactatcgggggcggggaggtgagcctgggggacttggcagatctcaccgtcaccaacgacaacgacctcagctgcgatctgtctgacagcaaagatgcttttaagaagacgtggaaccccaagttcaccctgcgctcgcactacgacggcattcgttccctggccttccaccacagccagtcggctctgctcaccgcctccgaggacggcacgctcaagctcttggaccttgcagaaggcggtcacggccaagaagaatgcggcgctagatgtggaacctatacatgctttccgggctcacaggggcccaagtgttggctgtggctaggggcagcaacagtgaatactgcttacagtggcggggcagatgcccgcatccatagttggaagactccagaccttcagcatggatcccctatgatggctacgaccccaagcgggctgggcccccggtctggagggggcactgggcaccccgcttggggcctggccttcagtcccacctcccagcgcctggcttcctgttctgctgatggcaccgtccgcatctgggaccccagcagcagcagcccggcctgcctctgcaccttccccacagccagcgagcacggggtccccacctcagtggccttcaccagcaccgagcctgcccacatcgtggcctccttccgctctggcgacaccgtcttgtatgacatggaggttggcagtgccctcctcacgctggagtcccggggcagcagcggtccaacccagatcaaccaagtggtgagtcatccaaaccagcctctcaccatcaccggccacgaacgacagggggcatccgttttccttggacaattggacaggtaagccggtgcactccatggttgcacacctggacgcagtcacctgcctagccgtggaccccaacggcgcattcctgatgtcaggaagccatgactgctccctgcgtctctggagcctggacaacaaaacgtgcgtgcaggagatcacggcccaccgcaagaagcacgaggaggccatccacgctgttgcctgccaccccagcaaggccctcattgccagtgctggcgctgatgccctggccaaggcccacaaggagcagggagggaaaaggctgcacctgccagtggaggatgatggctttggggcgcaggctcctccatgctgggaggaggtgccgcagggcactaatgcccagttcctgggttgtaaagggctgtgccccagtcccccagcaggccccagtgaacatacgagaaaggatggaggccgctgtctggacactcaggacatggcagcgttttgctgggacagtcatctgcccttcaggaaaaagggtgcagagctgcagtcgccgccaccgctactgccccagatcccggccccgggttccggggtctcctttcacatccagatcgggctgacccgcgagttcgtgctgttgcccgccgcctccgagctggctcatgtgaagcagctggcctgttccatcgtggaccagaagcgccctcgagtccaagtcccccggcccccccccccactttcccaggagccccgaaaagtcctccttccagctcgccccaccccagtgctgggcctggagccagttcctgagtgtggcttctacggcctttacgacaagatcctgcttttcaaacatgaccccacgtcggccaacctcctgcagctggtgcgctcgtccggagacatccagagagggcgacctggtggaggtggtgctgtcggcctcggccacctttgaggacttacagatccggccgcacgccctcacggtgcactcctatcgggcgcctgccttctgtgatcactgcggggagatgctcttcggcctagtgcgccagggcctcaagtgcgatggctgcgggctgaactaccacaagcgctgtgccttcagcatccccaacaactgtagtggggcccgcaaacggcgcctgtcatccacgtctctggccagtggccactcggtgcgcctcggcacctccgagtccctgccctgcacggctgaagagctgagccgtagcaccaccgaactcctgcctcgccgtcccccgtcatcctcttcctcctcttctgcctcatcgtatacgggccgccccattgagctggacaagatgctgctctccaaggtcaaggtgccgcacaccttcctcatccacagctatacacggcccaccgtttgccaggcttgcaagaaactcctcaagggcctcttccggcagggcctgcaatgcaaagactgcaagtttaactgtcacaaacgctgcgccacccgcgtccctaatgactgcctgggggaggcccttatcaatggagatgtgccgatggaggaggccaccgatttcagcgtaggctgacaagagcgccctcatggatgagtcagaggactccggtgtcatccctggctcccactcagagaatgcgctccacgccagtgaggaggaggaaggcgagggaggcaaggcccagagctccctggggtacatccccctaatgagggtggtgcaatcggtgcgacacacgacgcgggaaatccagcaccacgctgcgggagggttgggtggttcattacagcaacaaggacacgctgagaaagcggcactattggcgcctggactgcaagtgtatcacgctcttccagaacaacacgaccaacagatactataaggaaattccgctgtcagaaatcctcacggtggagtccgcccaaaacttcagccttgtgccgccgggcaccaacccacacttgctttgagatcgtcacttgccaatgccacctacttcgtgggcgagatgcctggcgggactccgggtgggccaagtgggcagtgtggctgaggccgcccggggcttgggagacagccatccgccatgccctgatacccgtcatccttcaagacgcacccagcgccccatggccacgcgcccccaaaacaagcttctctgggcatctctgtgtccaacagtcagatccaaaagaatgtggacattgccactgtctaccagatcttccctgacgaagtgctgggctcacgacagtttggagttggtctatggaggaaaacaccggaagacatgcccgagacgtggcagttaaggccattgacaaacgtgcgcttccctaccaagcaggagagccagctccggaatgaagtggccattctgcagagcctgcgcactcccgggatcgtgaacctggagtgcatgttcgagacgcctgagaaagtgtttgtggtgatggagaagctgcatggggacatgttggagatgatcctgtccaagtgagaagggccggctgcctgagcgcctcaccaagttcctcatcacccagatcctggtgggcttttagacaacttcacttcaagaacattggtccactgtgacttgaaaccagaaatcgtgttgctggcatcagcaggacccatttcctcaggtgaagctgtgtgactttggctttgctcgcatcatcggcgaggaagtcgttccgccgctcagtgggtggggcacgccggccttacctggggaacccgaggctttggcttcaaccagggctacaaccgctcgctggacatgtggtcagtgggcgtgatcatgtacgtcagcctcagcggcaccttccctttcaacgaggatgaggacatcaatgaccagatccagaacgccgccttcatgtacccctggccagccccctgggaggccacatcttcagctgggagccatttgaccttcattcaacaaccttgttgcaggttgaagatgcggcaaacgctacagcgtggacaaatctctcagccacccctgggttacaggagtaccagacgtggctggacctccgagagcttggaggggaagatgggagagcgatacattcacgcatgagagtgacgaaagcgcgctgggagcaagtttgcagcagagcatccgctgccctgggtcctgggctgccccacggacagggatctcggtgggggcctgtcccaccacaggaccccgaacatgcaaggggctggcggagcgcatcagtgttctctgaggtcctgtgccctcgtccagctgctgccctccacagcggtttcttcacaggatccccagcaatgaactgtttctagggaaagtggcttcctgcccaaactggatgggacacgtggggagtggggtggggggagctatttccaaggcccctccctgttttccccagcaattaaaaacggactcatctctggccccatggccttgatctcagcaaaaaaaaaaaaaaaaaaaacc

SEQ ID NO: 153515 - DNA, 426 bp, Homo sapiens
ggaagacggcagtttggcgacatttctcggccgaaggcagtttgcttttgcggagatgcggcattccaagagaactcactgtcctgattgggatagcagagaaagctggggacatgaaagctatcgtggaagtcacaagcggaagaggagatctcatagtagcacacaagagaacaggcattgtagaccacatcaccagtttaaagaatctgattgtgctccatgtgcatccctcttgaagcttcgcactctgttgaagaggacactcatcccagtcattatttagaagcaaggtccttgaatgagcgagattatcgggaccggagatacgttgacgaatacaggaatgactactgtgaaggatatgttcctagacattatcacagagacattgaaagcgggtatcgaatccactgcagtagatct

SEQ ID NO: 153516 - DNA, 2494 bp, Homo sapiens
tttcgtggtggtgctagaggcgactcgggggattctagggcgacggcgctgccgccattttgtggggtgtttgtcgcagcggccgaggagggaagacggcagtttggcgacatttctcggccgaagggccatttgcttttgcggagatgcggcattccaaaagaactcactgtcctgattggggtagcatagaaagcctggggacatgaaagctatcgcggaagccacaagcgtactaggatatcccatagccgctccacaagagaacaggcattgtaaaccacatcaccagtttaaagaatctgattgtcattatttagaagcaaggtccttgaatgagcgagattatcgggaccggagatacgttgacgaatacaggaatgactactgtgaaggatatgttcctagacattatcacagagacattgaaagcgggtatcgaatccactgcagtaaatcttcagtccgcagcaggagaagcagtcctaaaaggaagcgcaatagacactgttcaagtcatcagtcacgttcgatgaaatccgtggacactttgggtgaaggagcctttggcaaagttgtagagtgcattgatcatggcatggatggcatgcatgtagcagtgaaaatcgtaaaaaatgtaggccgttaccgtgaagcagctcgttcagaaatccaagtattagagcacttaaatagtactgatcccaatagtgtcttccgatgtgtccagatgctagaatggtttgatcatcatggtcatgtttgtattgtgtttgaactactgggacttattacttacgatttcattaaagaaaacagctttctgccatttcaaattgaccacatcaggcagatggcgtatcagatctgccagtcaataaattttttacatcataataaattaacccatacagatctgaagcctgaaaatattttgtttgtgaagtctgactatgtagtcaaatataattctaaaatgaaacgtgatgaacgcacactgaaaaacacagatatcaaagttgttgactttggaagtgcaacgtatgatgatgaacatcacagtactttggtgtctacccggcactacagagctcccgaggtcattttggctttaggttggtctcagccttgtgatgtttggagcataggttgcattcttattgaattatacccctggggttcacagttcttcagacttcaatgatagaaagagcacctggcaatgatggaacgaaatattaggaccccatacccacaacacatgattccagaaaacaagaaaacgcaagtattttcacccataacccagcctagattgggatgaacacagttcctgcctggtagatatgttaggagacgctgcaaaccgttgaaggaatttatgctttgtcatgatgaagaacatgagaaactgtttgacctggttcgaagaatgttagaatatgatccaactcaaagaattaccttggatgaagcattgcagcatcctttctttgacttattaaaaaagaaatgaaatgggaatcaggggtcttactatatacttctctagaagagattacttaagactgtgtcagtcaactaaacattctaatatttttgtaaacattaaattattttgtacagttaagtgtaaatattgtatgttttgtatcaatagcataattaacttgttaagcaagtatggtcttgataatgcattagaaaaattaaaattaatttttctttttgaaattaccatttttaaatacctttgaaatatcctttgtgtccagtgataaatgtgattgatcttgccttttgtacatggaggtcacctctgaagtgattttttttgagtaaaaggaaatcttgactactttatattcttaaaggaatattctttatatacttcaaatttagaacttaactttaaaagtttttcttctgtaattgttgaacgggtgattattattaactctagataagcaggtactagaaaccaaaactcagagaatgtttactgttagaattctattaaattttaagtgttgtattctttttcattgggtgatgtcagggtgataacccagaccattcatgggaagggcatgccagtttgtcccattgtgacagtttgtttaataaaaccacgatacacactttatttaagattaaaatcgtaactggaaaggtcagcttggaaaatggacatttccaagtatgtttggtgagtcacagatataaaaatagaaattctgatgagaggtttcagtttttaataccaagtccttaggagtcttaacattggccagcatctgtttatcaaatgacataaatacgtaaacctataagaatttaaggtttattaattaggcaatttatgtctgtgataattcttacgggagaaaaaggatttgattggaaagcagtttgggaagaaagtgctgctgaaatttccagaatttaattgattggttacataaactttttgccttcaaaaaataaaaaaaaa

SEQ ID NO: 153517 - DNA, 453 bp, Homo sapiens
aacgtcagtgaccagtgataacctaagtcgacatgacatgctggcctggatcaatgagtctctgcagttgaatctgacaaagatcgaacagttgtgctcaggggctgcgtattgtcagtttatggacatgctgttccctggctccattgccttgaagaaagtgaaatgtgtgtagaaagcaagtattttatgataaaaatgttgtgtagtgcatgctctgtgtggaattcagaggaaaacccagattcagtgattaacaatgccaaaaaatgcaagtaactagccattgttcaaatgacagtggtgctatttctcttttgtggccttttagacttttgttgccctaaaattccattttattgggaacccattttccacctggtctttcttgacagggtttttttctactttaaacagtttctaaataaaattctgtatttcaagagtaaaaaa

SEQ ID NO: 153518 - DNA, 537 bp, Homo sapiens
atgctgttccctggctccattgacttgaagaaagtaaaattccaggctaagctagaacatgagtgcatccagaacttcaaaatactacaagcaggttttaagaagctgggtgttgacaaaataattcctgtcgacaaatcagtaaaaggaaagtttcaggacaattttgaatttgttcagtggttcaagaagttttttgatgcaaactatgatggaaaaatctatgaccctgtggctgccagacaagtttgctgcttagagatggaagtgaagcatgcaggtgaccatgctgcaagttttctggacctctggcaaagggagtggtcaatgaaggccattgttaccttgggatctgcaagactggggtgttttcggggagtgggactggtggttttccaagaagacgaagagagacctgagatagcacacccagcccccttgccatgtgaggccatgtgctccatcaggactctgcagaaagtccccacaagcaaggaggctcttaccagatgcagcccctcaaccttggacttctaa

SEQ ID NO: 153519 - DNA, 489 bp, Homo sapiens
ctggagaaagagagggatttctactcggaaagctacggacattgaattgatttgccaggagaacgagggggaaaacgcccctgtattgcagaggattgtagacattctgtatgccacagatgaaggctttgtgatacctgatgaagggggcccacaggaggagcaagaagagtattacagcctgggaccagcagagcaacatggatattcttcactccaaatcatgtgcttaactgtaaaatactcccttttgttatccttagaggactcactggtttcttttcataagcaaaaagtacctcttcttaaagtgccagtattttaaaatagcgttcttgtaattttacacgcttttgtgatggagtgctgttttgttatataatttagacttggattctttccatttgcatttgtttatgtaatttcaggaggaatactgaacatctgagtcctggatgatactaataaactaataattgcagaggtttt

SEQ ID NO: 153520 - DNA, 2694 bp, Homo sapiens
  misc_feature (1)...(2694): n = a,t,c or g
ggtcatcgcgcgggcgggcgggcggggtctggcggtttgaacgagacgaagacggaaccggagccggttgcgggcagtggacgcggttctgccgagagccgaagatggcagtgaacgtatactcaacgtcagtgaccagtgataacctaagtcgacatgacatgctggccctggatcaatgagtctctgcagttgaatcatgacaaagatcgaacagttgtgctcaggggctgcgtattgtcagtttatggacatgcctgttccctggctccattgccttgaagaaagtgaaattccaagctaagctagaacaccgagtacatccagaacttcaaaatactacaagcaggttttaagaagaatgggtgttgacaaaataatttctgtggacaaattattaaaagggaaagtttcaggacaattttgaattcgttcagtggttcaagaagtttttcgatgcaaactatgatggaaaagactatgaccctgtggcttgccagaccaaggtcaagaaactgcagtggctccttcccttgttgctccagctctgaataaaccgaaggaaacctctcacttctagcagtgcagctccccagagggcccatcttcaacacagagaaccgctggcggctcctaagggatgggccctgggtgtggtgcgaaagaaccctggtgtgggcaaacggagatgacgaggcagctgagttgatgcaacaaggtcaacgtatttgaaacttactgtttgaagacttgggaggaaaggagagggatttctacttcggaaagctacggaacattgaattgatttgccaggagaacgagggggaaaacgaccctgtattgcagaggattgtagacattctgtatgccacagatgaaggctttgtgatacttgatgaagggggcccacaggaggagcaagaagagtattaacagcctggaccagcagagcaacatcggaattcttcactccaaatcatgtgcttaactgtaaaatactcccttttgttatccttagaggactcactggttataaattcataagcaaaaagtacctcttcttaaagtgcactttgcagacgtttcactccttttccaataaagtttgagtttaggagcttttaccttgtagcagagcagtatttaacatctagttggttcacctgggaaaacagagaggcccgaccgcggggctcaccatgccggatgccgggcacactgaatggctggaaagacggcatggaaataagcctgaggtggcgacctcagtggagaaatgtaaagactgaattgaattttaagctaatgtgaaatcagagaatgttgtaataagtaaatgccttaagagtatttaaaatatgcttccacatttcaaaatataaaatgtaacatgacaagagattttgcgtttgacattgtgtctgggaaggaagggccagaccttggaacctttggaacctgctgtcaacaggtcttacagggctgcttgaaccctcataggcctaggctttggtctaaaaggaacatttaaaaagttgccctgtaaagttatttgggtgtcattgaccaattgcatcccagctaaaaagcaagaggcatccgttgcctgggataatagagggatgtgtttcagccctgagatgttacaagttgaagagcttgggtttcattggagcatttctctatttttccagttatccccgaaatttctatgtattgtattttttggggaaatagaagtgtgcccagttttttaatctaacaactacttttggggacttgcccacatctctgggatttgaatggggattgtatcccatttttactgtcttttanggttttacatttaccacgtgtctcttctctgctccccttgcccactggggactccctctttgggctccttgaaagtttgctgcttagaagttggaagtgcagcaggcaggtgatcatgctgcaagttcctttctggacctctggcaaaagggagtggtcagtgaaggccaaccgttaacttgggatcctgccaggcctggggtgttttcggtatctgctgttcacaagctctccactgtaattccgaatactttgccagtgcactaaatctctttggagataaaattcattagtggggttaacctaaatgttaaattttccttttgcgggaaaatacagtaccgtgtctggaattaaattattaaatatttaaaaatactttcattcccttaactctcccctcatttggctttggccccacagccctattccagttccctttgttttggccaggattctggcaaaaatgtgttctcaccccactacctgagattgttccagcccctgaatgtattttgtattgatttgtttctggtgggtagcttgtcctgaaatgtgtgtagaaagccaagtattttatgataaaaatgttgtgtagtgcatgctctgtgtggaattcagagggaaaacccagattcagtgattaacaatgccaaaaaatgcaagtaactagccgattgttctaaatgacagtggtgctatttctcttttgtggccttttagacttttgttgccctaaaattccattttattgggaacccattttccacctggtctttcttgacagggttttttttctactttaaacagtttctaaataaaattctgtatttcaagagcaaaaaaaaaaaaaaaaag

SEQ ID NO: 153521 - DNA, 952 bp, Homo sapiens
tttttaatgtagaaatactttattgctgaaaaatgctaatgatcatctgagccatcagtgagtcatagctttttgttggtggagaatcttgccttgatattgatggtttctaatagaccagggtggtggttgctgaaggatggagtggctgtggcaatttcttaaaataagacaacaatgaagtttgctgcatccatgtactcttctttccatgaacaatttctctgtatcatgcaatgctgtttacccacagtacaacttctttcaaaattggagtcagtcctttcaaaccctaccactgctttatcaactaagtttctgtcatagtttaagtcctttgttgtcatttcaacgttgttcgcagcatcttcaccaggagtagatctcatctcaagaaaccactttctttgttaatccctatgaagcaactcctcatccatttaaatttgatcatgagatagcagcaatctagtcccattttcagggttcacttctaattcaagttctcttgctgtttctaccacatccacagttacttcctacaatgaaattttgaaactgtcagttataaaagtcagaatcaacttcttccagacccctgttaatgttgctattttgatctccttccatgaaacatcagtgtttttattggcatctagaatgctgaattctttccagaagattttttctttgcccagattttggatctgggcaaagaggccaggaattcttcctaacatctgcaatgcccaggagagctcctccccaacaaaggattatccagccaaaattgtcaatagtgaaaaggctgagaaatcctatactggagaaagcatgtggaaacagagaagaaaaaaaaattaaaagacagaatgggaacatattaggtcaaaagccagaggagtcaagcatacccaatggctaaaaaaaaaaaaaaaaaaaaaaaaaaaaa

SEQ ID NO: 153522 - DNA, 903 bp, Homo sapiens
  misc_feature (1)...(903): n = a,t,c or g
gcctcacttagaagtgcatcctccaatccttagctaagatttcagacaacannnnnnnnnnnnnnnnnnnnnnnnnnnnnnngctcaaactgttcctgacacctttgcccccctccagagtagttctgacaagtggggtgaggccgtcctaccagagacgccccaccctctcccctggagccagggtctgcattcgagtcctgccctcactcacctaatcatttctgcactcaaggcctgacaacaagactgctactgagaactcaaaatactccaagagccagtcccatatctcaggtgtgggctctgaacaacgtgcacgcaacaacactctaatgcaataggaacacatccacgctcacacgtacatgcacaaacgtgtgcataaacacacctaggcctgcacccccactcctagcacacaggccaccctgcacttccaatttccatagctcctcttcccttatagtgacagccacaagctctctcggccaccaggctgtccctggatgccatggctcaggcctcaggctcctgcctctgctccaggctgctcctggctggcttccttccctggggcctctttcgttattttcttgtagaggcagggtcttgctatgttgaccagggtggtcttgctatcttggcctcaagctatcctcccaccttggtctcccaaagtgctgggatgacaggcctaagccaccgagcccggcctcctttgaatgggcccccaccaggcctaaccccctccctcagcatggtacccaaagccaatgtcttttctctgttggagaagccccccggcctcactcaggctctgcctattacactaaccaatgtctccaatgctccaggccctgctcggagcggactagaaggttgggggtgcttcttcccaaa

SEQ ID NO: 153523 - DNA, 1806 bp, Homo sapiens
  misc_feature (1)...(1806): n = a,t,c or g
cctctgcgtcacctgcactggagttcaccacttgcctgttgggttaagaccaggatgcaccactgaaataaaaaggggttcagacaatacaagaaaagccagtagaaattgccaaatgtatcagaatacacacaggctttctaaggatatggcccaagaggaaggctctagagcccaccctgaaacaggatttttgacttcacagagaaattatttaattttcaataacacaattcaattaaagaaagggaaatacaaggctaaacaaataagaaatgaagacaaaaacccaacctttcaaatctaaagaaaataatctgttttaaagacacagatgaagatcaggaacccaaaacagaagaaaggaaaagcaattaacgctggcatctgataacaacgaaaagtatggagtctggagaatcgctagactctaaaaattataaaggtttagacttggactttgtacactgaaggaaaagaaaactgcatgcatttattactggaccaatgtacactattggctgcttttttaacttttgtgttatatgtagggtagatttttttttaagtgaaagcaagcttattaacgaaagtaaaagaataaaaaggtgacttctccataggcagaaaacctagccgtagtttttttattagaaattgttattcaataatagtacatgttacaaataaataccattttaaactggaaaaaattgtagactttcaaatcagttagggtgggtcaccctaaaaaaggggcatttttttccccttagtctccttggttcatggttggctcacaacaaggaaatgggggctaatggctatggaattaattaataacaaacactggccttctgtcagggccctgtgctggaataccgttctggcatatgttataggggaaggggttaactccggcaggtcttgtttggcccagactctggttacatttcccaggaaagggtctgcctttagggactgggtccttgggccagctccgggggggaatggagctctcaggctttttaggaaaattctattctgctaaggattagtttttggcatgttctcaggtcttgggccacaaaatatcagtttaatcagatggtttatgttaacaagtatgatttatggcaaacatagatctctaatctccatttctctctcatatatctatatttatctatccatatatatgtacctatatatatcaaatataaagataggtttatagccaattgtatatacgtagagagataatatgtagtatgaagagagacatagatattatnccctccattttagaatgttatccctggtatgtttaaaaggaaaaacctaagatgtgttgccaattgccagtatgagtttccaggtatgtaccatgttatgtgtgtgtgtgagagacacacacaaacacatttcaaacatgttttatgtttaagcctcaatattccaaacacagaaatataacatcctattccttaatatgttttatgtaagtaccagcagcagcagtagtaaatactgtattttctatggtgattgaaaattagtaggccagagaatttttgtaatggtttcttaataatttttgtaatagtaaatgattactttttgtttagtatagttttataatctataacatgaataaagtggatatttctattcatatagaaatgtgatttactctcatgtacttatctacatgctaaaaccataagttatcaattttagttctgtgccaaggcacttttactgaataaaaataatcagctaattttaaaaaaaaaaaaaaaaaaa

SEQ ID NO: 153524 - DNA, 597 bp, Homo sapiens
tcgtccccgctgcgggtggcggtggtgtgctcgagcaaccagaaccggagcatggaggcgcacaacatcctcagcaaacggggattcagcgtccgatcctttggaacagggactcacgtgaagcttccaggaccagctcccgacaagcccaatgtttatgatttcaaaaccacatatgaccagatgtacaatgatcttcttaggaaagacaaagaactgtatcccagcgggttgccctttaaaaaccccccgtgtggtcctccctgggaaggtgttacgtgtgggctcgggcacaggaggcgtgtcaccctgtgcagtgcaaacactggctcctctgtcttttgcgagagtttggtttctatttctggtgcacgtcggatcgtccacggaagccctggtaacctgcgtttggaaaaatctctaaggatttctgaggagctgtcaggccatgtccttgtccaccctgtgtggggcacggcttcgacatggctctgctcccgtcgtgggctgagaaggagcagacctgggaagtacttgccacgttctgcaaggactgagtccagcttcagcagtctcatccggaaggacttggtatag

SEQ ID NO: 153525 - DNA, 1217 bp, Homo sapiens
  misc_feature (1)...(1217): n = a,t,c or g
gcacgagccgcggtagggtgggaacccaagcgggagagccgcgggatttgcggccgccgccatgcccgtcgtccccgctgcgggtgagcggtggtggtgcctcgagcaaccagaacgcggagcatgggaggcgcacaacatacctcagccaaacggggattcagccgtccgatcctttggtaacagggactcacgtgaagcttccaggaccagctcccgacaagtcccaatgtttatgaatttcaaaaccacatatgaccagatgtacaatgatcttcttaggaaagacaaaagaactctttacacagaatgggattttacatattgctggacagaaataagagaatcaagccccgggccggaaagattccagaactgcaaagacctgtttgatctgatcctcactttgcgaagagagagtgtatgaccgggttggttggaagatctgaatttccagaggaacagggagacctgcccagccccgtgcacgtggtcaattgtggacatccaggacaaccacgaggaggccacccttgggggcgttttctcatctgtgaagctctgccagtgtatccagcacacggaagacatgggagaacgagatcgacgagctgctgcaggagttcgaggagaagagtggccgcacctttctggcacaccgtcttgcttcttactgagccccagcgccccgcatgggagcccgcctcttgggagcttcctgtttgtttcatacttttttccttcctggacatttgtttttaatttaacaggtgtttctgcttggtgacggttagcatttacccaaataaactgtgccatatgaaatggggaggagagatgcccaaaacgcccagatgaaagcaatcaagtttcttccttttccacttttacttatgagcgggatattgatttacaaagtttttcttctttaaccaaaaagggaaagacaacggttttgtgtgcacttcccgacatacctgtgtcttcgtgtgcctgccttccctccctcctccccaccgggcgcggactgtaacagagccctgctgcggcgtgttaggaatgacctggaattgtcaataaacagatgctgctgtcaaaaaaaaaaaaaaaaaaaaaaaaaaaaaaaaaaaaaaaccaaaaaaaaaaaaaaaaggnggggccgaaggttttttccctttggtnggggttatttttggcttggnattggccttcgtttt

SEQ ID NO: 153526 - DNA, 316 bp, Homo sapiens
  misc_feature (1)...(316): n = a,t,c or g
aatgcacctgtatttgcttaaacgaaaatgtcagaagtatttgtcctacaagcagtctgagtggtttgtcccgcagctggtctggtgacgctggccctcgcggatgtctgcgtgtcgctcacatgtgaatgagtgaggtaattggatatgaggccttctttcttatcttcgcttctttgtttatcggtccnnnnnnnnnnnnnnnnnnnnnnnnnnnnnnnnncttctttgcttattcgtttttgttcttttgttccttttggacactttgcgtctcttttctgcgtagacccagaacaagtgggtcatattttag

SEQ ID NO: 153527 - DNA, 1437 bp, Homo sapiens
atgggatatcaggcttctatgggacaggagtatggaaatgtcctaaatgtctgcctaatcagagcacgcagcttggtttctctcatccgaggccaagtagtaactacagatggaactcccctggtcggtgtgaacgtgtcttttgtcaagtacccaaaatacggctacaccatcacccgccaggatggcaccctcattcagagcacattgattgaggaacatgtgaaaagctggcttgtgatgtttggatttcagcttagcaacatcattcctggcttcccgagagccaaaatgtatttcgtgcctcctccctatgaattgtcagagagtcaagcaagtgagaatggacagggcttcagtaacccttcccattctccaacccccacaggaatcctacacaaaggcactggggaaaaccagttcctgacccagcagcctgccatcatcaccagcatcatgggcaatggtcgccgccggagcatttcctgtcccagctgcaacggccttgctgaaggcaacaagctgctggccccagtggctctggctgttggaatcgatgggagcctctatgtgggtgacttcaattacatccgacgcatctttccctctcgaaatgtgaccagcatcttggagttacgaccttctcataggaaccacctgggaattctgggcagtttctgggtctgtatgaagagaataaaatacctaggaatccaacttacaagggatgtgaaggacctcttcaaggagaactacaaaccactgctcaaggaaataaaagaggatacaaacaaatggaagaaccttccatgctcatgggtaggaagaatcaatatcgtgaaaatggccatactgcccaaggtgacagtaaaatgtcttaaggaagagctgctacatggcctagcgagcatcaaggaggtaccagccaattgtgatacagcggggcgggtagtaccacataaaggaaaggataaagatgccatgactggtgctgctggcatgagcttgggagctttggaaaagcttccaggaggaggggtgtcctgtgtccccaagccttcaaccacatcctttgccatgaagcctccggtgcccatttctgggtacctactggacatttctgtgtctagacaagcaccgcaaacaacaaatcgaaaattgaatccagtcctggtctcaaacaactttgcctctggccttttttgccattaccgggtgtcctgtgtccccaagccctcaaccacctcctctgccatgaagccacaggtgtctgtttctaggtacccactggacatcatttctgtgtctagacaagcacgacaaactacaacaaatcgaaaactgaatcccattctggtctcaaacaacttcgcctcttgccttttctgccattaccatgagagggtaccagctcagtctaacacaacccagcgctga

SEQ ID NO: 153528 - DNA, 834 bp, Homo sapiens
atgccctcaaccatcaagggtagtaggggtgataaaaaggaatcagtgcaagtgaagggtgctgagcggcaacggaagggctacagagtaggggtgacgaatggtcgcttcccgttaagaagcgtgtcaccttctgactcctctccctgcaacaacccagcacacaagtactacttggcagtggaccccgtgtccggctcgctctacgtgtccgacaccaacagcaggagaatctaccgcgtcaagtctctgagtggaaccaaagacctggctgggaattcggaagttgtggcagggacgggagagcagtgtctaccctttgatgaagcccgctgcggggatggagggaaggccatagatgcaaccctgatgagcccgagaggtattgcagtagacaagaatgggctcatgtactttgtcgatgccaccatgatccggaaggttgaccaaaatggaatcatctccaccctgctgggctccaatgacctcactgccgtccggccgctgagctgtgattccagcatggatgtagcccaggatcatgcttatgctctgccccactcggatgttggcttagtactagacaaggctgtgctgtgtcagctctgcactgccagccctagccaagcctgtctcctccactcccgcacgcgcacagcccaagccgcacgcccagtgagcggtgacaaggagagggcttgggcttctcgtctccagttcggattcgtgcagtctcacgtcacaggagcagagtctgccttagcaaacttcgggctcagaggggcagaaaaacacatcacccttaaaaagaggccctccagaagacagaaatga

SEQ ID NO: 153529 - DNA, 1254 bp, Homo sapiens
atggggttctctatgttggccaggattctgatgcagaatgcttctttgagaacctctgattcagggatgtacagaacagggattcctaactgtcttggtcagtttgggctgctacaacaaaaataccatagactagggggcttaaacaacaaacatttatttctcgcagtcctggaggctgggaagtccaagatcaaggcaccagcagattcagtgtctgatggcctggtggattgtttggaccctgactgctgcctgcagtcagcctgtcagaacagcctgctctgccgggggtcccgggacccactggacatcattcagcagggccagacggattggcccgcagtgaagtccttctatgaccgtatcaagctcttggcaggcaaggatagcacccacatcattcctggagagaaccctttcaacagcagtgaacacttaagccctggccatgccagccatgtcctccacagaagcctgagccggcatgcctgggtccatggaagaaatctcttgtccattgactatgatcgaaatattcggactgaaaagatctatgatgaccaccggaagttcaccctgaggatcatttatgaccaggtgggccgccccttcctctggctgcccagcagcgggctggcagctgtcaacgtgtcatacttcttcaatgggcgcctggctgggcttcagcgtggggccatgagcgagaggacagacatcgacaagcaaggccgcatcgtgtcccgcatgttcgctgacgggaaagtgtggagctactcctaccttgacaaggatggatgtgggaaaaaaagcacgggctgcttaagaaaatcaaggctctgctaccaaaggcagaaatctgattcaggacatatagctttcatccagtatgaggctgcatcccccggagagcagcagttatatgttttcaacgctgatggcatccaccaatacactgtgagcctggtgacaggggagtacttgtacattttcacatatagtactgacaatgatgtcactgaattgattgacaataatgggaattccctgaagatccgtcgggacagcagtggcatgccccgtcacctgctcatgcctgacaaccagatcatcaccctcaccgtgggcaccaatggaggcctcaaagtcgtgtccacacagaacctggagcttggtctcatgacctatgatggcaacactgggctcctggccaccaagagcgatgaaacaggatggacgactttctatgagtaa

SEQ ID NO: 153530 - DNA, 6478 bp, Homo sapiens
atggctggatggttgcgtgcatggctggatggatggctgactggatggctggctggctgcatgagtgaatggatgatggatggatggatggatggatggattgatggatggatggatggatggaatcccatcgtgcctgagacccaggttcttcatgaagaaatcgagctccctggttccaatgtgaaacttcgctatctgagctctagaactgcagggtacaagtcactgctgaagatcaccatgacccagtccacagtgcccctgaacctcattagggttcacctgatggtggctgtcgaggggcatctcttccagaagtcattccaggcttctcccaacctggcctacaccttcatctgggacaagacagatgcgtatggccaaagggtgtatggactctcagatgctgttgtgtctgtcgggtttgaatatgagacctgtcccagtctaattctctgggagaaaaggacagccctccttcagggattcgagctggacccctccaacctcggtggctggtccctagacaaacaccacatcctcaatgttaaaagtggaatcctacacaaaggcactggggaaaaccagttcctgacccagcagcctgccatcatcaccagcatcatgggcaatggtcgccgccggagcatttcctgtcccagctgcaacggccttgctgaaggcaacaagctgctggccccagtggctctggctgttggaatcgatgggagcctctatgtgggtgacttcaattacatccgacgcatctttccctctcgaaatgtgaccagcatcttggagttacgaaataaagagtttaaacatagcaacaacccagcacacaagtactacttggcagtggaccccgtgtccggctcgctctacgtgtccgacaccaacagcaggagaatctaccgcgtcaagtctctgagtggaaccaaagacctggctgggaattcggaagttgtggcagggacgggagagcagtgtctaccctttgatgaagcccgctgcggggatggagggaaggccatagatgcaaccctgatgagcccgagaggtattgcagtagacaagaatgggctcatgtactttgtcgatgccaccatgatccggaaggttgaccagaatggaatcatctccaccctgctgggctccaatgacctcactgccgtccggccgctgagctgtgattccagcatggatgtagcccaggttcgtctggagtggccaacagaccttgctgtcaatcccatggataactccttgtatgttctagagaacaatgtcatccttcgaatcaccgagaaccaccaagtcagcatcattgcgggacgccccatgcactgccaagttcctggcattgactactcactcagcaaactagccattcactctgccctggagtcagccagtgccattgccatttctcacactggggtcctctacatcactgagacagatgagaagaagattaaccgtctacgccaggtaacaaccaacggggagatctgccttttagctggggcagcctcggactgcgactgcaaaaacgatgtcaattgcaactgctattcaggagatgatgcctacgcgactgatgccatcttgaattccccatcatccttagctgtagctccagatggtaccatttacattgcagaccttggaaatattcggatcagggcggtcagcaagaacaagcctgttcttaatgccttcaaccagtatgaggctgcatcccccggagagcaggagttatatgttttcaacgctgatggcatccaccaatacactgtgagcctggtgacaggggagtacttgtacaatttcacatatagtactgacaatgatgtcactgaattgattgacaataatgggaattccctgaagatccgtcgggacagcagtggcatgccccgtcacctgctcatgcctgacaaccagatcatcaccctcaccgtgggcaccaatggaggcctcaaagtcgtgtccacacagaacctggagcttggtctcatgacctatgatggcaacactgggctcctggccaccaagagcgatgaaacaggatggacgactttctatgactatgaccacgaaggccgcctgaccaacgtgacgcgccccacgggggtggtaaccagtctgcaccgggaaatggagaaatctattaccattgacattgagaactccaaccgtgatgatgacgtcactgtcatcaccaacctctcttcagtagaggcctcctacacagtggtacaagatcaagttcggaacagctaccagctctgtaataatggtaccctgagggtgatgtatgctaatgggatgggtatcagcttccacagcgagccccatgtcctagcgggcaccatcacccccaccattggacgctgcaacatctccctgcctatggagaatggcttaaactccattgagtggcgcctaagaaaggaacagattaaaggcaaagtcaccatctttggcaggaagctccgggtccatggaagaaatctcttgtccattgactatgatcgaaatattcggactgaaaagatctatgatgaccaccggaagttcaccctgaggatcatttatgaccaggtgggccgccccttcctctggctgcccagcagcgggctggcagctgtcaacgtgtcatacttcttcaatgggcgcctggctgggcttcagcgtggggccatgagcgagaggacagacatcgacaagcaaggccgcatcgtgtcccgcatgttcgctgacgggaaagtgtggagctactcctaccttgacaagtccatggtcctcctgcttcagagccaacgtcagtatatatttgagtatgactcctctgaccgcctccttgccgtcaccatgcccagcgtggcccggcacagcatgtccacacacacctccatcggctacatccgtaatatttacaacccgcctgaaagcaatgcttcggtcatctttgactacagtgatgacggccgcatcctgaagacctcctttttgggcaccggacgccaggtgttctacaagtatgggaaactctccaagttatcagagattgtctacgacagtaccgccgtcaccttcgggtatgacgagaccactggtgtcttgaagatggtcaacctccaaagtgggggcttctcctgcaccatcaggtaccggaagattggccccctggtggacaagcagatctacaggttctccgaggaaggcatggtcaatgccaggtttgactacacctatcatgacaacagcttccgcatcgcaagcatcaagcccgtcataagtgagactcccctccccgttgacctctaccgctatgatgagatttctggcaaggtggaacactttggtaagtttggagtcatctattatgacatcaaccagatcatcaccactgccgtgatgaccctcagcaaacacttcgacacccatgggcggatcaaggaggtcctagctttgagatgttccggtccctcatgtactggatgacggtgcaatatgacagcatgggcagggtgatcaagagggagctaaaactggggccctatgccaataccacgaagtacacctatgactacgatggggacgggcagctccagagcgtggcctgcaatgaccgaccgacctggcgctacagctatgagcttaatgggaatctgcacttactgaacccaggcaacagtgtgcgcctcatgcccttgcgctatgacctccgggatcggataaccagactcggggatgtgcagtacaaaattgacgacgatggctatctgtgccagagagggtctgacatcttcgaatacaattccaagggcctcctaacaagagcctacaacaaggccagcgggtggagtgtccagtacacgctatgatggcgtaggacggcgggcttccaacaagaccaacctgggccaccacctgcagtacttctactctgacctccacaacccgacgcgcatcacccatgtctacaatcactccaactcggagattacctcactgtactacgacctccagggccacctctttgccatggagagcagcagtggggaggagtactatgttgcctctgataacacagggactcctctggctgtgttcagcatcaacggcctcatgatcaaacagctgcagtacacggcctatggggagatttattatgactccaaccccgactttcagatggtcattggcttccatgggggactctatgacccccttgaccaagctggtccacttcactttagcgtgattatgatgtgctggcaaggacgatggaccttccccagactataccatgtggaaaaaacgtgggcaagggggccgggcccccttttaaaccgtatatgtttaaagagcaacaatcctctcagcagtgagctagatttgaagaactacgtgacaggtgaggattctgccaccaaagatgtgaaaagctggcttgtgatgtttggatttcagcttagcaacatcattcctggcttcccgagagccaaaaagtattttgtgccttcccccctatgaattgtcagagagtcaagcaagtgagaatggacagctcattacaggtgtccaacagacaacagagagacataaccaggccttcatggctctggaaggacaggtcattactaaaaagctccacgccagcatccgagagaaagcaggtcactggtttgtcaccaccacgcccatcattggcaaaggcatcatgcttgccatcaaagaagggcgggtgaccacgggcgtgtccaacatcgccagcgaagatagccgcaaggtggcatctgtgctgaacaacgcctactacctggacaagatgcactacagcatcgagggcaaggacacccactactttgtgaagattggctcagccgatggcgacctggtcacactaggcaccaccatcggccgcaaggtgctagagagcggggtgaacgtggacctggttccaaacccacgctgctggtcaacgggaaggactcgaaggttcacgaaacatggagttcagaacttcacgctggtggttcagcatccgttatgggcctaacccccgaacccttggaagaagagaaaaggccgcggtcttggaccaaggcgaagacaaagggccctgggcaccggcctgggccaaggagcagcaaaaagccagggacgggagagaggggagccgcctgtggactgagggcgagaagcagcagcttctgagcaccgggcgcgtgcaagggtacgagggatattacgtgcttcccgtggagcaatacccagagcttgcagacagtagcagcaacatccagtttttaagacagaatgagatgggaaagaggtaacaaaataatctgctgccattccttgtctgaatgggctcagcaggagtaactgttatctcctctcctaaggagatgaagacctaacaggggcactgcggctgggctgctttaggagaccaagtggcaagaaagctcacattttttgagttcaaatgctactgtccaagcgagaagtccctcatcctgaagtagactaaagcccggctgaaaattccgaggaaaacaaaacaaacgaatgaatgaacagacacacacaatgttccaagttcccctaaaatatgacccacttgttctgggtctacgcagaaaagagacgcaaagtgtccaaaaggaacaaaagaacaaaaacgaataagcaaagaagaaaacaaacaaaaacaaaacaaaacaaacacacggaccgataaacaaagaagcgaagtataagaaagaaggcctcatatccaattacctcactcattcacatgtgagcgacacgcagacatacgcgagggccagcgtcaccagaccagctgcgggacaaaccactcagactgcttgtaagacaaatacttctgacattttcgcttaagcaaatacaggtgcatttaaaacacggactttgggggtgatttgtgtgtagcgcctggggaggggggataaaagaggaggagtgagcactggaaataccttttaaagaaaaaaaaacatgagggaataaaagaaattcctatcaaaaatcaaagtgaaataataccatccagcacttaactctcaggtcccaactaagtctggcctgagctaatttatttgagcgcagagtgtaaaatttaattcaaaatggtggctataatcactacagataaatttcatactctttttgtctttggaggattcccattgtggacaggtaatacggcagttaccaggggtgtagtctgtttagattccgtagttcgtgggtatcagtttcggtagaggtgcagcatcgtgacacttttgctaacaggtaccacttctgatcaccctgtacatacatgagccgaaaggcacaatcactgtttcagatttaaaattattagtgtgtttgtttggtccagaaactgagacaatcacatgacagtcaccacgaggagagaaaattt

SEQ ID NO: 153531 - DNA, 498 bp, Homo sapiens
ggagagagtcacactgttaggccaaggtctattgttcaccaggcactgaaagcagatgtgtgaagagaagtggtcatgtgacaacatgcagtctcaatgcccctgggtgtccagacacactggctgctgtccaccagccgcaggtggtaaagacccaaaagccacctctgcaatttttattccaaactagaggactggctctgaaggtgcagcatgagggttcatcagagccaaccactgtcaagtgtggaaagcactggtgcacaccacgaaaagatgtcctatcagtccacgcatgatgggtgcggggacttctgcctcccagagttcaagaacaaatggctcagctggtccctgcagaccttccttgggtgcatgggggacaggacagcctagccgtcgcagtctcagaatccattttatggattaccaaaagtcctgcgctaggtccctggcaccgcagcagtgctgttaccaatctgatgttggagcggccgc

SEQ ID NO: 153532 - DNA, 487 bp, Homo sapiens
ggggaggacgtgttccgaggaagccagacccggagccgtggcctgccgggccggcgacatggatcccctgttccagcaaacgcacaagcaggtccacgagatccagtcttgcatgggacgcctggagacggcagacaagcagtctgtgcacagtgagtaattaactgtggagaccagagtcctttctctgatgacagggtgctaatgggctgggcttcctgactgcactctgccttgggggcttaatgattcagcgtggaatgagttttgttgttagggtggacagaaaaaccctatggcaaagtcactgatttccctgagtgtgccctttggaatcccacaagtcttatcccccattacccctccactcaacctgacatggccctatgggaatggaagcgcttgcctccatctatcttaatctaattacctagtccttagaggaatgtactccataaaaaattcagagatgtttaactggaattgg

SEQ ID NO: 153533 - DNA, 1926 bp, Homo sapiens
atgcgccccccgcccgcgctggccctggccgggctctgcctgctggcgctgcccgccgccgccgcctcctacttcgggcgtcagtcccgctctctgatgccctctcgggatcctcacgccggtgccctgtctgccgccatcctggcctccggcgagccgtccttgcctcggactccttccccaccctccgccttcgccctgcggagcggagaccgagagggctgggtggatgggtgggacgggctgttcccggtctcggggcagaggatcgtgcgcgtccagggagaatgggggaaacctcggacgtcatttgcatttgattataacacaaagtgctttggcatcctgataagagaatatgcaaacatcaggagggcaggaaacatttacgtatttggtcctctgatgaatgactgtccccagcagatggcaagttccttgcaggccaaaacctgggctgcttttgctcatcagtgctcagctgccaaggggcagctgcacacagagttgctccatgaagatgcgttgaagaaatggaccagtccagcaatgggctgggaacgcagcaggagccatgacaagcccaggcggctctcccgacccttggtgcccccgaggccatttccccgcgctccctgtgccggcagcagccgcgtgcggagagggctcgccgaccagaaggggcagcagttccctacacagcggtccctgctccccaccggcagtgcttccttcaccccagaccggggctgcgcagagtcctggtgcctcaggccgcgggcgctgattggctgctcgctgacatcctcaaacccggctgctccgcgctgggctcgggaggggggcggctgcgggtggaggtgcgcttctgacaagcccgaaagtcatttccaatctcaagtggactttgttccaactattgggggcgtcgctccccctcttcatggtcgcgggcaaacttcctcctcggcgcctcttctaatggagccccacctgctcgggctgctcctcggcctcctgctcggtggcaccagggtcctcgctggctacccaatttggtggtgctgggcccagggctgtgtggctgtgaatatctttgcagacatctacctgtgggttagagccatcctgatattacatctgtacatccatgttatcttgtatgctggaaaatggtctcagtgggccatgggggctggagagaaggtcctgcgctcagaggctgaaacccggttcttcagcgttaggcagcctgtccctcgtgagcacagtggctaccccaggcaggtccacgagatccagtcttgcatgggacgcctggtatacggcagacaagcagtctgggcacatagtggaaaacgaaatccaagcaagcatagaccagatatttcagccggctagaacgtctggagattttgtccagcaaggagccccctaacaaaaggcaaaatggcagactttccgggttaacagtttaaagtatgatgtccagcacctgcagacttgcgctcagaaacttccaagcatcggcgccatgcaagggagcagcagggagagacagcgagaaagagctttctgtcttcgaaacctttcaccacttaaacgactctggacaccaccattaccaattgggaccgaattcacttgcagttttaacttccttcccttccaagaaagtttcacaacgggcatgggattgacctcattttagatggggcacaatatttttagatggactgaggacccagagacttgaccttgaaggggactcagaagaagatccttgacattgccaacatgctgggcttgtccaacacagtgatgcggctcatcgagaagcgggctttccaggacaagtactttatgataggtgggatgctgctgacctgtgtggtcatgttcctcgtggtgcagtacctgacatga

SEQ ID NO: 153534 - DNA, 3206 bp, Homo sapiens
ttctcgggtcgacccacgcgtccgagacccggagccgtggcctgccgggccggcgacatggatcccctgttccagcaaacgcacaagcaggtccacgagatccagtcttgcatgggacgcctggagacggcagacaagcagtctgtgcacatagtagaaaacgaaatccaagcaagcatagaccagatattcagccgtctagaacgtctggagattttgtccagcaaggagccccctaacaaaaggcaaaatgccaaacttcgggttgaccagttaaagtatgatgtccagcacctgcagactgcgctcagaaacttccagcatcggcgccatgcgagggagccagaggagaagacagcgaagaagagcttctgtctcgaaccttcaccactaacgggactcagaagaaagatcccttgacattgcccaacatgctgggcttgtcccaacacagtgatgcggcctcatcgagaaacgggctttccccaggacaagtactttatgataggtgggcatcctgcctgacctttgtgggcattgttcttgtggttccaataccggacatgagccagccacgctcagtggctgaacagcattcccacagccttgcaagtgtgtgtgtgtgtgaaagagagaggggggcccagaggccgccttttgaaatgtttgcctgtctgaactgtgaagacacttgggagtgattgtggtctaatttccaacctgctctgttttctgtgacatcttggagggggagctagtgccacccaccatgcgcggtgcttaggaaatgaaagaagtcccgggtctgtctctctcactctcgctctcactgggggagggaaagaatggctttggtggctttgttcacacagctgatgcgtgccctgggaaggtgtccacagtgagccctgtgtgcaggactgtccacacggttcacaccttgtcaccatcaggcctttctggctcctgatagggtggagcaaaagtggaaaggaaaggaaagaggccttttctcacagccattatattaaatagtaggtcgattcacatcctcgtgctcctggccaccctcccctgtgcctcagtgacatgtagatgactgactgccaatacttgtcaccattccctggaagcagctacctaggggaaacaagatgtagtgctattgccgataacaagtaagattttccacactacagctgggtgtttctcttttctaaagtgaggccagtgttatttcccgggagtgttcagtcttgaccctagtcactgattttttctaagttgttaataagagtggttgggcttttaaggttcagagactgtgggcttgggcaccctgcgcccaggctttggtgggccctttgcccccttagaaaagtagctgtaggcaaagatttgtgattttccaattacagtctcagctctagttttagtatctctaattctttggttcccttctcttccctgaaatatattagcacctgccagccaggccctcattttgcccagccgagtgtgtgggcagatcccaccgtggagacatcttgtagtgtgtatgtccttgtaacactctgttttcagggactacaacctttttccttctgtgaccagccccggattcaggctgtactaataccaggtatattgtggaatttagtataaaggccaatctgtcctgaagtccatctaatgtgatgaatcactgaaagtctcagaaagacctggttagtgtatgttctcatttaccacaggcctaccagccctgggcacagcagcttcatggcaagacataaaatgacactcaaaatccttcagatctggaaaccggctcagtattaaccctacctttggttgtcctgccctacctgctctgttagtttcttgttgcttgaactgtcttctgtcttatttcccttcctttctgtgttcctcttcacctcttcttgttcccctccccgctgctctgtaggtcatgttgggtccttttcagggcacctctgtggggcatagctcccctttggtaagttttcttaattgtcatagattaactgagtttcctgggatgctaatttcacactttcggttggaggagatctccattgttcctacccctccgggccaaatgggccccaggtttccaaggaaggagcaatctgtgactcctaaaatgggttggggccctgccagagttaaagccatgacttgagggtgggactggggggttgcagcatctttagacctagatctgtctaactctggggaggcacattgacatttccattacacacagcactgctgcggtgccagggaccaacacgcagggcttttggtaatccataaaatggattctgagactgcgacggcaaggctgtcctgtcccccagggcacccaaggatcctgccagacagcacactttggaggaaggtctgcagggagcagctgagccatttgttcttgaactctgggaggcagaagtccccgcacccatcatgcgtggactgataggacatcttttcgtggtgtgcaccagtgctttccacacttgacagtggttggctttgatgaaccctcatgctgcaccttcagagccagtcctctagtttggaataaaaattgcagaggtggtttttgggtctttaccacctgcggctggtggacagcagccagtgtgtctggacacccaggggcattgagactgcatgttgtcacatgaccacttctcttcacacatctgctttcagtgcctggtgaaaaatagaccttggcctaacagtgtgactctctccaccgcctcagtgtagggaagggtccaggccagggaaggagcaccctctagtggaggcgggggtgaattcttaggtcgagctgatgcaagaaactccggtagccagcctctgtgaccttgtacatgagtttggtgtgcctattgtgatttaaaacaggtgggttatcaaaaaggaacttgagatctctttattacatggacatttacttcagggggaccactgtaagaaaagccaaactccaagaccaagtaagttagaggagtcttgattttttagacttcactgcggagttctgtacaccctttgccctgatgaatttgaatgggtttgatttgcaaatttggatttacacccattgttttggaagcacatcagctgaataaagttgaggtttattttatttagaaaatcaaaaa

SEQ ID NO: 153535 - DNA, 180 bp, Homo sapiens
tgctaggtgtcactactctcagagcacataggctaagaggcttcctcagtaattttcatcaggccttctccccatccatttccaatgcttagccagttatgaaaattatatgaaaatcctgaacaaatctaatgcagttgtgggagtctagtagtgatggatcacatggcaagttcttgg

SEQ ID NO: 153536 - DNA, 786 bp, Homo sapiens
tccctgcctctcagcagcgccgccgcctcccagcgccgatgcttcatccggcggggcggctgagggtgagagctcaaaaattcccagactgttttgatgataaggtccaagaacttgccatgtgatccatcactactagactcccacaactgcattagatttgttcaggattttcatataattttcataactggctaaggattgttttctgctggttgctttctgaaattctactggacctaatgccattggaaatggatggggagaaggcctgatgaaaattactgaggaagcctcttagcctatgtgctctgagagtagtgacacctatcagtcgttcaaaagatgatcaagaggagcatgaaaaaatccccctgaatccattggctttcttccctatactgacaacagtttacttgtgtaagagatgagggtctcatccttttgcccaggctggagtacagtggtgtgtatgtagcacactgcagccttcaactcctgatcctccaacctcagcctccacagttgctgggattacaagttcaagttggtgtgtatctgcaaaggcgatggaaaggagttcttacatatgcatattctgaagaaggatgttacccttactgaaaaacttattccaagatatgtttaatcaatcatgagaaaaataaagagacatccttatgaatggagaataaagtcctcagggtttttttctaattccccatgtgaatgaagagctgtgttattctaaatatagtgtttgtcataaggcaaaaaaaaaaaaaa

SEQ ID NO: 153537 - DNA, 677 bp, Homo sapiens
tccgccatctttccagcctcagtcggacgggcgcggagacgcttctggaaggaacgccgcgatggctgcgcagggagagccccagcttgtattggttggtgatggtggtactggaaaaacgaccttcgtgaaacgtcatttgactggtgaatttgagaagaagtatgtagccaccttgggtgttgaggttcatcccctagtgttccacaccaacagaagacctattaaggttcaatgtatgggacacagcccgccaggagaaattcggtggactgagagatggctattatatccaagcccagtgtgccatcataatgtttgatgtaacatcgagagttacttacaagaatgtgcctaactggcatagagatctggtacgagtgtgtgaaaacatccccattgtgttgtgtggcaacaaagtggatattaaggacaggaaagtgaaggcgaaatccattgtcttccaccgaaagaagaatcttcagtactaccacatttgtgccaaaagtaactacaactttgaaaagccctttctctggcttgctaggaagctcattggagaccctaacttggaatttgtgccatgcctgctctcgccccaccagaagttgtcatggacccagcttttgccagcacatatgagcacgacttagaggttgctcagacgactgctctcc

SEQ ID NO: 153538 - DNA, 552 bp, Homo sapiens
atggctgcgcagggacagccccaggtccagttcaaacttgtattggttggtgatggtggtactggaaaaacgactttcgtgaaacatcatttgactggtgaatttgagaagaagtatgtagccaccttgggtgttgaggttcatcccctagtgttccataccaacagaggacctgttaagttcaatgtatgggacacagccggcctggagaaattcagtggactgagagatggctattatatccaagcccagagtaccatcatagtgtttgatgtaacatcgagagttacttacaagaatgtgcctaactggcatagagatctgaagaatcttcagtactacgacatttctgccaaaagtaactataactttgaaaagcccttcctctggcttgctaggaagctcattggagaccctaacttggaatttgttgccatgcctgctctcgccccaccagaagttgtcatggacccagctttggcagcacagtatgagcacgacttagaggttgctcagacaactgctctcccggacgaggatgatgacctgtga

SEQ ID NO: 153539 - DNA, 2636 bp, Homo sapiens
cgcccctgctctcgcgccggcgtcggctgcgtctccggcgtttgaattcacgcttccgccatctttccagcctcagtcggacgggcgcggagacgcttctggaaggaacgccgcgatggctgcgcagggagagccccaggtccagttcaaacttgtattggttggtgatggtggtactggaaaaacgaccttcgtgaaacgtcatttgactggtgaatttgagaagaagtatgtagccaccttgggtgttgaggttcatcccctagtgttccacaccaacatgaggacctattaagttcaatgtatgggacacagcctggccatggagaaattctggtggactgacgagatgggctatatatcccaagcccacgtgtgcccatcataatgtttgactgtaacatcgaggagttacttacaaggaatgtgcctaactgggcattaggagatctggtaacgagtgttttgaaaacatcccccatttgtgttgtgtggccaacaaagttggatattaaggaccaggaaagtgaaggcgaaatccattgtctttccaccgaaaagagaatttttcagtactaccgacatttctgcccaaaaagtacctaccaacttgaaaaagcccttcctctgggctttgctaggaagcctcatgggagacccctaactttggaatttgttgcccatgcccttgctctcgcccccacccagaaggttgtcatggaaccccagctttggccagccaccagtatgaagcacgacctaagaggttgcctcagacaactgcctccccccggatgaggatgatgaccctgtgaagaaatgaaaactggaagccccagcgttcagaagtcctagttttaaaaggcaagctgcccctgtgatgtccagcggtgccagcgtgtgtgcccacctcattattatctagctaagcgggaacatgtgccttcatctgtgggatgctgaagggagatggagtgggcttccgggagtgaatgtggcagttttaaaaaataacttccattgttttggacctggcatatttagctgttttggaacgcagttgattcccttgagtttcatatataagactgtctgcagtcacatcacaatattcagtggtgaaatcttgtttgttactgtcattcccattccttttcggtttagaatcagaataaagttgtatttcaaatatctaagcaagtgaactcatcccttgtttataaatagcatttggaaaccactaaagtagggaagttttatgccatgttaatatttgaattgccttgcttttatcacttaatttgaaatctattgggttaatttctccctatgtttatttttggacatttgagccatgtcacacaaactgatgatgacaggtcagcagtattctatttggttagaagggttacatggtgtaaatattagtgcagttaagctaaagcagtgtttgctccaccttcatattggctaggtagggtcacctagggaagcacttgctcaaaatctgtgacctgtcagaataaaaatgtggtttgtacatatcaaatagatattttaagggtaatattttcttttatggcaaaagtaatcatgttttaatgtagaacttcaaacaggatggaacatcagtggatggcaggaggttgggaattcttgctgttaaaaataattacaaattttgcacttttttgtttgaatgttagatgcttagtgtgaagttgatacgcaaggaaaatggtccatgtttacccacagttttcaggtactcctagactttaaagatgtcttgaacatttaagttcttcagcagttcacactacaccgtttttttgtttttttttcccccccgggaggttttttttgtaggggcagccacagcagagcaggacatggatgaaatactaggaatatgcacagtgggggcagtgtgggggcttctcagtaatggagaacagttggtgaaacttttttttttttttaactaagcatttaatttatcttgcatattttccacatttaaaaatgaattaggtctattaggataattaggagtttgatcccatcaacactattcttgtagcagttaggaatcttgagctatttttttctcatacgattacctatagtcccagtttacccaaagttttcctttagatgtctgataatcttgagatgattgcttaccttaaaaggtatagaaaggatcacttaaatatatggaaaaatgaaataagggtgaatctgaataaagttctacttactgtattaactggcaacagttgagtttcttaaggatctgaattgctgtgtatgttacgctgtattcagaaccagtttctaaccagcctgtgagatgggaagtttttttccccataattgggatgaaacctttcattcaggtattttgaaattgaaaggtgtatggtgttggtattgtaaccttgtggagattgcaaagtggtgttgacagttctgggagtcttctatggtaaacagttgaaatttgggaagtgaccgtcactttacctgtctaaccgtggtgtgggagagaatttaccaagtcctttattgaaagaataattgttgcaaaatatattgcttctactttgcctggaaaaaaaaaaaaaaaaaaa

SEQ ID NO: 153540 - DNA, 1696 bp, Homo sapiens
attcggcaccggaggggctgtggagtacgcggggacccggctgcggtggctgcgggactgacgaatcttgctgtgtggcccaggctggagtgcccggctggtctcaaattcctgacctcaagtgatctccctcccaaagtgttgcgattgcaggtgtgagccactgcacctggctgctgagaaatctttgcctacagtgagggaaactactaaagttcctggggaagcaaagtcagaatttcataagaacaaaatggatgggagaggaggaaaacctatgggtggctgtgaaggacctgatgccatgtatgtcaaattgatatcatctgatggcccatgaaatttattgtaaaaagagaccatggccttaccatcaggcaccgaataaaagcccatgttgagtggcccagggtcagtttgctggaggaacgaaaacccattgaggtcaattttaggagagataccttctcacatgtgcaattcgaaaggtatgcaatgtattttttacgtacaaggttccgctacacctaacagctcccacccgagatttcctgaattccccaatttggcacctggaaatttgcactgggaacttgcttgatggcttgcggaacttccttaagattggttaaattaaaattaaattataattaaacctggttaactccttttcagtaatttaatacctgtagttcaggttagtaacctttttcatatataggcatgttgcctgtatggcagttggaactatattaaaggttcattggcaaaggcagattatcttgttttttttgcatagcaatcaaagttgaaatttgtttgctacatcaacaaattaggggacattttccaccaaactgagaaataaacaaatatggccaattcgtaggtggttttgccctatccctttgaatgtgaccttaaaatccagcaatgatgatatagtaaatactgaaatttaggtgtaaatcaatacgttcctacagggaaataatgaggctaagtatttttatgtttttagtggttttttagaaaccccaaccctatagccgccattagccattacctagagttaatgccaaataattgccatttataaacatgtttaataacttagcccaaaacattgatttttataactctcccaagtatgagttgaaatttccttatgtcttttgataaactgccagtattcctttaagtgtactttgtccttttgtttattgctacaatttaagaactttatttaaaaacaattttggaaggttactaggtacagcttttgcagaagaaactgaactgtagccagatggtcagcaagtaaactacatgacttagagttcttgtgcattatacattttgggtaattcaaagtactgtatttgcattgactataaagcgtcgtttgcaatatttattcttccttcatagtcccttgttgtgattatacttccagttggtttaaatgtattttaaaagactcactattaactttattcagatcttaaaagctacacctttttgaactattccagtctttctccatccaattagaatgttatggaataacatgtgaagagatacagtgaaaatcatattataatgcattgaagatatcctacatgaattatcttctattaaaatatgtcccaataaatatacccataatcagtgggtcttctactgaaaaaaaaaa

SEQ ID NO: 153541 - DNA, 348 bp, Homo sapiens; identical to SEQ ID NO: 114686

SEQ ID NO: 153542 - DNA, 518 bp, Homo sapiens
ttttcatttttacttaaatctatttattgaaaaggtcacaataaatagaatgccactaccacttgtcctaaacaataaagtagccaataaaaatataccattaaaacaaaaacagtgctaaaaaagtctggaattttttccacctgccctaagcccaagtcctgctctgattttgtgccacttaatgcaggccccataccacctaaaagtatcttgggaaccaacggacccacccacactttggaaatgctggactaacgtctccctctgcctcacgcttaacacaaaggggaaacacacacctgtggtcccctctctgatcataccttcaaggcaccaccagatcccctccaaatatgcctgctctcacaccaaggcccagcaagtccctctcaacaaacccacccctatcagccctcagaggtcaccgctgactcaggtgggacacaggtagacaaggccaaccaggaggaggccacgaacaccaagcatcatgagcaggaagaggagcaggatgg

SEQ ID NO: 153543 - DNA, 2157 bp, Homo sapiens
atgagtgcctactgcctccagctgggaggactgcaagctcttcttgctctcacccagacccctgggcacagagacagtctccctgatgctcagccggcagctgtcctggtgtgtggatggccctggctggcgtccttctcagagaggaccattgttgggcataaagaatggaccattaaggacaaactaaaaaacaaattcaaggatgaatttgatatagtctccctgccttgcactttaggttctcacccccaaccccaggaccccatgctcaagctcccatggtcaatcacatatggcagatgtcttgctccaggagatcacacggtctccttggtgataaagctggttgagtccgcctctctgtcacttgcagtctcaaacatgctgagtgacatgataagatggatgcctgctggctgtggccgttgcctcctaggactccagagtgagagcagggctgtttgtgggcagtgcgtgggcatggagcaggtctgcagggtctccggtccccacatccgctggatcccccagcctcagctgcactcctgcctcttctttctctacccatccccatatcctttagagccatcatccaacaccagtttcatctgccctcactccagaacctacaatggttccctattgtcctgcattccaaactcagcagcagcagcagcaccacccaccccacaagccaccagctttccttcctgtccctccccaaagcagaggcttcccactgggagagttgttgaggggtcagaccatcgggttcacgaggccaggcttcctggcaaccactcccggagcaggggagtggattctgctccaccaaccctggctcacgctggcctgctcttgacggaagagaagacccttaaggaaaatggccgccgagcagaagctctgagggttggcgtgcattggcggcatggaacaagtcaggggcctggaaggacactgtgggcagaaaaggtgaagccccacttcaggacaaggggccaagtgtacgatgcttcctcagcacctgtgactgagcacacggctactgagctgcctgctggcaatcaagggagccagccagggctgcaggaggggggtctagaggggactgtggtcaccctggtgtcctggaaagtcactaggtttctaggcgatgctgatgcaggtacggccagaggccccataccacctaaaagttctcgggaaccaacggacccacccacactttggaaatgctggactaacgtctccctctgcctcaacgcttaacaccaaagggaaaacacacacctgtggttccccctcttctgattcatacctttcaaggcaccaccagatcccctccaaatatgcctgctctcacaccaaggcccagcaagtccctctcaacaaacccacccctatcagccctcagaggtcaccgctgactccaggtgggacaccaggtagacaaggccaaccaggaggaggccacgaacaccaagcatcatgagcaggaagaggaggcaggatggatcttcaccggctcccacaagcaatggttgccgaagatgccaactgcggaaagcccatgtttcaccagctgccggtttaaggtcattgaagggggaactgagcagcacccagccttggcaccttgcctgcttgctggcgggggccacggaccccctgggggagcaccatggcccctgttgaagaaagctctgtcgaggaatgctacctcttggtggctgggtagtggtcctcactcgggggtcgtctgtcctgcacgatttccccattggccaagatccgcaccatccttcccagggcgctgtgggtccctgatgggctgcacctgcattgtgtggtcagggtgggcaggctaatggaagccaagtggcacagaagttctccccaccacaaaacctttagctgttagtgatctgggaccagactcgtgaagatctgtggaggattttccccctgacctcaaaaagcttgaaggaaaaaatttaccagaaattgagggaggcttgcagtcagtgatgttcacagaggtgacccacgctgagtagatgctgtgtctgcaggcgcgactccgggcctcggcggcgtccactcccggcggctccaggcggtttcctcccacctgacctcacaggaagcgcg

SEQ ID NO: 153544 - DNA, 417 bp, Homo sapiens
atgagccggcaggtggtccgctccagcaagttccgccacgtgtttggacagccggccaaggccgaccagtgctatgaagatgtgcgcgtctcacagaccacctgggacagtggcttctgtgctgtcaaccctaagtttgtggccctgatctgtgaggccagcgggggaggggccttcctggtgctgcccctgggcaaggttatcaatactctgtctgaccatcatcatcgtgggactgactttggtggaagtccttggttacatgtcattattgcgtttccgacaagttataaagttgtcattaccctctggatagtttacctttgggaacaggcctttgagagcagccagaagtacaaagaggggaagtacatcattgaactcaaccacatgatcaaagacaacggctgggactga

SEQ ID NO: 153545 - DNA, 1777 bp, Homo sapiens
gcggccgcagcgggggcccgggagcgcagggcgggcctggaagagctccgccccaaggggcgcggccaccccggaggcgggcgcacggctgcttctcattcattgtcttgacaagagcatcttcagcgggcgagtccccggctcctccagctccttcctcctcttcctcctcctcctccacctccggcttttgggggatcactgtcctctctcggcagcagaatgagccggcaggtgggtccgctccagcaagttccgccacgtgtttggacagccggccaaggccgaccaagtgctatgaagatgtgcgcgtctcacagaccaccttgggacagtggcttctggtgctggtcaacccttaagttttgtgggccctgatctgtgaggccagcgggggaggggccttcctggtgctgcccctgggcaagactggacgtgtggacaagaatgcgcccacggtgcggaggtgacacagccccctgtgctagacatcgcctggtgcccgcacaatgacaacgtcattgcccagtggctccgaggacttgcacagtcatggtgtgggagatcccagatgggggcctgatggctgcccctgcgggagcccgtcgtcaccctggagggccacaccaagcgtgtgggcattgtggcctggcacaccacagcccagaacgtgctgctcagtgcaggttgtgacaacgtgatcatggtgtgggacgtgggcccctggggcggccatgctgacactgggcccagaggggccccccagacgcgaactaccggggggactgggagcccgaatggaggcctcatttgtacctcctgccgtgacaagcgcgtgcgcatcatcgagccccgcaaaggcactgtcgtagctgagaaggaccgtccccacgaggggacccggcccgtgcgtgcagtgttcgtgtcggaggggaagatcctgaccacgggcttcagccgcatgagtgagcggcaggtggcgctgtgggacacaaagcacctggaagaaagccctgtcccctgaggaagttgcacaccagaaacggtgtccctgtggccttttttggcccttgacaccaacatcgtctaccttcgtggcaaagggtaccggcccaatccgggtctttgaggatcacttccgaaggcccctttcctgcactatctcttccatgttcagtttcaaaggagtcccagcgggggcatgggttacatggcccaaaccgtggcctggaggtgaacaagttgtgagatcgcagggttctacaaactgcacgacgggagggtgtaagcccaatgccaaagccagtgcctcgaaagtcggaccttgttccaggaaggacctgggacccacccaaccgcagggcccggacccttgccttcacggcttgaaggagtggctggggggtcgggatgctgggccccttccttcatctcccttcaaaggatggcttacgtacccccaaagagccgggagcttgagggtcaaccggggcctggacccccgggcgcaggaggagcagcaccagaggccagtggcactcccagctcggatgccgtgtctcggctggaggaggagatgcggaagctccaggccacggtgcaggagctccagaagcgcttggacaggctggaggagacagtccaggccaagctatgactccgcagggcctccaaccaggtcaaccaattacaaccaacccattcccttccctttcccacccacttgccggggaaaaaaatcttattaaattggctttattttttggtaaaaaaaaaa

SEQ ID NO: 153546 - DNA, 2967 bp, Homo sapiens
atgaggagagaccccacgccgcccaggggcctcccgcggcagaggccgacgccgagcccaaggacacgctcccggggacaccaaagccaaaggccaaaggccaagtccgagccccagcccgcgcccgcggcgacccccggaggccgaagggcgtgggaaccacgggcgcaagccggctgcccacccccgccccgggccgcctctcccaggagattagtgcagggcgagcggccggaatccgggaaccgtagccgacaggcagcttacccacgccgcgccagccgggcacgaacctgcacaacgcgacttccaccaaccttgcgccagcgcgcactgacgcagcgcccatgctcggtacccaggaccaatagaaagctccgaaggggacctgggccaatcacattgcgccgccctgagtcgtgctcccgccccgcgtttgctacggaggcccacgacgcccaggcgcttccgcgaccacccggagtgattgcccggcagagcgcgatgcatagagctctggctgctttaaaaaataaacctctaaatcatgttcacaaggtagtcaaggagcgtctgtgcccttggttgtgttcacgacaacctgagcctttcggggtcaaattccatcatgcccattgtaaaaagtttcattcgaaaaatggaaatgaccttcatccactcggtggaccagtgttctctcaagtatctgactgcgacaggcttgaacaaaatgttaaaaatgaggagagtcagatgttttacaggagactgagcaacttgacttcatcagaagaagtgctaagttttataagcacgatggaaaccctgcctgacactatggcagcaggagctttacaacgaatttgtgaagtggaaaaaaaggatggtgatcaagggctgccaaaagaaatactggagaatagcatctttcaagctttatgctttcagtttgaaaaggagccctcacagctgtcaaacactagtttagtgactgctttgcaagctctgattctgttgcatgtggatcctcaaagtagcctgttgctgaacctggtggcagaatgccaaaatcgtctcagaaaaggtggcatggaagttcgcaatctttgtattcttggggaaagtctgattacactgcacagttcaggttgtgtgacactagaactcattataaatcaacttcaaggtgaaaaattggaaacatttaccccggaggatattgtggccctttatagaatcttgcaggcatgtactgaaaaagtggatgaacaccaaacatttttaaataagataaacaacttttccctatcaatagtttccaacctgagtcctaaattgattagccaaatgctcactgccctggtggttcttgatcaaagtcaagcatttcctctgattataaaattgggcaaatatgtcgtgaggcatgtcccacatttcactaacgaggagcttaggagagtcttggaggcgttcatatattttgggcaccatgacacattttttacaaaagccctagagcatcgtgtagctgcggtgtgcctcacgttggatcctgaagttgtctgcagggtcatggagtactgcagtagagaactgattctttcaaaacccatcctcaatgcagtggcagaaacttttgtttgccaaacagaaaaattttcacctcgtcagatttctgccttaatggaaccatttgggaaactcaattatttgccaccaaatgcctctgctttatttagaaagctggaaaacgtgctattcactcatttcaattattttccacccaaatcattattgaaacttcttcattcatgttcacttaatgaatgccatccagtcaactttctggcaaaaatattcaagcctcttttccttcaacggctgcaagatgttgaaattaaattagatgaagaaggatttgtattgccatccacagctaatgaagatatccataaaaggatagcactgtgtattgatggtccaaaaaggttttgctccaatagcaaacacttactggggaaagaagctattaaacaaagacacctacagttactcggttatcaagttgttcagcctctgctgatcctgtctcatttggctctcccctaccctcttcacgtacgcattcagcagacagttctgatcacgctgggcacactcaatgctccagctctagggccaaataggaaagagcccctgcccttgaggggcttgaaacagggctcctcggacaccaaggaggcaagacactccaggggagactgtgaggccctggggcagtggtcgtacaagttcaggagtcaacaactgaaggagcgagcctccaccgagcagacaggagcaagtgatgaaacatgcctccatgttgatcctctggggcaattcttcaaggcctctccaggcccctcagaaaggttcatgaccattcaccagttgccttcagcagtgacctgggcgggggcgctggacggtggcggcatggaggacgacgaggaggagaccaccgcgtccacgctgcggggcaagcccaggccgccgcccgtctcggcgcagtccgccttcagctacatcccgccgcggcgcctggaccccaaagagcacagctactactaccgcccggcgcgggtgaagaaggtctttgcttcccctttgctttctgccatgattacaggaattatttccctctatgattgtatttttaagaggcgcctagattatgatcagaagttgcaccgagatgacagagaacatgcaaaaagcctgggacttcatgttaacgaagaggaacaggagaggccggttggagtgctgacgtcttctgtctatgggaagcgcatcaatcagcccattgagcccctaaaccgggactttggccgtgccaaccatgtgcaggctgacttctacaggaagaacgacatccccagcctcaaggaacccggctttgggcacattgctccatcctga

SEQ ID NO: 153547 - DNA, 966 bp, Homo sapiens; identical to SEQ ID NO: 129424

SEQ ID NO: 153548 - DNA, 2184 bp, Homo sapiens
atgaggagagaccccacgccgcccaggggcctcccgcggcagaggccgacgccgagcccaaggacacgctcccggggacaccaaagccaaaggccaaaggccaagtccgagccccagcccgcgcccgcggcgacccccggaggccgaagggcgtgggaaccacgggcgcaagccggctgcccacccccgccccgggccgcctctcccaggagattagtgcagggcgagcggccggaatccgggaaccgtagccgacaggcagcttacccacgccgcgccagccgggcacgaacctgcacaacgcgacttccaccaaccttgcgccagcgcgcactgacgcagcgcccatgctcggtacccaggaccaatagaaagctccgaaggggacctgggccaatcacattgcgccgccctgagtcgtgctcccgccccgcgtttgctacggaggcccacgacgcccaggcgcttccgcgaccacccggagtgattgcccggcagagcgcgatgcatagagctctggctgctttaaaaaataaacctctaaatcatgttcacaaggtagtcaaggagcgtctgtgcccttggttgtgttcacgacaacctgagcctttcggggtcaaattccatcatgcccattgtaaaaagtttcattcgaaaaatggaaatgaccttcatccactcggtggaccagtgttctctcaagtatctgactgcgacaggcttgaacaaaatgttaaaaatgaggagagtcagatgttttacaggagactgagcaacttgacttcatcagaagaagtgctaagttttataagcacgatggaaaccctgcctgacactatggcagcaggagctttacaacgaatttgtgaagtggaaaaaaaggatggtgatcaagggctgccaaaagaaatactggagaatagcatctttcaagctttatgctttcagtttgaaaaggagccctcacagctgtcaaacactagtttagtgactgctttgcaagctctgattctgttgcatgtggatcctcaaagtagcctgttgctgaacctggtggcagaatgccaaaatcgtctcagaaaaggtggcatggaagttcgcaatctttgtattcttggggaaagtctgattacactgcacagttcaggttgtgtgacactagaactcattataaatcaacttcaaggtgaaaaattggaaacatttaccccggaggatattgtggccctttatagaatcttgcaggcatgtactgaaaaagtggatgaacaccaaacatttttaaataagataaacaacttttccctatcaatagtttccaacctgagtcctaaattgattagccaaatgctcactgccctggtggttcttgatcaaagtcaagcatttcctctgattataaaattgggcaaaatatgtcgtgaggcatgtcccacatttcacttaacgaggagcttaggagagtcttggaggcgttcatatattttgggcaccatgacacattttttacaaaagccctagagcatcgtgtagctgcggtgtgcctcacgttggatcctgaagttgtctgcagggtcatggagtactgcagtagagaactgattctttcaaaacccatcctcaatgcagtggcagaaacttttgtttgccaaacagaaaaattttcacctcgtcagatttctgccttaatggaaccatttgggaaactcaattatttgccaccaaatgcctctgctttatttagaaagctggaaaacgtgctattcactcatttcaattattgttccacccaaatcattattgaaacttcttcattcatgttcacttaatgaatgccatccagtcaactttctggcaaaaatattcaagcctcttttccttcaacggctgcaaggtaaagaatctcatttggacacattgagtcgggcacaactgacccaacttttcttagcctcagtcctggaatgccctttctataagcctaagaacttggcgccctgcatcccagccacgccagtcatgactaaaagaggccaaggtacagcttgggctgtggcttcagagggtgtaagccccaaatcttggcagcttccacatggtgttgagcctgtgggtgcacagaagtcaagaattaaggtttgggaacctctacctagttttcagaggatgtatgaaaatgcctga

SEQ ID NO: 153549 - DNA, 1670 bp, Homo sapiens
atggaagttcgcaatctttgtattcttggggaaagtctgattacactgcacagttcaggttgtgtgacactagaactcattataaatcaacttcaaggtgaaaaattggaaacatttaccccggaggatattgtggccctttatagaatcttgcaggcatgtactgaaaaagtggatgaacaccaaacatttttaaataagataaacaacttttccctatcaatagtttccaacctgagtcctaaattgattagccaaatgctcactgccctggtggttcttgatcaaagtcaagcatttcctctgattataaaattgggcaaatatgtcgtgaggcatgtcccacatttcactaacgaggagcttaggagagtcttggaggcgttcatatattttgggcaccatgacacattttttacaaaagccctagagcatcgtgtagctgcgggtgtgcctcacgttgggatcctgaagttgtctgcagggtcatgggagtactgcagtaggagaactgattcttttcaaaacccatcctcaatgcaggggcagaaacttttgtttgccaaacagaaaaattttcacctcgtcagatttctgcgttaatggaaccatttgggaaactcaattatttgccaccaaatgcctctgctttatttagaaagctggaaaacgtgctattcactcatttcaattattttccacccaaatcattattgaaacttcttcattcatgttcacttaatgaatgccatccagtcaactttctggcaaaaatattcaagcctcttttccttcaacggctgcaaggtaaagaatctcatttggacacattgagtcgggcacaactgacccaacttttcttagcctcagtcctggaatgccctttctataagggtccaaaactccttcctaaatatcaagtgaagtcatttcttaccccatgctgttccctggagacccctgtggattctcagctttatagatatgtgaagattgggctgactaaccttttaggagcaagattatattttgctccaaaagtgttgacaccctattgttatacaatagggaactgcagtttaccagaggggaaggacagttcggaagccttccgtgctcgcagaccagatgttgaaattaaattagatgaagaaggatttgtattgccatccacagctaatgaagatatccataaaaggatagcactgtgtattgatggtccaaaaaggttttgctccaatagcaaacacttactggggaaagaagctattaaacaaagacacctacagttactcggttatcaagttgttcagcctctgctgatcctgtctcatttggctctcccctaccctcttcacgtacgcattcagcagacagttctgatcacgctgggcacactcaatgctccagctctagggccaaataggaaagagcccctgcccttgaggggcttgaaacagggcctcacatctcattccaccctcatctctggtggaccattccgtggggctatgactcacctcatgaaagaagcatctcacctccagtacatgcccctgtcttttgctgtcagccctagggctcctcggacaccaaggaggcaagacactccaggggagactgtgaggccctggggcagtggtcgtacaagttcaggagtcaacaactga

SEQ ID NO: 153550 - DNA, 2337 bp, Homo sapiens
gcccggcagagcgcgttatcaaattgagaatctgatggtatggcattaatcaccttgaggaagaacctttatcgtttatctgattttcagatgcatagagctctggctgctttaaaaaataaacctctaaatcatgttcacaaggtagtcaaggagcgtctgtgcccttggttgtgttcacgacaacctgagcctttcggggtcagattccatcatgcccattgtaaaaagtttcattcgaaaaatggaaatgaccttcatccactcggtggaccagtgttctctcaagtatctgactgcgacaggcttgaacaaaatgttaaaaatgaggagagtcagatgttttacaggagactgagcaacttgacttcatcagaagaagtgctaagttttataagcacgatggaaaccctgcctgacactatggcagcaggagctttacaacggatttgtgaagtggaaaaaaaggatggtgatcaagggctgccaaaaggaatactggagaatagcatctttcaagctttatgctttcagtttgaaaaggagccctcacagctgtcaaacactagtttagtgactgctttgcaagctctgattctgttgcatgtggatcctcaaagtagcctgttgctgaacctggtggcagaatgccaaaatcgtctcagaaaaggtggcatggaagttcgcaatctttgtattcttggggaaagtctgattacactgcacagttcaggttgtgtgacactagaactcattataaatcaacttcaaggtgaaaaattggaaacatttaccccggaggatattgtggccctttatagaatcttgcaggcatgtactgaaaaagtggatgaacaccaaacatttttaaataagataaacaacttttccctatcaatagtttccaacctgagtcctaaattgattagccaaatgctcactgccctggtggttcttgatcaaagtcaagcatttcctctgattataaaattgggcaaatatgtcgtgaggcatgtcccacatttcactaacgaggagcttaggagagtcttggaggcgttcatatattttgggcaccatgacacattttttacaaaagccctagagcatcgtgtagctgcggtgtgcctcacgttggatcctgaagttgtctgcagggtcatggagtactgcagtagagaactgattctttcaaaacccatcctcaatgcagtggcagaaacttttgtttgccaaacagaaaaattttcacctcgtcagatttctgccttaatggaaccatttgggaaactcaattatttgccaccaaatgcctctgctttatttagaaagctggaaaacgtgctattcactcatttcaattattttccacccaaatcattattgaaacttcttcattcatgttcacttaatgaatgccatccagtcaactttctggcaaaaatattcaagcctcttttccttcaacggctgcaaggtaaagaatctcatttggacacattgagtcgggcacaactgacccaacttttcttagcctcagtcctggaatgccctttctataagggtccaaaactccttcctaaatatcaagtgaagtcatttcttaccccatgctgttccctggagacccctgtggattctcagctttatagatatgtgaagattgggctgactaaccttttaggagcaagattatattttgctccaaaagtgttgacaccctattgttatacaatagatgttgaaattaaattagatgaagaaggatttgtattgccatccacagctaatgaagatatccataaaaggatagcactgtgtattgatggtccaaaaaaggttttgctccaatagcaaacacttactggggaaagaagctattaaacaaagacacctacagttactcggttatcaagttgttcagatcccctatcatgagattgggatgctaaaatcaagacgtgaattggtggaatatttacccaaagaaaacctgtttcccctcaaaacacctgtccatggggtggccaagaatgaatacctgacctccagaacctcaaacaatgggaagaacttgcatttttatgggaacctcagtattaaaagaaaaatataatgtgaattagcccactttgcagaatatgttcctagactggtgatctgaaagcatctgtagttttccttatactatgtatacatttattgtggtaaaatttaaaattaattttaatttaatactagtgtcatagatactttttgtacatcaaacaattgatcatgtgctgtaaaggaattcaatgaataaatgttatttttaagtaaaaaaaaaaaaaaaaa

SEQ ID NO: 153551 - DNA, 469 bp, Homo sapiens
  misc_feature (1)...(469): n = a,t,c or g
agatggccngatcgagaccctagttggtgagccgtaattcctaggttgccttagagaggttccccggtgtcccgacggcggctcaagtcagagttgctgggttttgctcagattggtgtgggaagagcctgcctgtggggagcggccactccatactgctgaggcctcaggactgctgctcagcttgcccgttacctgaagaggcggcggagccgggcccctgaccggtcaccatgtgggccttctcggaattgcccatgccgctgctgatcaatttgatcgtctcgctgctgggatttgtggccacagtcaccctcatcccggccttccggggccacttcattgctgcgcgcctctgtggtcaggacctcaacaaaactagccgacagcagatgtggcagagagcctccagctggtgacagtacaccagagtgagactgaagatggtgaattcactgaatgtaacaac

SEQ ID NO: 153552 - DNA, 2523 bp, Homo sapiens
atggcggcctacctgcagtggcggcgcttcgttttcttcgacaaggagctggtgaaggagccgctgagcaatgatggggccgctcccggggccacacctgcttctggatccgctgcttccaagttcctttgcctccctcctggcatcactgtctgcgactcaggccgagggagcctggtctttggagatatccttcgtttggagctgtcttttccctcccgggatcccgaagagatcgagaggctccttgactaccctgcacatatggaaggccagatctggttcttgccacgttccctacagcttacaggcttccaagcctacaaactacgggtgacacacctgtaccaactgaagcagcacaatattctggcatctgttggagaagatgaagagggcatcaaccccttggttaagatctggaacctggagaagagagatggtttcacagatggcagtgttacattgaacaaaggagacatcacccgggaccggcatagcaagacccagattttgcacaagggcaactatcctgtaactggattggcctttcgccaagcaggaaagaccactcacttgtttgttgtgacaacagagaacgtccagcacccagtccagagcaaaactactttctttcaccctctcccaaaatacccaaaacaaacgctactacaagcccctcctaacaccctcttactgagacattccgtggttcccaatggtgattgtcgggatgatcatgtcttttccctctacttcatgatacccttttttttcaccactttgggattgctctaccacaactggtacccatcacgggtgtttgtgggagataccttctgttactttgctggcatgacctttgccgtggtgggcatcttgggacacttcagcaagaccatgctactattcttcatgccccaggtgttcaacttcctctactcactgcctcagctcctgcatatcatcccctgccctcgccaccgcatacccagactcaatatcaagacaggcaaactggagatgagctattccaagttcaagaccaagagcctctctttcttgggcacctttattttaaaggtggcagagagcctccagctggtgacagtacaccagagtgagactgaagatggtgaattcactgaatgtaacaacatgaccctcatcaacttgctacttaaagtccttgggcccatacatgagagaaacctcacattgctcctgctgctgctgcaggtggagtctgtatttgagacactggtagaggacagcgcagaagaggaatctactctcaccaaacttggcaacaccatttccagcctgtttggaggcggtaccacaccagatgccaaggagaatggtactgatactgtccaggaggaagaggagagccctgcagaggggagcaaggacgagcctggggagcaggtggagctcaaggaggaagctgaggccccagtggaggatggctctcagcccccaccccctgaacctaagggagatgcaacccctgagggagaaaaggccacagaaaaagaaaatggggacaagtctgaggcccagaaaccaagtgagaaggcagaggcagggcctgagggcgtcgctccagccccagagggagagaagaagcagaagcccgccaggaagcggcgaatggtagaggagatcggggtggagctggttgttctggacctgcctgacttgccagaggataagctggctcagtcggtgcagaaacttcaggacttgacactccgagacctggagaagcaggaacgggaaaaagctgccaacagcttggaagcattcatatttgagacccaggacaagctgtaccagcccgagtaccaggaagtgtccacagaggagcagcgtgaggagatctctgggaagctcagcgccgcatccacctggctggaggatgagggtgttggagccaccacagtgatgttgaaggagaagctggctgagctgaggaagctgtgccaagggctgttttttcgggtagaggagcgcaagaagtggcccgaacggctgtctgccctcgataatctcctcaaccattccagcatgttcctcaagggggcccggctcatcccagagatggaccagatcttcactgaggtggagatgacaacgttagagaaagtcatcaatgagacctgggcctggaagaatgcaactctggccgagcaggctaagctgcccgccacagagaagcctgtgttgctctcaaaagacattgaagctaagatgatggccctggaccgagaggtgcagtatctgctcaataaggccaagtttaccaagccccggccccggcctaaggacaagaatgggacccgggcagagccacccctcaatgccagtgccagtgaccagggggagaaggtcatccctccagcaggccagactgaagatgcagagcccatttcagaacctgagaaagtagagactgaacctgaacagaaagaacaatcgacaggacagaagcggcctttgaagaacgacgaactataa

SEQ ID NO: 153553 - DNA, 1953 bp, Homo sapiens
atgaagaaggccagcagccaagagaaagactttagaatgccaagagggaaaaaagagccatcctatatagtttctggaaaagactaccctcgcgtggagttggacacccatggttgtggcctgcgctgctcagccctaagtgacccttctcaggacctgcagttcattgtggccggggatgagtgtgtctacttgtaccagcctgatgaacgtgggccctgcttcgcctttgagggccataagctcattgcccactggtttagaggctaccttatcattgtctcccgtgaccggaaggtttctcccaagtcagagtttaccagcagggattcacagagctccgacaagcagattctaaacatctatgacctgtgcaacaagttcatagcctatagcaccgtctttgaggatgtagtggatgtgcttgctgagtggggctccctgtacgtgctgacgcgggatgggcggatgctgtttaagaagaacctatttgagatggcgattaaccttgccaagagccagcatctggacagtgatgggctggcccagattttcatgcagtatggagaccatctctacagcaagggcaaccacgatggggctgtccagcaatatatccggacactgggtccccttggagcctccccaggcttaatgattgtccagaaggcggctataaagggagcctgggaggctgggtggaggagggagcagaaaaaacccaactcagcagatctgggaactgtgagagcggcaagcaggaactgtggtcagaggctgtgcgtcttggctgcccagggctatggctattatcgcactgtgatcttctcagccatgtttgggggctacagcctgtattacttcaatcgcaagaccttctcctttgtcatgccatcattggtggaagagatccctttggacaaggatgatttggggttcatcaccagcagccagtcggcagcttatgctatcagcaagtttgtcagtggggtgctgtctgaccagatgagtgctcgctggctcttctcttctgggctgctcctggttggcctggtcaacatattctttgcctggagctccacagtacctgtctttgctgccctctggttccttaatggcctggcccaggggctgggctggcccccatgtgggaaggtcctgcggaagtggtttgagccatctcagtttggcacttggtgggccatcctgtcaaccagcatgaacctggctggagggctgggccctatcctggcaaccatccttgcccagagctacagctggcgcagcacgctggccctatctggggcactgtgtgtggttgtctccttcctctgtctcctgctcatccacaatgaacctgctgatgttggactccgcaacctggaccccatgccctctgagggcaagaagggctccttgaaggaggagagcaccctgcaggagctgctgctgtccccttacctgtgggtgctctccactggtagctcctacatgagtgccctggaagttgggggccttgtaggcagcatcgcagctggctacctgtcagaccgggccatggcaaaggcgggactgtccaactacgggaaccctcgccatggcctgttgctgttcatgatggctggcatgacagtgtccatgtacctcttccgggtaacagtgaccagtgactcccccaagctctggatcctggtattgggagctgtatttggtttctcctcgtatggccccattgccctgtttggagtcatagccaacgagagtgcccctcccaacttgtgtggcacctcccacgccattgtgggactcatggccaaatgcaccattgccaagcactacagttggagcacagccttctgggtggctgaagtgatttgtgcggccagcacggctgccttcttcctcctacgaaacatccgcaccaagatgggccgagtgtcacaagaaggctga

SEQ ID NO: 153554 - DNA, 5823 bp, Homo sapiens
  misc_feature (1)...(5823): n = a,t,c or g
atggcagacaaagttaggaggcagaggccgaggaggcgagtctgttgggccttggtggctgtgctcttggcagacctgttggcactgagtgatacactggcagtgatgtctgtggacctgggcagtgagtccatgaaggtggccattgtcaaacctggagtgcccatggaaattgtcttgaataaggaatctcggaggaaaacaccggtgatcgtgaccctgaaagaaaatgaaagattctttggagacagtgcagcaagcatggcgattaagaatccaaaggctacgctacgttacttccagcacctcctggggaagcaggcagataacccccatgtagctctttaccaggcccgcttcccggagcacgagctgactttcgacccacagaggcagactgtgcactttcagatcagctcgcagctgcagttctcacctgaggaagtgttgggcatggttctcaattattctcgttctctagctgaagattttgcagagcagcccatcaaggatgcagtgatcaccgtgccagtcttcttcaaccaggccgagcgccgagctgtgctgcaggctgctcgtatggctggcctcaaagtgctgcagctcatcaatgacaacaccgccactgccctcagctatggtgtcttccgccggaaagatattaacaccactgcccagaatatcatgttctatgacatgggctcaggcagcaccgtatgcaccattgtgacctaccagatggtgaagactaaggaagctgggatgcagccacagctgcagatccggggagtaggatttgaccgtaccctggggggcctggagatggagctccggcttcgagaacgcctggctgggcttttcaatgagcagcgcaagggtcagagagcaaaggatgtgcgggagaacccgcgtgccatggccaagctgctgcgtgaggctaatcggctcaaaaccgtcctcagtgccaacgctgaccacatggcacagattgaaggcctgatggatgatgtggacttcaaggcaaaagtgactcgtgtggaatttgaggagttgtgtgcagacttgtttgagcgggtgcctgggcctgtacagcaggccctccagagtgccgaaatgagtctggatgagattgagcaggtgatcctggtgggtggggccactcgggtccccagagttcaggaggtgctgctgaaggccgtgggcaaggaggagctggggaagaacatcaatgcagatgaagcagcnnncatgggggcagtgtaccaggcagctgcgctcagcaaagcctttaaagtgaagccatttgtcgtccgagatgcagtggtctaccccatcctggtggagttcacgagggaggtggaggaggagcctgggattcacagcctgaagcacaataaacgggtactcttctctcggatggggccctaccctcaacgcaaagtcatcacctttaaccgctacagccatgatttcaacttccacatcaactacggcgacctgggcttcctggggcctgaagatcttcgggtatttggctcccagaatctgaccacagtgaagctaaaaggggtgggtgacagcttcaagaagtatcctgactacgagtccaagggcatcaaggctcacttcaacctggatgagagtggcgtgctcagtctagacaggattttccaaaagaccaagtgcagcatctgtaacagtgccttggagttgccctcagtccacttcctgtgtggccactccttccaccaacactgctttgagagttactcggaaagtgatgctgactgccccacctgcctccctgaaaaccggaaggtcatggatatgatccgggcccaggaacagaaacgagatctccatgatcaattccagcatcagctcaagtgctccaatgacagcttttctgtgattgctgactactttggcagagctgcctcacccattatcttcatgttcgtggaatctgtgacacaaagaacaacgtacagccaatcaaataccttacgctgtgttaatggatctgggcccccagagccgggagctgaccctcaaagtgctgaggagcagcagctgtggagacaaccactgtctcgaagacagttgtgcccactcaccccagggccagggaaagccctgggaccagcagccaccatggcagtggagnntgacagccacctttccaacggcttggaccctgtagcagagacagcgattcgccagctgacagagcccagtgggcgggtggccaagaagacacccaccaagcgcagcactctcatcatctctggtgtttccaaggtgcccattgctcaggacgagttggcgctatccctgggctatgcggcatccctggaagcctcagtgcaggatgatgcagggaccagcggaggcccctcttcacctccctcagacccaccagccatgtctccaggaccgctagatgccctctctagtcccacaagtgtccaggaagcagacgagacaacccgttcggatatttctgagaggccatctgtggatgatattgagtcggaaacggggtccactggtgccctggagacccgcagcctcaaggatcacaaagccaagaaatccaagctatttagcatggtggttccacgagtgtttgggcgcatggtgggtaaaagccgggaggcggtggctcaggccatggtgctggagatgtttcgagaggaggactactacaacgatgatgttctggaccagatgggcgccagtatcctgggcgtggagggcccccggcgccacccagatgagccccctgaggatgaacttggctgccccatcaagaacctggatgccctggagaatgcccaggccatcaagaagaagctgggcaagctgggccggcaggtgctgcccccatcagagctccttgaccacctcttcttccactatgagttccagaaccagcgcttctccgctgaggtgctcagctccctgcgtcagctcaacctggcaggtgtgcgcatgacaccagtcaagtgcacagtggtggcagctgtgctgggcagcggaaggcatgccctggatgaggtgaacttggcctcctgccagctagatcctgctgggctgcgcacactcctgcctgtcttcctgcgtgcccggaagctgggcttgcaactcaacagcctgggccctgaggcctgcaaggacctccgagacctgttgctgcatgaccagtgccaaattaccacactgcgggcccgcgccgcccggcagcccgcggggggcgaggacggcaaaggagagagcagcgcttgcggcgcgggggccggaggaggtgcaggggtgaactcaggactgggggttgatggcaaagggccgacttggaggcagctgtccaacaacccgctgacggcggcaggtgttgccgtgctaatggaggggctggcaggaaacacctcagtgacgcacctgtccctgctgcacacgggccttggggacgaaggcctggagctgctggctgcccagctggaccgcaaccggcagctgcaggagctgaacgtggcgtacaacggtgctgctctactgaatggcatcgactttctctctcctgccagcctctacttcaatgagctgagctcagagggccgccaggtcttgcgagacttggggggtgctgctgaaggtggtgcccgggtggtggtgtcactgacagaggggacggcggtgtcagaatactggtcagtgatcctcagtgaagtccagcggaacctcaatagctgggatcgggcccgggttcagcgacaccttgagctcctactgcgggatctggaagatagccggggtgccacccttaatccttggcgcaaggcccagctgctgcgagtggagggcgagagctccatccaaatcgcctttgaggaggtgccccaactcccacccagagccagcatcagtcatgtgacctgcgtagaccaatctgagcataccatggtgctgcgttgccagctctctgctgaggaggtgcggttcccagtctctgtgacccagcagtcccccgctgccgtctccatggagacctaccacgtcactctgacactgccaccaacacagagaggtgaagaacaagtggagctctccacaattgaggaactgatcaaggatgccatagtcagcacccagccagccatgatggtcaacctcagggcttgctctgccccaggaggcctggtacccagtgagaagccacccatgatgccccaggctcagccagccatccccagacctaaccggttattcctacggcagcttcgggcatctcacttgggaaatgagctggaaggcaccgaggaactgtgctgtgtagctgaactcgacaaccccatgcagcagaagtggaccaagcccgcgagggctggatccgaggtggagtggacagaagacctggcacttgctgggatcacaggcgtgagccacgacacccggcccactgatggagttataaagctctttaacccggatgcctgtgggcgccgggtgcagacagtggtgctgtatgggacagtgggcacaggcaagagcacgctggtgcgcaagatggttctggactggtgttatgggcggctgccggccttcgagctgctcatccccttctcctcctccctgtgccaacttgtggcccagcgctacacgcccctgaaggaggttctgcccctgatggctgctgctgggtcccacctcctctttgtgctccatggcttagagcatctcaacctcgacttccggctggcaggcacgggactttgtagtgacccggaggaaccgcaggaaccagctgctatcatcgtcaacctgctgcgcaaatacatgctgcctcaggccagcattctggtgaccactcggccctctgccattggccgtatccccagcaagtacgtgggccgctatggtgagatctgcggtttctctgataccaacctgcagaagctctacttccagctccgcctcaaccagccgtactgcgggtatgccgttggcggttcaggtgtctctgccacaccagctcagcgtgaccacctggtgcagatgctctcccggaacctggaggggcaccaccagatagccgctgcctgcttcctgccgtcctattgctggctcgtttgtgccaccttgcacttcctgcatgcccccacgcctgctgggcagacccttacaagcatctataccagcttcctgcgcctcaacttcagcggggaaaccctggacagcactgacccctccaatttgtccctgatggcctatgcagcccgaaccatgggcaagttggcctatgagggggtgtcctcccgcaagacctacttctctgaagaggatgtctgtggctgcctggaggctggcatcaggacggaggaggagtttcagctgctgcacatcttccgtcgggatgccctgaggtttttcctggccccatgtgtggagccagggcgtgcaggcaccttcgtgttcaccgtgcccgccatgcaggaatacctggctgccctctacattgtgctgggtttgcgcaagacgaccctgcaaaaggtgggcaaggaagtggctgagctcgtgggccgtgttggggaggacgtcagcctggtactgggcatcatggccaagctgctgcctctgcgggctctgcctctgctcttcaacctgatcaagcaccccaagccgcccacgcccccacatggttccctgttcaccccttgctcctctcccagcaggaaactgctgcttcctgcaaaggaggcaggcctatcctctgctttgcaggtccagaaactcgattgtgtctgctcctccagaggtgattag

SEQ ID NO: 153555 - DNA, 2427 bp, Homo sapiens
atggtggcaatccactctgcactcgaatcttccctgctattccaggaacagagccaactgttgtatcttgttttgactgtccatgaaaatctcaactttatggccattggtttcacagatggcagtgttacattgaacaaaggagacatcacccgggaccggcatagcaagacccagattttgcacaagggcaactatcctgtaactggattggcctttcgccaagcaggaaagaccactcacttgtttgttgtgacaacagagaacgtccaggacctgcagttcattgtggccggggatgagtgtgtctacttgtaccagcctgatgaacgtgattgtcgggatgatcatgtcttttccctctacttcatgatacccttttttttcaccactttgggattgctctaccacaactggtacccatcacgggtgtttgtgggagataccttctgttactttgctggcatgacctttgccgtggtgggcatcttgggacacttcagcaagaccatgctactattcttcatgccccaggtgttcaacttcctctactcactgcctcagctcctgcatatcatcccctgccctcgccaccgcatacccagactcaatatcaagacaggcaaactggagatgagctattccaagttcaagaccaagagcctctctttcttgggcacctttattttaaaggtggcagagagcctccagctggtgacagtacaccagagtgagactgaagatggtgaattcactgaatgtaacaacatgaccctcatcaacttgctacttaaagtccttgggcccatacatgagagaaacctcacattgctcctgctgctgctgcagcattttcctttctctgtgatcattggcatcctgggcgtttcttgccctctgctgactactgattggattttacctatggctttctgcaacttgctactctctccctctccatcccatctttgcagcctcataggaaccattggaaagttggagccatcctacgtgatccgcaagtttctggatgcccagcgcattcacaacctgactgcctacctgcagaccctgcaccgacaatccctggccaatgccgaccataccaccctgctcctcaactgctataccaagctcaaggacagctcgaagctggaggagttcatcaagaaaaagagtgagagtgaagtccactttgatgtggagacagccatcaaggtcctccggcaggctggctactactcccatgccctgtatctggcggagaaccatgcacatcatgagtggtacctgaagatccagctagaagacattaagaattatcaggaagcccttcgatacatcggcaagctgccttttgagcaggcagagagcaacatgaagcgctacggcaagatcctcatgcaccacataccagagcagacaactcagttgctgaagggactttgtactgattatcggcccagcctcgaaggccgcagcgatagggaggccccaggctgcagggccaactctgaggagttcatccccatctttgccaataacccgcgagagctgaaagccttcctagagcacatgagtgaagtgcagccagactcaccccaggggatctacgacacactccttgagctgcgactgcagaactgggcccacgagaaggatccacaggtcaaagagaagcttcacgcagaggccatttccctgctgaagagtggtcgcttctgcgacgtctttgacaaggcctggttccagcagatcatgcactaccacatgcagcacgagcagtaccggcaggtcatcagcgtgtgtgagcgccatggggagcaggacccctccttgtgggagcaggccctcagctacttcgctcgcaaggaggaggactgcaaggagtatgtggcagctgtcctcaagcatatcgagaacaagaacctcatgccacctcttctagtggtgcagaccctggcccacaactccacagccacactctccgtcatcagggactacctggtccaaaaactacagaaacagagccagcagattgcacaggatgagctgcgggtgcggcggtaccgagaggagaccacccgtatccgccaggagatccaagagctcaaggccagtcctaagattttccaaaagaccaagtgcagcatctgtaacagtgccttggagttgccctcagtccacttcctgtgtggccactccttccaccaacactgctttgagagttactcggaaagtgatgctgactgccccacctgcctccctgaaaaccggaaggtcatggatatgatccgggcccaggaacagaaacgagatctccatgatcaattccagcatcagctcaagtgctccaatgacagcttttctgtgattgctgactactttggcagagcctcacctaatttcatcttctacgttgtttaa

SEQ ID NO: 153556 - DNA, 411 bp, Homo sapiens
atggcggcctacctgcagtggcggcgcttcgttttcttcgacaaggagctggtgaaggagccgctgagcaatgatggggccgctcccggggccacacctgcttctggatccgctgcttccaagttcctttgcctccctcctggcatcactgtctgcgactcaggccgagggagcctggtctttggagatatccttcgtttggagctgtcttttccctcccgggatcccgaagagatcgagaggctccttgactaccctgcacatatggaaggccagatctggttcttgccacgttccctacagcttacaggcttccaagcctacaaactacgggtgacacacctgtaccaactgaagcagcacaatattctggcatctgttggagaagatgaagagggcatcaaccccttg

SEQ ID NO: 153557 - DNA, 431 bp, Homo sapiens
agtcgtgcatctggcacaggaccagggccttgtcaaagacgtcgcagaagcgaccactcttcagcagggaaatggcctctgcgtgaagcttctctttgacctggagaggaaggagggcagagctgctggacaaaaggggaaaatcacaaggtctcttgggacaaagccagtcaactctttccctcagtccattccctcttcacagaggaccattgagccccgaggtaaggtgttactggtctaaggaatgcagtgaaaggcagccaccaagacggaagaatggagacggcacgaactgtcttttctcctgaagccctggccaggcctcacctgtggatccttctcgtgggcccagttctgcactcgcagctcaaggagtgtgtcgtagatcccctggggtgagtctggctgcacttcaccccacgcgtccg

SEQ ID NO: 153558 - DNA, 1179 bp, Homo sapiens; identical to SEQ ID NO: 147044

SEQ ID NO: 153559 - DNA, 2037 bp, Homo sapiens
tcattcccccagcggaggttccaggttgggattcggagctgagctctgggcagccacaagttctgggtggaacctttggggctgctgggggtctgagattaggcatcccgttgccggggttactaggacaaaaggattctccagctggtactcctcaccggctggagcactgcagtggcggcgcttcgttttcttcgacaaggagctggtgaaggagccgctgagcaatgatggggccgctcccggggccacacctgcttctggatccgctgcttccaagttcctttgcctccctcctggcatcactgtctgcgactcaggccgagggagcctggtctttggagatatccttcgtttggagctgtcttttccctccccgggatcccgaagagatcgagttaggatgaaatctgtttgtcggaggggtccgtgccgcgcgcctctttggtttagctggtcatccagagttgttctgtggtctgtcagtgtctggtagcagtgcaatttgaatgtgtctgtctccagcatctcaatgcctgagcttccctgttcaggagacagctgggagccgatggcaaagagcgagtggaacatggaggccagcataagcttctcattagaagtgaggcggggccggccaaatcgaatggacaccgggtaattagcagggttacccagatactccagcacctctttcccgtcggccgtgtacctgccattcacgtccatgccattgatggccagcactgcatgacccagcagcagcttggccatggcacgcgggttctcccgcacatcctttgctctctgacccttgcgctgctcattgaaaagcccagccaggcgttctcgaagccggagctccatctccaggccccccagggtacggtcaaatcctactccccggatctgcagctgtggctgcatcccagcttccttagtcttcaccatctggtaggtcacaatggtgcatacggtgctgcctgagcccatgtcatagaacatgatattaaccttctgcatctgcttccccagaatagcattctcagggaggggcagaccttgggatgctaccggtccaaaaggcgctggggagcaagtagatagaggtggtcccatgctttgcgccattggttggggaaagatcaggcctgatgtcctaggatgtttttccatcagggggccttgggcgtggaagtgcgagccaaggaccaggacatcttggatctggtgggtgtgctgcacgatcccgagactctgcttcgctgcatcgctgaaagggccttcctgaggcacctggtagggcctgtgctccaccaaatcccacctccttccctcatacagcatgaagatggccctgaggatgacccacagttggtaggcatcactgctcgtaacattccacgagggccccagttggctgcccagaacttgggcatcagcctggccaacttgttgctgagcaaaggagccaaaaacatcctggatgttgcacggcagcttaacgatgcccattaacaaagcctcccggccagcggccgcgtctgaaagtcctgggctaagcaccacgccgggggggtaccagacaccccggctgcagctgccgagggcctcactcaccttcagggccgccggcctctcggcctggacagtctctactttctcaggttctgaaatgggctctgcatcttcagtctggcctgctggagggatgaccttctccccctggtcactggcactggcattgaggggtggctctgcccgggtcccattcttgtccttaggccggggccggggcttggtaaacttggccttattgagcagatactgcacctctcggtccagggccatcatcttagcttcaatgtcttttgagagcaacacaggcttctctgtggcgggcagcttagcctgctcggccagagttgcattcttccaggccttggccacatcagtgtcatagagcttcttctggtgcttgttggctttaacattcacagtgaacacaagtgcgttgttgtcttctgtcttcttcat

SEQ ID NO: 153560 - DNA, 3307 bp, Homo sapiens
atggatccgggctgggggcagcgggacgtgggctgggcggccttgctgatcctcttcgccgcctcgctgctcacggtgttcgcctggctgctgcaatatgcccggggcttgtggctggcgcgggcccgcggggaccggggcccgggacccgccttagccggggaacccgcgggttccctgcgggagctgggcgtgtggcgctcgctgctgcggctgcgggcgactcgggctggcgccgccgaggagccaggagtccggggcctcctggcgtcactcttcgccttcaactctttccgggagaactggcagcgggcttgggtgcgagcgctgaacgagcaggcctgcagaaacgggagctccatccaaatcgcctttgaggaggtgccccaactcccacccagagccagcatcagtcatgtgacctgcgtagaccaatctgagcataccatggtgctgcgttgccagctctctgctgaggaggtgcggttcccagtctctgtgacccagcagtcccccgctgccgtctccatggagacctaccacgtcactctgacactgccaccaacacagttggaagtcaacctggaggaaatccctggtgaggggctgctcatatcctgggccttcactgatcgcccagatctcagcctaacggtgcttcccaagcttcaggccagggagagaggtgaagaacaagtggagctctccacaattgaggaactgatcaaggatgccatagtcagcacccagccagccatgatggtcaacctcagggcttgctctgccccaggaggcctggtacccagtgagaagccacccatgatgccccaggctcagccagccatccccagacctaaccggttattcctacggcagcttcgggcatctcacttgggaaatgagctggaaggcaccgaggaactgtgctgtgtagctgaactcgacaaccccatgcagcagaagtggaccaagcccgcgagggctggatccgaggtggagtggacagaagacctggcactggatctgggcccccagagccgggagctgaccctcaaagtgctgaggagcagcagctgtggagacaccgaactcctaggccaggccacactgcctgtgggctccccctccagaccactgtctcgaagacagttgtgcccactcaccccagggccagggaaagccctgggaccagcagccaccatggcagtggagcttcactatgaggagggctctccccggaacctgggtactcccacctcctccactccacgccccagcatcacacctaccaagaagattgagcttgaccggaccatcatgcccgatggcaccattgtcaccacagtcaccactgtccagtcccggccccgtatagacggcaaattagactccccctcccgctccccgtccaaggtggaggtgaccgagaagacgacaactgtgctgagtgagagcagtggccccagcaatacctcccatagcagcagcccaggggacagccacctttccaacggcttggaccctgtagcagagacagcgattcgccagctgacagagcccagtgggcgggtggccaagaagacacccaccaagcgcagcactctcatcatctctggtgtttccaaggtgcccattgctcaggacgagttggcgctatccctgggctatgcggcatccctggaagcctcagtgcaggatgatgcagggaccagcggaggcccctcttcacctccctcagacccaccagccatgtctccaggaccgctagatgccctctctagtcccacaagtgtccaggaagcagacgagacaacccgttcggatatttctgagaggccatctgtggatgatattgagtcggaaacggggtccactggtgccctggagacccgcagcctcaaggatcacaaagtgagtttcctgcgcagcggcactaagctcatcttccgccggatgcctaggcataatgaatctggcctgagccaatcacacgatgacctctccaacgcaacggccacgcccagtgtccgaaagaaggccggcagcttttctcgccgccttatcaagcgcttttccttcaaatccaaacccaaggccaatgaggaacagtttttctaccagtatgacacgacaaccaaacacagtgaacttgtgattgcacaagaaacttttgttgatgggagaacagcgcctctccggagatggtctgaggtgggagaagagctgaagagacctggagccgacagacggtacccatcacgggtgtttgtgggagataccttctgttactttgctggcatgacctttgccgtggtgggcatcttgggacacttcagcaagaccatgctactattcttcatgccccaggtgttcaacttcctctactcactgcctcagctcctgcatatcatcccctgccctcgccaccgcatacccagactcaatatcaagacaggcaaactggagatgagctattccaagttcaagaccaagagcctctctttcttgggcacctttattttaaaggtggcagagagcctccagctggtgacagtacaccagagtgagactgaagatggtgaattcactgaatgtaacaacagtgaccctcatcaacttgctacttaaagtccttgggcccatacatgagagaaacctcacattgctcctgctgctgctgcagatcctgggcagtgccgtcaccttctccattcgatatcagctcgttcgactcttctatgatgtctgagtcccttgatacattgtcctttacctcacagtctctaggattcctgactcaggctgacctctctctctggtcccagactgcctcccttgcccaggcctctctcactcttcatacttcctccagattttgtttctcagcattttcctttctctgtgatcattggcaatcctgggcgtttcttgccctctactgactactgaatggatttaacctatggttttctggacctgggtactctctccctctccatcccatctttgcagcctcatagggtgggatacagcagctttttttgcagttatccacactcacatttcagagtcctgactctcaaggaaccactggtttttgggatagaacttgggccagggctaggaacacaggctccacggtgacatgtcatttgattgtaaattaagtgttctgattagtaagaactaagcagggggccacatgctctcaatggagacaataaagtgttgtctttttcttatgacaaagatttaaaggaccttaacaatagacattgcttaattacggggtgcaattgcgcgctgc

SEQ ID NO: 153561 - DNA, 3252 bp, Homo sapiens
gaattcccgggtcgacgatttcgtggccaaaatggcggcctacctgcagtggcggctcttttttttcttcgacaaggagctggtgaaggagcccgctgagcaatgatggggccgctcccggggccacacctgcttctggatccgctgcttccaagttccttttgcctccctcctggcatcactgtctgcgactcatgccgagggagcctggtctttggagatatggaaggccagatctggttcttgccacgttccctacagcttacaggcttccaagcctacaaactacgggtgacacacctgtaccaactgaagcagcacaatattctggcatctgttggagaagatgaagagggcatcaaccccttggttaagatctggaacctggagaagagagatggtggcaatccactctgcactcgaatcttccctgctattccaggaacagagccaactgttgtatcttgtttgactgtccatgaaaatctcaactttatggccattggtttcacagatggcagtgttacattgaacaaaggagacatcacccgggaccggcatagcaagacccagattttgcacaagggcaactatcctgtaactggattggcctttcgccaagcaggaaagaccactcacttgtttgttgtgacaacagagaacgtccagtcctatatagtttctggaaaagactaccctcgcgtggagttggacacccatggttgtggcctgcgctgctcagccctaagtgacccttctcaggacctgcagttcattgtggccggggatgagtgtgtctacttgtaccagcctgatgaacgtgggccctgcttcgcctttgagggccataagctcattgcccactggtttagaggctaccttatcattgtctcccgtgaccggaaggtttctcccaagtcagagtttaccagcagggattcacagagctccgacaagcagattctaaacatctatgacctgtgcaacaagttcatagcctatagcaccgtctttgaggatgtagtggatgtgcttgctgagtggggctccctgtacgtgctgacgcgggatgggcgggtccacgcactgcaggagaaggacacacagaccaaactggagatgctgtttaagaagaacctatttgagatggcgattaaccttgccaagagccagcatctggacagtgatgggctggcccagattttcatgcagtatggagaccatctctacagcaagggcaaccacgatggggctgtccagcaatatatccgaaccattggaaagttggagccatcctacgtgatccgcaagtttctggatgcccagcgcattcacaacctgactgcctacctgcagaccctgcaccgacaatccctggccaatgccgaccataccaccctgctcctcaactgctataccaagctcaaggacagctcgaagctggaaggagttcatcaagaaaaagagtgagagtgaagtccactttgatgtggagacagccatcaaggtcctccggcaggctggctactacttcccatgccctggatctggcggagaaccatgcacatcatgagtggtacctgaagatccagctagaagacattaagaattatcaggaagcccttcgatacatcggcaagctgccttttgagcaggcagagagcaacatgaagcgctacggcaagatcctcatgcaccacataccagagcagacaactcagttgctgaagggactttgtacttgattatcggcccagcctcgaaggccgcagcgatagggaggccccaggcttgcagggccaactctgaggagtttcatccccatctttgccaataaaccccgcgagacctgaaagccttcctagagcacatgagtgaagtgcagccagactcaccccaggggatctacgacacactccttgagctgcgactgcagaactgggcccacgagaaggatccacaggtcaaagagaagcttcacgcagaggccatttccctgctgaagagtggtcgcttctgcgacgtctttgacaaggccctggacctgtgccagatgcacgacttccaggatggtggcctttacctttatgagcaggggaagctgttccagcagatcatgcactaccacatgcagcacgagcagtacccggcaggtcaatcagcgtgtgtgagcgccatggggagcaggacccctccttgttgggagcaggccctcagctacttcgctcgcaaggaaggaggactgcaaggagtatgtggcagctgtcctcaagcatatcgagaacgggaacctcatgccacctcttctagtggtgcagaccctggcccacaactccacagccacactctccgtcatcagggactacctggtccaaaaactacagaaacagagccagcagattgcacaggatgagctgcgggtgcggcggtaccgagaggagaccacccgtatccgccaggagatccaagagctcaaggccagtcctaagattttccaaaagaccaagtgcagcatctgtaacagtgccttggagttgccctcagtccacttcctgtgtggccactccttccaccaacactgctttgagagttactcggaaagtgatgctgactgccccacctgcctccctgaaaaccggaaggtcatggatatgatccgggcccagggaacagaaccgagattctccatgatcaattcccagcatcagcttcaggtgctccaatgaccaagcttttctgtgattgctgactaattttgggcagaggtgtttttcaacaaattgactctgctgaccgaccctccccacagcccagactgaccctccagcctggaggctgggctgcaaacgcgaccctactcatgcactcccccagaggggcatctaaagcaccccctggaggaagatgtggggcaaacagtggaggacccaagagaacagacacaatgggaccctgggcgggcgttacacaagaaggctgggctgacatcccccagggctccactctcatcctaatgtcacagccctcagaactaaagcgggactttctttccctgccttcttatttagtcagcttgccatccctcctcttcactagcagtgtagatcattccagatcagtgggggagggcacctcagcaacctctgagtgtggacaatagctgctttcttctctatccaagagccccaggcttgtgcttgggtccttgctctcagagtctttaaataaaagaatataatgatttgggaaaaa

SEQ ID NO: 153562 - DNA, 2145 bp, Homo sapiens
  misc_feature (1)...(2145): n = a,t,c or g
catcaggtaagccaagatgggtgcatacaagtacatccaggaggctatggagaaagaagcagtctgatgtcatgcgctttcttctgagggtcccgctgctggcagtaccggcagcttctctgctctccacaggggctcccgcccccaccgggccctgataaagtgcaccgactgggctacaaacaaggccaagcaaggttacgttatatataggattcgtgttcgccgttatatataggattcatgttcgcgtgatcgacgaggaggccgaaaacgccccagtttctaagggtgcaactttcggcaagccttgtccatcatggtgttaaccaggctaaagtttggttctaccccttcacgtccgttgcagagggagcgacctggacgccacttgtggggctctgagagtcctgaattcttactgggttggtgaagattcccaccttccaaattttttgggggttatccctcatggatcccattcccataaagctatcaggaagaaatccctgaccaccccagtgggatcacccaaacccagtcccacaagcaccagggagatgcgtgggctgacatctgccaggcccgaaagagccgtcggcctctggaaagggccacaagttcccaccacactattgggtggctctcgccgggcagcttggagaaggcgcaatactctccaagctccaccgttaccgctaatataagtaaagtttgtaaaattcatactttaataaacaaatttaggacaggcatgtcttgcttacaggtgttatttggcttgttaaaactagtcttgcagatgtttctttgaatgctttgtcaaattaagaaagttaaagtgcgaataatgtttgaagacaataagtggtggtgtatcttggttctaataagaataaacttttttgtctttgctttatcttattagggagttgtatgtcagtgtataaaacatactgtgtggtataacaggcttaataaattctttaaaaggagagaactgaaactagtccctgtagatttgtctggtgcatgtgatgaaacctgcagctttatcggagtgatggcaatgctctgctggtttattttcaagtggctgcgtttttttttagtttggcaggtgtagactttttaagttggggctttaggaaaatctgggttagcctgaagaaaattgcctcagcctccacagtacccctttttaaattcacataaaaggtgaaagctcctggttcagtgccatggcttcatggcattcagtgattagtggtaatggtaaacactggtgtgttttgaagttgaaatgtgcgattaaaattattaggccttaaagattgggtaaagctagccaatggaatgcttaggggtgggaagctgggtggagccagtggcccattagataaatacctttcaagtgtgagcttagacggtcaaccccaaaataccttaacccgtaatgctaattgtgatcattatgaatcccctccagtccccattagggggggaagtaagttggctataagtaccgtcattccttaagtccagtcaagtccttaaaaacatcttggggttaccccattctgttcaactccccatagggttacagaaaaaagtccacaagcgccatggtttcccaacccatatgtgttttcctgcaagttatttctccttgttcctggcccaaacaacccctaaaaatcccttacccatttcccacaaagttggacccatccacttgtgcaccccactttgacctatgaagtatacccacccacattggcatttctggttgccacccatgtccttcccaggagaactagactactgttgtcccagggtcaatttgaagtgtaaaggaaaatgtagacaaggaattggcccaattttaaanttcctgactttgctgactttattttaaatgctcgttctgaacccaattttctcctatcttctctaggggtttcgaaaagactccagttaattgatttccaggaagtactcatagcaagttcataaaagttcttgagacctaaatttctttcacaaaaaaagaaaagatcttaaggtcatacattttaattgtgtagaggttgttcactggaagggaataaatggtctattaaactaaaaaaaaaaaaaaaaaaa

SEQ ID NO: 153563 - DNA, 513 bp, Homo sapiens
gacccgatgagcctgctatacaacatgaacgactgctactccaagctcaaggagctggtgcccagcatcccccagaacaagaaggtgagcaagatggaaatcctgcagcacgtcatcgactacatcttggacctgcagatcgccctggactcgcatcccactattgtcagcctgcatcaccagagacccgggcagaaccaggcgtccaggacgccgctgaccaccctcaacacggatatcagcatcctgtccttgcaggtaagacctgctccggggtccccgccccgccgccgcacactcccgcggtcgtctgggctgtcactaggagatccgtagcccagacggtgactttcgtatgagctatttaactttattttcttcagaatctgctgtagattgagctgtgcgtgaaattgctagtaagttctgacatgttaatgcgtctgtctttaaatctgaattgttaccataaacgtgtttaatggaacttgctggtctgtggactacaaaaaa

SEQ ID NO: 153564 - DNA, 1533 bp, Homo sapiens
atggcagtcggcaagactggctacaaccacagcacctgctctgacaaatacagaccatcctcctttatcaagtcctccctgttggataacgaaaaatccaacagatctttccagctgactctggggaaaggatgcagggagaagaaaagctccttccagggactgccatttttctgtgtgtacatgagcttccgagggacggtggtcacctccaagctgggctcgcgccccgcccaccccgcggggattggctgcgaacgcggaagaaccaagcccacgccccgcgcccgcgcccaccaatggaagcgcccgctcgtcttgatagacgtgccaccttccgccaatggggacgaagggaagctccagcgtgtggccccggcgagtgcggataaaagccgccccgccgggctcgggcttcattctgagccgagcccggtgccaagcgcagctagctcagcaggcggcagcggcggcctgagcttcagggcagccagctccctcccggtctcgccttccctcgcggtcagcatgaaagccttcagtcccgtgaggtccgttaggaaaaacagcctgtcggaccacagcctgggcatctcccggagcaaaacccctgtggacgacccgatgagcctgctatacaacatgaacgactgctactccaagctcaaggagctggtgcccagcatcccccagaacaagaaggtgagcaagatggaaatcctgcagcacgtcatcgactacatcttggacctgcagatcgccctggactcgcatcccactattgtcagcctgcatcaccagagacccgggcagaaccaggcgtccaggacgccgctgaccaccctcaacacggatatcagcatcctgtccttgcagcgcggggcggtcgtgtggttgatcatcatacccggaggaagccctgagggccgtaggggcgtcttccccgtcgcaggctacccgcggacctggcccccaggtccccgccacctgtcgccagccgcggccccggccgacctctgcgcggcggggagggaagcgcgctctggtcccaacccgacccccgcctcgcctccgggagaggcgcagacgccggccgcacgctcgccccccagccacggggacccgcgcgtagtccgctcggacggccctggggagcgtccccggacggaagcagtgcgggcgggactgtgggggcggcccgggccctttcgagcccctgccgggcaccgctggcgacgttggccccgggacccctggagccgcagccgaggcgcagcagcccctctcggaggcgacttcccgcggcgccagccgcgctgcccgactccggccgtggagcccgggcgccacctgctggccgacacgaggacggcggctctcgcgcggggcctggtgggcctggggcccgggcactgggaacccgaggagcaatccgtggggtggaggaggtcccgggagaaaacgccagggagtgaggacactgaggatgcctgggagaaggaacttgctggaggtccctgcgagggtgtctga

SEQ ID NO: 153565 - DNA, 1467 bp, Homo sapiens
attctgagccaagtccggtgccaagcgcagctagctcagcaggccgcaggcggtggcctgagcttcagggcagccagctccctcccggtctcgccttccctcgcggtcagcatgaaagccttcagtcccgtgaggtccattaggaaaaaccagccctgtcggaccacagcctgggcattctcccggagcaaaaacccctgtggaccgaccccgatggggccctgctatacaacatgaaggactgctactcccaagctcaaggagctgggtgcccagcattcccccagaacaaagaaggtgagcaagatgggaaatcctggcagcacgtcattcgacttacatcttgggaccttgcagattcgccctgggacttggcattcccacttattgttcagcctggcattcaccagaggacccggggcaggaaccaggcggtccaggacgccgcttggaccaccctcaacacgggatatcagcattctgtcctttgcagggcttcttgaatttccttctgagttaatgttcaaatgacagcaaaagcactgtgtggctgaataagcggtgttcatgatttcttttaattcttttgcacaacaacaacaacaacaaattcacggaatcttttaagtggctgaacttatttttcaaccatttcacaaggaggacaagttgaatgggacctttttaaaaagaaaaaaaaaatgggaaggaaaactaagaatgatcatcttccccaggggtgttctcttaccttggacctggtggatattccgttatttatgaaaaagactttttaaaatgcccttttctgcagtttggaaggttttcctttatatactattccccacccagggggagcgaaaaacgttaaaaatccacaaggaattgcccaatcctaagcagactttgcctttttttcaaaggtggagcgtgaataccagaaggatccagtattcagtcacttaaatggaagtcttttgggtcaggaaattacctttttggacacaagccctactggaatgctggtgtatatatttatatataaatatatcctatttggagtggaaaccttgtgaactcctttaaattagagttttcttgtatagtggcagagatgtctatttctgcattcaaaagtgtaatgatgtacttattccaggctaaactttttatacaagtttaaacttttagttgtaaacttaaccccttttaatacaaaataaatcaagtgtgtttattgaatgggtgattgcctgctttatttcagaggaccagtgctttgatttttattatgctatgttataactggaacccaaataaatacaagttccaaatttatgtaggactgtataagattataataaaacatgtctgaagtcaaaaataaaaaacattacccagtgtttggtggtgcacatctatagtcctagctacccccgaggctgagacgggaggatagctggagcc

SEQ ID NO: 153566 - DNA, 1227 bp, Homo sapiens
  misc_feature (1)...(1227): n = a,t,c or g
atgaggaaagagcagaagatggaaggggacacctatgagattatgcagggtggggggagggagcgcacgacgtgcgcgcaccctctcccctcgtccaccgctgccgcctccttcttctgccgctcctggtgctgcttgtgtgcctcgtttggtgcggacctgcgtacctcttyttgtgaaagcggcagctgaggagactccggcggctcgccatggcccgacgaaaagcccaaggaaggagtcaagactgagaacaacgatcatattaatttgaaggtggccggggcagrgatggttctgttgtgcaagtttaagattaagaggcatacaccacttagtaaactaatgaaagcctattgtgaaccgacagggattgtcaatgaggcagatcagattcccgatttgaccgggcaacccaatcaatgaaacagacacacctgctacagttgggaaatggaaggatgaaagatacaattgatggtgttccaacaagcaagaccgggaggtgtctacttgaaaaagggaacctgcttcctttactcccagaactctgtttctttttaaaggacccaagattactgcattctcaattaggaaaacttgcaatttgggttccacccacaatccctgacttacttaccctattagttttctcttattcttttcatttccccctttcccccattcctttatttgttacataaagtaactgggtatatgtggcaccaagccatattggcattttttttttttttttttaactaaacagccaaatggtatgttttgattgaccatccaagtgggagacccgggatgggggaaaaattactgattctgtgaaaaatacccccctttctcccattagtggcatgctcattcagctcttaccctttatattccagtaagttattttgctctcactgttttaacaaccacaacaaaacaacaacaacaacataaaaatccttgcataccttgttcaattggatgaattttaatgtttttcatttatcattgtaaaaccaaggacgaattttataacttttttggtacggtagctgttaccnatgtagggcaatctcgtctttaagtagggattaaattactcnctaaaacaaaaaagaatcctagatagttttcccttcaagtcaatgcgtcttggttgtttaaataaacttcttgtttaaaatgaaaaaaaaaaaaaaaaaaaaaaaagggcggccgctc

SEQ ID NO: 153567 - DNA, 609 bp, Homo sapiens
ataacaacggaggcggaggcggctttggggttggtagtggaagcaattttggaggtggtggaagcaacaatgattttgggaattacaacaatcagtcttcaaattttggacccatgaagggaggaaattttggaggcagaagctctggcccctatggcggtggaggccaatactttgcaaaaccacgaaaccaaggtggctatggcggttccagcagcagcagtagctatggcagtggcagaagattttaattaggaaacaaagcttagcaggagaggagagccagagaagtgacagggaagctacaggttacaacagatttgtgaactcagccaagcacagtggtggcagggcctagctgctacaaagaagacatgttttagacaaatactcatgtgtatgggcaaaaaactcgaggactgtatttgtgactaattgtataacaggttattttagtttctgttctgtggaaagtgtaaagcattccaacaaagggttttaatgtagattttttttttttgcaccccatgctgttgattgctaaatgtaacagtctgatcgtgacgctgaataaatgtcttttttctaaggaaaaaaagaaaaaaaaaa

SEQ ID NO: 153568 - DNA, 1677 bp, Homo sapiens; identical to SEQ ID NO: 118348

SEQ ID NO: 153569 - DNA, 648 bp, Homo sapiens; identical to SEQ ID NO: 129446

SEQ ID NO: 153570 - DNA, 3520 bp, Homo sapiens
atgtctaagtcagaggtgagttaggcgcgctttcccacttgaattttttcctctccctttcctgaatcggtaagatgctgctgggtttcgttccttgcaccagcccattctacagttccttcggtcgctgccacggcctacccctcccaaagttcaagtcgccattttgtcctcttgatcgccatgaggccgctctccgccaaccatgtgttatcatgcgggactcgttactcgtagcaaaattcttaggcacacaggatctttgtctttttttaaaccttgccttggtgagcgagttttctaaagagcgattagtcccattgtggagatgcacccctaccgcccaagcctttgttgcgcgtgcgtcggaaggcgactagggacgcatgcgcttgcgatttcctagcactcccaactccagcatacggcctcccttgataggcagaagcacgtgtcttgttgcgacctgaacgaacaataagtgctaggtacacagttggtgtctagtttttcttttcctcgatggaaattgtttcgtgttgtagcccatttaacacttccccctccccccactctagtctcctaaagagcccgaacagctgaggaagctcttcattggagggttgagctttgaaacaactgatgagagcctgaggagccattttgagcaatggggaacgctcacggactgtgtggtaagatttggaagggacaaagcagtaaaacagccgatttccttggcttatcttggtgcagtcttctccgaatgcttatgaaagtagttaatagcattatagttagagctttgttggcaaaggaacgtcctgctttgattttaaaagctaacctcttaaatctaagggtagtgggaaactggacgaactttttataaaaggctggtgtaaagtttcctattgccctattcaaagttaaaataacaaaagcttttgcggtcagactttgtgttacataaattaacactgttctcaggtaatgagagatccaaacaccaagcgctctaggggctttgggtttgtcacatatgccactgtggaggaggtggatgcagctatgaatgcaaggccacacaaggtggatggaagagttgtggaaccaaagagagctgtctccagagaagtgagtgggttttttttcttcttcttcttaaacttacttggatatgtgctgctatgaacttaagattcgggagttttctaaacttaccaaaattttttattcgagtataggctttgctaatctaaacctatggtttttctcctattaggattctcaaagaccaggtgcccagcttaactgttgaaaaagatatatgttggtggcattaaagaagacactgaagaacatcacctcaagagattattttgaacagtatgggaaaattggaagtggttgaaatccattgactggaccggaggccagtggccaagaaaaaggggctttgcctttgtaacctttgacgaccatgactccgtggataagattgtcagtaagtatcagatagtggcatttagtaagggttccacaatctgtatggcattctaaaccctgataccatgttgtatctatgttttttttttagttcagaaataccatactgtgaatggccacaactgtgaagttagaaaagccctgtcaaagcaagagatggctagtgcttcatccagccaaagaggtatgcttgttgcttaattaaaccttaaaggtaactttgagttactccagtatgaatgatttaatgcttaaacttcatgtcttaaggtcgaagtggttctggaaactttggtggtggtcgtggaggtggtttcggtgggaatgacaacttcggtcgtggaggaaacttcagtggtcgtggtatgtatggtttatctacatgtagttctgacttctcaccatctttgctatgaagattttacagtacgggaactgcattcagaatgtcactttaagtccaagtcatacttaaaacttgaaactttttcttacaggtggctttggtggcagccgtggtggtggtggatatggtggcagtggggatggctataatggatttggcaatgatggtaagttttttaggaataagtagagaaaaattcctggcaacctggatctttagaataggttagtagagactaaaattctggtgcatgtcaaactcaactttgcccataacacgcatgctgtgagcaggccttcagccgttacacttgcacaagttttcattgtcaaatacttttgtcttattgagaagaattgtattcttgtaggtggttatggaggaggcggccctggttactctggaggaagcagaggctatggaagtggtggacagggttatggaaaccagggcagtggctatggcgggagtggcagctatgacagctataacaacggaggcggaggcggctttggcggtggtagtggtaggtatccagtgatccaagtacttggtgtgacagctagattagccttttagagcttgggttctggtgctgttgaagcattgtgtggtacactgcatggtatattaaaaacaaatgggcttgctatgctacctcctcctagctttaagctggggccgcctcactcccaaatagtagagataagtggatagtgttgtctttgagttagattagtatcatagaaggatttagtattttaactcctttgggaccttaggcgcttagttgatgtatccaagatacttctgcttgctgtggccctggatccgtgaaggccttcaaggctgaagggtatgcttgtgccactctgaaaatctctttattttatgtcatggtgagttaggccagttttctttgtattactggattattcaactgaatgcctttcccagagaatgaaatgcaaagattggagtcaccatagtttgggagaaaggaaggctgataactcaaccttattttattctgactgctaaacagaattggaaactaacatcatcctcaggtaacagataaaggccctctttcccattcataggaagcaattttggaggtggtggaagctacaatgattttgggaattacaacaatcagtcttcaaattttggacccatgaagggaggaaattttggaggcagaagctctggcccctatggcggtggaggccaatactttgcaaaaccacgaaaccaaggtatggtatctatgtaattttggataatgtcaaaagagtgtctgtagctactgctgggaagaaagccctttaactgctatgtctgggcagcaaaacgtttatagtttagaaccttcagaaagtgataatttgatcacaaattagaaaaatcatgggacctctttaccacctcccttgtagtagggccatttttaaatggccagacacttgaatttaacttttattatcccaaatatgaaaacattactgttggcactttgaaactttaaaagaaaaattgtacttttcaggtggctatggcggttccagcagcagcagtagctatggcagtggcagaagattttaa

SEQ ID NO: 153571 - DNA, 356 bp, Homo sapiens
  misc_feature (1)...(356): n = a,t,c or g
ctgcttttccaatcaggagcttggttctaaccttttgggagatgattaannnnnnnnnnnnnnnnnnnnnnnnnnnnnnnnnnnnnnnnnnnnnnnnnnntgtttcgccctcagctttcgctcccannnnnnnnnnaaaatctctgggctaatatcttctactctttatagaatatttcaaagaaatatatttgttcttaaagatacataggttagagatattgagcgctacacgcatttattttggttttaccttaacatattatgatccctcagttttgggggcatttagtatttatgtttatgtttttatcttatcaaaaagtgtcttcttacctttgatatttatactcacc

SEQ ID NO: 153572 - DNA, 3255 bp, Homo sapiens
tcaggaggcggcaatggcagtgccaccacccagcttaacaatcatctgctggcagtcgttgcaggagcgccggtcgcccaccttctccagggtgcgggcagcttcggccagcagcactgcccgctggcccggggaggagaggaaggagaggggcaggtggcggcaggccagcaggatggcggtggcccgctctcgctggccgggccaggcatccacctctccgtgcttggtgctctgcgtggtgcgccgccgcaggctgtgttccagcagctggtgggtgcgggtggggctggctcctgccatcaggcgcacggtggcttcatgcaggaacaccagagtgggctccaggaggcaggggtgccgctccaggcctggggtacatgccctcttctccacagtaaggaatggctctccgatgatactgtctgttgtgtctgtcttggcttgcttgcggtatgctgggcggaagctgtgtgccagcctgcgcaggctgcccaggtcccgttggaagcccgccagttcagcgcctgacgcgtggtaggtctcccccacagcctggctggcactggcctgtttttgccagagcgctgtccgtagcgacagtagcaggtcacaggtgagcagctggaccaccaggcctctccccagaccaacactcagcagctctgggaggaagtggagagccccagagtctggtgaactccgcaggacgtgagggaacagctcaggggagaaccagttccttccatggccccaggaggtgggagacaagccctccccattgtggttgagggcagggtcagaggtggccccactgacgttgaggctgctccataggtggccactggccctctcgcaatggcagaaggaactctgctgcccatctgctttcccagggagtgaggcatgcatggctctgcaggcatggaagatggccttcaccagggggctctctgtcacttccagggccttggggatgcgttccactttggtaaaatgagagcgcacagctgcatcgtctccctggagccagctgatggccacagtgattgcagacgtccaccaccgacagatgatgtctggacccagggcggacttgagcacggagctcctggagagtggggggctcataacccccacagagtccacaaaagaatgaagtaatttcaagtactccagagcactggagaattcacagctctcttcttcctggtctccagccttcttcttggcctgaggtttcaccaaggactctatagctcgctccagcaggttcttgcagaaggcctggtggacctgcgcaatggggtcagctgggttcctctgggcacagtatagactctccttggcagctgacttcacagaccagctccgctccatgaaaaacttctggcccagggggtggcagagccagcgcagggagtcaggaacagcactgtgctcggggccacacaggctctgggctcggctgaggaagtagctggccaggaagcccagcttgcctccacaccgggtcttgagccccatggcagcagtcagatggatctcaaccagtgtgctcggtgggatcttctcctctgcacattcagccaggttcacggcacacaacgccatgtgtacatcggaacaggcggatcctgcaggaagcttccctgtgatgtgcagctggtgcagccggtgataggccagagccgcatcccgggcgctggtcttagcttcgtcttcaaagcctgcctcagtggctggcgtggcccgccggcactggaagactttcttgagcagccagcgcaccaggcgtagcttctgcaggctgtagcggatcacgttccaggagaggctgcaggccaggtccaggcgggaggtgggcagtgcccggcccaaaactgccaggcaggtttgtaggttgccggcagcagctgcaaaatctcctctggcgagatccagatctgcctgtttccggtgcctccagaaggtgaccgaggagcgcgagtgtggccggatcactggctccccatgaaccagcagcttcacaaagacgctcaggacaatcacaccatttaccagccataagagaagagtaggcatcatccagtcaaaccagcccccagaacctgactcgaatgacaggacactgcggccagagcctgagtgtgggtgctggtcagagtcgtgggcccctccccactttgcatcatccaatagagggcttcctggctcagagtcaatggagtagggagagaagccagcctgggaccctgagtcagaggctgggggggacatcagaaggacattctgattaaagtcctcgatcttcaggtccacctcattgtccaccagactgcctaggtcgatgccctttagaagcttgttcttttgatttgccagcttcagcaccatgttctcctggcgcagtttatgattgacctgctgcaagtatttgatgtaatcaatggccttcctcagaacgccagacttgtgcatcttggcgtctgtccccatgaccaggtctttcaattcgatgattttgtcattgatggaggagcgatatcgtttctcaatgatattatgggttgtccgcctttctccttctttggggggctcaagctgcttgactcccccaggtacctgcttaatgggcactttctcttgccccatcattacaggcattgtggtcagaatggtcccactgctgcccaccagggttggtacttgaagggcagccgtctggataggggtggtgagggcggtgagggccgggttctggaccgcagccataacagggctgccatctgtcttcagtgtggtcaaaacaagggaatctgtcttgatgatctgaggctggaccaggaccgggacctgctgcacctgtggcgcagcaactgtctgcaccgtagccggggcaagggtctgcagcgtgccattggccgtttgtgtcagcacccgctgggcctgtactgtctgcacctgctgctgaatggtgaccggctgtacctgggtgaatgaccgttgcactgaagggtccacagctccgctgctgctgcccctgccattgctgctgctgctgctgctgccactgctgccgctgctgctaccactaccaccactgccaggaaaggagctacacagctgttctgaaaacaagtcagggaactctcccacttgattactgacaaattgcagcatctcttgtgatccacctgcctcggcctcccaaagtgctgggattacaggcgtgagccacagcgcccggcccat

SEQ ID NO: 153573 - DNA, 336 bp, Homo sapiens; identical to SEQ ID NO: 147991

SEQ ID NO: 153574 - DNA, 744 bp, Homo sapiens
tcaacaagatggtgaattgactagtgggtagatccacaggacgggtgtggtcgccatgatcgcgtagtcgatagtggctccaagtagcgaagcgagcaggactgggcggcggccaaagcggtcggacagtgctccgagaacgggtgcgcatagaaattgcatcaacgcatatagcgctagcagcacgccatagtgactggcgatgctgtcggaatggacgatatcccgcaagaggcccggcagtaccggcataaccaagcctatgcctacagcatccagggtgacggtgccgaggatgacgatgagcgcattgttagatttcatacacggtgcagcagcagaggggaagagcaatccgactaggaagttggaggtccagttggagcagccggccactgccatcgcagctgggcgggggccctggctgaagagttcggccacaataaaccagggaatggggcctggtccaatttcaaaacaggccacaaagaccaagatagccccaatacagacaaagctcatcccattatagtgattagaaagtaaagtgaagatagtattaaccacacccgcgctgatggtggcatagatgggctgttgaacacctgcatccttgaagattcctgttgagtaatagaacaccttgttagccaagatggtctcgatttcctgacctcgtgatctgcccgcctcggcctcccaaagtgctgggattacaggcgtgagccaccgcgcccggtgcat

SEQ ID NO: 153575 - DNA, 483 bp, Homo sapiens
tcatgagagactgtcatttgggatattcacaaaactgttccactcagcagcaacgttgagaagccagacaacatcgcctgtgttcagcacgtccatcgccactgcggccaagccgatggaaaccagctggaaagttgtcagccattttaaacactcagctagagtcactgtcgtgctaccaactgtgaccgtccctgagcagcctaactggaaggcattctcccagtaggggcagactgacacttcacacggccgggtactcctctgagacaaaacttccagaggaacgatcagacagcagcattcacggttcacgaaaatccgctgttctgcagccactgctgcggatacccaggcaaacagggtctggagtggacctctagcaaactccaacagacctgcagctgagggtcctcgtgatccgcccgcctcggcctcccaaagtgctgggattacaggcgtgagccaccgcgcctggcccat

SEQ ID NO: 153576 - DNA, 1514 bp, Homo sapiens
  misc_feature (1)...(1514): n = a,t,c or g
gaaatatcctcccccagctgtgctttggttttttggtttttttgttttgagacggagtcttgctctgtcgcccaggctggagtgcagtggcatgatctcggctcactgcaagctctgcctcccgggttcacgccattctcctgcctcagcctcccgagtagctgggactacggacgtccaccaccatgcccagctaattttttgtatttttagtagagacggggtttcaccgtgttagccaggatggtctcaatctcctgacccgcctccacctcccaaagtgctgggattacaggcatgagccaccacacccggcctctgctttgttttttaaaaaaaaagaaatgcaagagagggagggaggcagcctcctgaccataaaagctgatttcttgatttttttttcttttttttttgaaatggagtcttgctctgtctccaaggctggagtgcagtggcatggtctcagctcactgcaagctccgcctcgcgggttcacgccattctcctgcctcagcctcccgagtagctgggactacaggcgcccgctaccacgcccggctaatttttttgtatttttatagtagagacgggggtttcaccgtgttagccaggatggtcttgatctcctgaccacgtgatctgcccgcctcggcctcccaaagggctggggattacaggcttgagccactgcgcctggtcagaattttttttttttttaagacagggtctcactctgtcacccacgctagagtgcaacgacataattatagatagctcactggaggcttgaactcctgggctcaattgatcctcccgcctcagcctcccaagtagctgggactataggagcacaccaccaagcccagctaattttttgtagttttagtagagacggggtttcaccgtgttagccaggatggtctcgatcttctgaccttgtgatccgcccgcctcggcctcccaaagtgccgggattacaggcgtgagccaccgcgcccggccgactggagtgtttttaatcttatgcaaatattaatgacacttggggggaatatagcttcctgagttaaatgctgcactttgctacagaagagggcaggtaaggtcacagactttaaaacagtaaaatataaagcaaactatttacatgcccgaggagtggttataaatatcaaaggtaagaagaccttttttgataagataaaaacataaacataatttttaaatgcccccaaaactgaggaatcataatatgttaaggtaaaaccaaaataaatgcgtgtagcgctcaatatctcaaacctatgtatctttaagaacaaatatatttctttgaaatattctataaagattagaagttattagcccagagttcttnnnnnnnnnntggaagcaaaagctgagggcgaaacannnnnnnnnnnnnnnnnnnnnnnnnnnnnnnnnnnnnnaacctctctttttaatcatctcccaaaaggttagaaccaagctcctgattggaaaagcag

SEQ ID NO: 153577 - DNA, 1256 bp, Homo sapiens
cagagattccccgccgcgttccctggactcaggagctcgccgcgatgccccgccccactctccacccgctgaatgcagggcgcatgctgctacttggcggctcaagccccgcccgcaccgtccccattctctgaccgcccctctcccggtacactgggcaggcacaacagagccgctcccctctcctcgccccgccaccgggactagagagcgcccgccgctgcattttccggcgacacctcgcagtcattcctgcggcttgcgcgcccttgtagacagccggggccttcgtgagaccgcttgttttctgcaggtgcaggccctggggtagtctcctgtctggacagagaagagaaaaatgcaggacactggctcagtagtgcctttgcattggtttggctttggctaacggagcactggttgcttctggtgggattcattgggtatgtaaaagcaggcagcgtgccgtaccctggctgcagggcttgcttcttttgggcagttttagccggcctggggtgcttaccagctgtctcagggattccaagggaacgtttttgggtttttcctaggttacatctggtaccttggctggcattatgggaatgaaggttctaccactcttggaaaattcaatgcctgcaagttttaattgcaaggtgccagttttgctggatgggtcgcccaaagttggagttagtatgtttcaacagacccccatttagcagaagttcatgtttccagcttaagactggatggaagaattaaaaaatctgccatcttcccactattttccaatatatttaagagaaataaagtgcagccatttttggccatcctgaacattttacccctaaaaaagaaaagacccccaaacctggccagagaggtgggaaaatccagtccatgaattaacaaaccctacagaggtggcgaagtatgtaaacacaagaagcttaaataagacccctccataagagcttggattcttgtatattgatggttgtccttttcctttctgtatcctgtaggtaaatcctcaagggtaaaatgttaggtgtcagctttcagggctctgaaaccctattccctgctctgaggaacagtgtgaaaaaaagtcttttaggagattttacaatatctgttcttttgctcatcttagaccacagactgactttgaaattatgttaagtgaaatatcaatggaaaataaagtttactataaataataaaaaaaaaaaaaaagggcggccgct

SEQ ID NO: 153578 - DNA, 453 bp, Homo sapiens
aattcccaaccgacccacgcgtccggagcgacaagccgctggcagccgcggatctcaccgccgctcatgccttatgccagcctggaccatcttggaggcagtgtaagatcatggaagaactttgaattaggtttttagaacttcagccataaaaatgggcagaattttccttgatcatatcggtggtacccgtctgttttcttgtgcaaactgtgatacgatcctgaccaaccgctcagaactcatctccactcgtttcacaggcgccactggcagagcatttctttttaacaaggtagttaacctgcagtacagcgaagttcaagatcgggtcatgctcactggccgccacatggttcgagatgtgagctgcaaaaactgcaatagcaaactgggatggatctatgagtttgccactgaagacagccagcgatataaggaaggccgcgtgat

SEQ ID NO: 153579 - DNA, 2596 bp, Homo sapiens
  misc_feature (1)...(2596): n = a,t,c or g
gagactcgggtggccgaggggcttcataccagctgaagatcgacaagccgctggcagccgcggatgtcaccggcgctcaggagatctgttggtaatctgaggatttttattctacgtcgtcttgacagatggcatacctgaagtaacttcgggctaaccttgtgtttttggaaaattagtagacttggtggtgaagaaactgggaggagtaggatattagctaactttgcatatccacatatagagcgtcgcagctgcattccaccagagaggaaccaataggcctgtggtgctcccagggtacatattcatgccagaagtgaagtgccttggtgaattcgtttcctgaaagtttatcgcatacttgtactgggttaggtttttagaacttcagccatataaatgggcagaattttccttgatcatatcggtggtacccgtctgttttcttgtgcaaactcgtgatacgatcctgaccaaccgctcagaactcatctccactcgtttcacaggcgccactggcagagcatttctttttaacaaggtagttaacctgcagtacagcgaagttcaagatcgggtcatgctcactggccgccacatggttcgagatgtgagctggcaaaaactgcaattagcaaacttgggatggatctatggagtttggccactgaaggacagccagcgattttaagggaagggccggcgttgatccggggaacgttgttttagtttcggaggaggagttgagggctttggaggagcatggtaccacctgataactcttgaagatacagagagaaatccatcttttccccaggtctcctttcactgaaaacaaaaatctaccttacatacactgtcaccttagcatcagagtccggattaatgaacctgcggaacaagaggtttgtgaagaatcttaagatggaaccctttctttcctntcctgtcctttttntttttaaaattttgtatttttccatcccaaccagcagtgtgtaggagagaatattatgcaggatgcccgttaattttttaccctatgttttacatcttgagggcaggcaggagtctgtctggcaggctatgtgggtggaggctatggtaagggggaaaaaaatctgggcctgttagagtgaaaaaagtgtgttttatgtccaattgtgaaaggaaaatgttaggaagtatgggtttttaaaccttgggccttcattttaaaacttttttttttaaaccccagttatttcacttggatttgccaagcttcccgagaaagagatcccgaatctgtgcccagcgctaaaggctctttgttagcaagggcttgtgctggccggtgtgccatattcttgttggagatgaaccgtagcaccagagcccattcttccttgtcagtcttggcccaaagatgtcaccattcctagttatttgtcaccacgtcaattggtgttgattggaaactttttctgagatggggacagaactgctgggttgtctttttccatgtaacttaaggcatagtaattattaaataaagtaatagttgggatgcttttgggtcctgtgttgcttttaaaaacaccttattaaaagagggagagtatttggataaggccaatttttccataggtagtaaaagttttttttcattctcttgaaactagaattgaccatgcatataatattctttgtttaaatgaaagcatactgttgaaacccgcagtgttgcatttagaaaacagttgaacagaatgtcaatgtgcattcatgcaaaaaaacatttaatctgcatctgttttagaaaagggggaaatgaagcaacttgtctaaaaatactgctttacaaagcatttcagcctttccccctcagttttgcattgattttttgacaagtctgtagagcctaatagtttccatcaaaggcctagatctcttatttagcatttttttcagctcttctctcagaagttcagctgttgaaacgaaaactgtactttgtaccctcacatacaaagggatcaaattttgacctggtgttattttagccccaaatttatgacattacacaatattacaaatgtaaatgtttctttacccaaactacttctagatattctagtattggccttcctggtgggaattaaaatgcccggtaaaattggcctaattatttggaatggaatgaatgggatgggatgttttgccatgcctcaatttcctaggtccctttgtcctagaaagggaaatttgcctccagttgaattagtgaaatatttctgtcggttgatattaaaagtgacttctgagtacagttaagttcctcccaatttgccactggggctgttgggttaggaaggcatagggtaactgattaagtagggtatggatactggcatttgaaataagtgggacacaaactatcctttctccaccctgggactcaatctgagaacaacagcattcatttccattcatttccatactggcttttgattatatgcagattcctagtagcatgccttacctacagcactatgtgcatttgctgtcacaataaagtatattttgtcttgcaaaaaaaaaaaaaaaaaaa

SEQ ID NO: 153580 - DNA, 676 bp, Homo sapiens
actgagagaaactacaaagctggaagccatcacagtaattctgacaccacctcaaacttttctaaccttaaaataaatcttactggtgaggaactttaaaaatcggaaaaatgtgacaaaatctttaaatgatggtcacacttgattgtaggtaagataattcttactagaaaaactcttacaagtgtgaagaatgtggcaaaatttttaatgaatactcacaccttattgccaggaaagcatttatacttgagaaaaattgtaccaatataaagactgtgaaaaagccattaatgtctgctcacatcttactcaacatcagagagtacttaaaaaaagtattataaatttaattactgtcaaaaagtatttcagaaaatataagcttttaaagtatttattttgaagacaaacattacaaataaaagagggttgtaatacctttatttgtatcacagatcttattgtacacattttgtactagagaaaaccctgaagcagttacttaaactttgttcaacatcagggaattcagattggagaaaaaccctgcaaatgtaataaatttgaaaaaaaagttttccaaaactacaacttagacaacaccagagggttcatactgagatatatttttgcagatgcagtatatatttaaaacatttaatccaaaaaaaaa

SEQ ID NO: 153581 - DNA, 441 bp, Homo sapiens
ggctggggacttcggcacgagaatttgagtgcaacgttgaaatgcttaaacaggctgtgaaggatcataatgtaggttcacctcctaaatccccaacacatgcctctccccagcacacacaaacagagaaggactaccctctgaaagggacatgcagaacaccttcagtattatctcaacaatcaaaagctaagctaatgtctagttctgttgtggttagacttgcagatttcaatatataccaggtctctacagcggaacaatgtcgttcttcccccaaaagcatgatttgctgcaataaaaaatccctatatcttccacaagaaatgtcagctgtctatatagaattcacagaatattactatccagatggaaaggattttccaattccatctcccaacctctatagccagctgaatgcactacagtttactgtggatg

SEQ ID NO: 153582 - DNA, 1251 bp, Homo sapiens
atgggtttgggaatccctaaacagagaagacttgtggccttgcttcctgcggagaattctgggagggagcagctacagcacagcagaaatggtttcagggcagaccttgcagagagcacacctaagagaggccgcttccatctccctcaacagccaaggggtgtggaggaagtctgcaaggttctcacatcagctggagaggggcacagaagagcagcaactacagattccagatctaggccaacacccatcatccaaggcaccagtctttcctcaggtccaggcccaccccaggttccagactggtccccatggacacaaactccagagaaaccaggatccaggccaactccagtagattcccatgctgggccaaacaccatggactcaggctacaggaccaaccatatagacccaaccttcaggcagatccccatgttctcattactcaggcatgtccacagactcaggttttatgcttgcccactcactgacccaagtatcaagtcagcccacatgcagactcctgctagaagcatgcccatggacttcatcaggtggcctgcccagaatctctggatggacggacaggcaggtctttggttctgtggacagagacttgatctctccctagaagggagctcctggagtgagaggcagcccccatttctatggttccataaactcagtcattccagcctgagctgttcaaccctgccagctgtgaagaatacaggtggtccagatgaagaagccaccccaaccccacaatacacctgctctaccaagaaacagccagacagcttcattagaagggttcctgattctgtcccacatgtctgggtgagatctcccattgagggtcgccagccatctcctgcaggtgcatatatgccaacagcaggtcagtgccccctagaatggaggtgccagagggtagagttggttcccatctttgctgtttcacggccttcactggtgatacctccagaggtcagacccaaaagatttataggcacacttataacctttatagtctcagccatagtcatcctagcaactgctagtgtggctatagcatctactaccgaatcagtgcaaacagctgcttttgtagacaatttggccagaaatgtgtctaatgaacttctcttacagcagggtatagatcaagagattcttgcacgtctgcaagccctcgaggctgccttggaatttgtgggggagcgacaagatgccctagcattctga

SEQ ID NO: 153583 - DNA, 463 bp, Homo sapiens
cgaaacttttaaaaactttaaaaatatttaaaccttttaaaaatagtatgtctgtgtactttatatatgtgtgtgtctatatgtgtgtgtatctatgtgttcctccggagctgtcttcattatccagcttctgtgccaggcctatgattttggcctttatttttcatcttcaaatggagtagaagaattaccaaatattccatcaatggaggtacaaatcctttatttggtagatgaagtttgaagcaactgtttggctttgagggaagtatgaggcaaatttttcagcctttgtgaaactttgtttccttcaggggttggctccttcttttcttcctgtactatggactcctctaggtccttaggggttgggtctaaaaattcccacttttcattggcataaaacacagacctccgactatcattatgtccattcccaggatggaaagaagacatcaaattt

SEQ ID NO: 153584 - DNA, 12006 bp, Homo sapiens
  misc_feature (1)...(12006): n = a,t,c or g
atgagagtaggctttagggatattgttggtagcctttctgagtactctttcggatgccctgtgaattatgaggttttccactctgtctggatcactatcctttgctgcctgatggccaatgaccgaaaaccacagtttctatacttttttcagttctttagttttcacggcggaagaaatttgatgtcttctttccatcctgggaatggacataatgatagtcggaggtctgtgttttatgccaatgaaaagtgggaatttttagacccaacccctaaggacctagaggagtccatagtacaggaagaaaagaaggagccaacccctgaaggaaacaaagtttcacaaaggctgaaaaatttgcctcatacttccctcaaagccaaacagttgcttcaaacttcatctacaaatagaggaactgtcattactgccacgagactggcctttgatcttaggacccagtccactaagtgttctcaccctgcttctggttcctctggtcacagcacagatttccagctggaaggggaatggggactatgggatctaggaacgaaaggtttcaagctgccttactcccttagcatagacattgacaatgtgaaaagcccacactttccccatgagctcaaaacgttgacagtgtctctgggtagcaataggagaatgggtttggaaaagaaagagtgccaccaaaagcagggagccctaagggagcagttacaggttcacattcagaatgtagaaatccttgtatcagagaaagctgagttacagcctggcttacactcagcatgctgccaggcagaaagaaggagtctgaggatctggccagccgcctttagtattccaggcagtgtgtgggagagttggagcaggctctctgctgtctccacacagcagaagaaagcagacaggttcattcctttctctactgcttctggccataaccgaagcaatgaggacctgaagcaggagaaatcagaattggaagagaagcttcaagtcctggtgactgagaaggctggcatgcagcttattttagaagagccgcaaaagaaattacaaatgatggcactcctgcttcaacaggctagggggtgcactgtgtggaacggcccaggctccccaaatctaaacttctcactcttcaccatccagttttcaaggcactgtgaagcccctgatgcgaaacagcagttaccgcaggccatggaggagcgggcacagctgaaagcacatctagggcaggtgaagctttgcaggggagggatgtggaaggaagatgaccccaggtggccaggagcaggagtaggaggagaggctgctggagctggagcaggtggccgagctcttgcgggagcaggcagagtcacgcaggcaaatcctggagaccatgcagaacaaatgcaccaccatcagccacgtgctcacccagaaccacaagctcaaagagcagctgtctccgctgcagaacggattcataaagctgaccaacctttgattatccacgggtgcatgattgctctctactcggtggtcggcaaatttaattacccacaggacagacccctgcaagtggtgtcccgcgtgaggcacactgtgaaggatcacaacggacccctcgaaaacaaaggtgaaaagaactgcacagtcaataagtcattcccagaaaaaggaacgctagacgtagagctctgggaacaagtggggagaaatcttaatcagcatcatgtgcaagggcaatgggtcccagtatcatctttaatgctatgggccttagtcagggcagccctggctccattatacacagaagagcctaaaaaggggaaggaggaggaaccgtcacctgctttaccacctccttttccctcagccccaatatcgccaggccaaaataacaaagaggaaatggaggttttgcctgagccccctcctccaataaataggaaaaaagacaagagctatgctacagctatgggaccctttcttaggcaagaggcattaagtggggagctcttagcctgcctggtcagacccgaaagattcataggcacacttacagccttcatagtctcagccatagtcatcctagcaactgctagtgtggctgtagcatctattactgaatcagtacaaacagctgcttttgtagataatttggccagaaatgtttctaatgaacttctcttacagcaagaccaacctttgattatccgcaggtgcatgattgctctctacctgggggcagggggagttaattacccacaggtggagctgaagagccaggaggctcagagtctgcagcagcagcaggaccagtacctgggtcatctgcagcagtatgtggccacctatcagcagcaggtggtcacctatcagcagctgacctctgaggaggaggagctgcacaaccagttactgctgcagacccagctcgtggaccggctgcagcagcagaaagctcaaagcaaagctgtggccaagatgggctgccaagagttgcgggagacccaggagcacctggaagctatcagccagcagaaccagcagcctcaggccccagttgagcctcatggctctccctggggaaggtaccggagactgctcacaggaagaggagagagccccaggaggaaacgggaactgtgtccacactaagtttggcaccaatatggtgaccttctgggagcaggggaccaccaggttaggttgcctaagggtgggtgaactggcccaggagatggacagtgaggaggaggaggaggtgcctcagcccatgccaagcatcccggaggatctagagagccagaaggccatggtggcatttttcaactcagctgtagctagtgccgaggaggagcaggcacggctatgtgggcagctgaaggagtgcactgccagcgcctggctcatctgttggcctcggcccagaaggaacctgaggcagcagccccagccccaagaactgggggtgatcccatgtgtggggagacccaccaggccctgcagggggccatggagaagctgtgggagagtacatcgcactgtaccagagccagagggcagtgcggaaggaggaggagtgcatcagcaggctggcccaggacaagggagaggtgaagatctttgtgaggtgagccttgccagcagtggggagtctgcacaaggagaggcggggaagcattctccctgtgacaaccccactgagcagcagatcatgcaactgcttcatgagatgcagaacctccaggagcacccaggcttgggcagcagcccttgcattccttttttgtaccagactgatgagaacaatgagtggccagagccggcttcacaggatgagagcctgctaagctccggaggctttccaggaagcgtcccttggaaaggatgtggcctttttaccactcccaatagcaccctggtaggatacttttatgggcagaacctggtcattttcctaagaagacaaaggctttgtgtacaaaagggggcagagcccaggatggctgtgggccagagtgaatacggctttgctgaaaaagtagttgagggaatttctgtttctgtaaattctatagtcatcagaattggagcaaaagccttcaatgcatcatttgaactttctcagcttcggatctatagtgtaaatgcacactgggaacatggagatttgagatttactcgtattcaggatccacagagaggagaggttttgacttttaaagaaataaattggcagatgataagaatagaggcagatgccacccaaagttcacatcttgaaattatgtgtgctcctgttcgattaataaccaaccaatcaaaaatcagagtcacacttaaaagaaggttaaaggactgcaatgtcatagcaacaaagttagttctaatattggatgacttattatgggttttgactgattcccagttgaaagctatggtacaatatgcaaagtctcttagtgaagcaatagaaaaatcaacagaacaaaggaagagtatggctcctgaacctacacagagctctgtattaggcactaaagctaatgatgacataaaagtattcgatgttttaatacctctgtttaggaagttaaaagagtacagttttaaaactactaaagtaaaagcaaatgaggaaaaaacctgggtaattataggcaagagaggacgtgtgagagttaactgtgcagagaatcaaagccataaggaattgctgaaattgaacacaaaacttctgttggagttgtctgatggctggggcaagaacagggacaagcataatgagctatttatcactttcttaaaagtgattattagtttgtatggagcattattagttgttccatgtggctggggaagcctcgtaatcgtggtgaaaggcaaggaggatcaagtcccattttacatggatggcagcagtcaaagaaacaatgaggaagctgcaaaagcagaaacccctgataaaccatcagatctcagctctacagtagtcgcatctgcccagcaagtgaagacaacgcaaacttcaaatgctcctgatgtaaatgatgcaattgtgaaactattcaatgattttgatgttaaggaaacctcccatcatttagtgatttctcatctagatctacacatatgtgatgacattcatgctaaagaaaaagagtcaaacagacgtattactggaggggcaatgcaactctcttttacacagctaactatagattattatccttatcataaagcaggagatagttgtaatcattggatgtattttagtgatgcaaccaaaacaaaaaatggatgggccaatgagttattgcatgaatttgagtgcaacgttgaaatgcttaaacaggctgtgaaggatcataatgtctctacagcggaacaatgtcgttcttcccccaaaagcatgatttgctgcaataaaaaatccctatatcttccacaagaaatgtcagctgtctatatagaattcacagaatattactatccagatggaaaggattttccaattccatctcccaacctctatagccagctgaatgcactacagtttactgtggatgaaagaagcattctatggttaaatcaatttctgttggatttaaaacagagtcttaatcagttcatggctgtgtacaagttgaatgacaattcaaaatctgacgagcatgttgatgttcgagttgatggcttaatgctaaagtttgtcattccttctgaagtgaaatctgaatgtcatcaagatcagccacgtgcaatttctattcagagttctgaaatgattgccacaaatacaaggcactgtccaaactgtcgacattctgacctagaagctttgtttcaagactttaaagattgtgatttttttagtaaaacatataccagcttccccaaatcttgtgacaattttaatcttctacatccaattttccagagacatgctcatgaacaagataccaaaatgcatgaaatttataaaggaaatattactccccaattgaataaaaacactcttaaaacttctgctgccacggatgtttgggctgtgtacttttctcaattttggatagattatgaagggatgaaaagtggaaaaggacggccaataagttttgtagactcattccctctttccatttggatttgtcaaccaacaagatatgcagagtcacaaaattagccgcttatcttgtaatcaggtatctctaaatacatcacaaagtgaatctagtgatctggctggccgattgaagcggaagaagctcttgaaggagtattatagtacagagtctgagcctttgacaaatggggggcagaagccttcttcatcagatacatttttcagattttccccttcctcgtcaagaggcaagatattcatctcctagttcatgttcataaacatgtcagtatgcagattaatcactaccaagtatctgcttctacttttcctgcatgagtcacttatcctgctttcagagaacttaaggaaagattgtagaagctgtaactggcagtcctgctagtcagacatccatttgtattggaattttacttagaagtgcagaactggctcttttgctccatccagtggatcaagcaaatactcttaagtctcctgtttctgaaagtgtgagcccagtggtacctgattatttgcctacagaaaatggggattttttgtcttcaaaaagaaaacaaattagtagggatataaatagaattagaagtgtaactgttaatcatatgtcagacaacagatctatgagtgttgaccttagccatatccctttaaaggatcctttgctttttaaatcagctaggtgatacaaatcttgcaaaaagggcatttccttttatggactatttatcagataaacatttagggaaaataacgtgaagatgaaagtagtggacttgtttacaaaagtgggctcaggagaaattggatcagaaacaagtgacaaaaaggattcattttatacagattcaagtagtatcttaaactacagagaaggattccgaatatacctttcatttggataggtgatgggtaatcaaaacatactttcaaggtactttaactagtaaaggaaatgaaacccatagagtccatctttaaagctgaagatttgcttccagaagcagcttcactctctgaaaacctgggatatcagtaaagaagagacccccccagttaggaacacttaaattcacagtcatctttaagtggggaaagcctaagggaacgtttgccccaccccaacctggggttcctctctggtgttttcttataagaatatgaaaagaagctcttcacaaatgtcatttgggntaccatttcacttgacagcatgatatttggaagaacagttattagaaagtgatggaagtgatagccatatgtttttggaaaaaggaaatagaaagaactcaactacaaattacaggggcacagcagaaagtgtgaatgctggtgcaaacctacagaattatggtgaaacttctccagatgccatcagtacaaattcagagggtgctcaggaaaatcatgatgaccctgatgtccgttgtggtatttaaaattactggtgttaatggggaaattgacatccgaggggaagatacagaaatctgtcttcaagtgaaccaggtgacaccagaccaattaggcaatatcagccttcggcattacctttgtaatcgtccagttggttccgatcagaaagctgtaattcattccaaatcctctcctgagatttctctgagatttgaaagtgggcctggtgctgtaatacactctttacttgcagaaaaaaaatggatttctgcagtgccacataggaaaacttcagcactgggtttcttacatcttctcttatgaatattcaacattttttggaagatgaaactgttgcaacagtaatgccaatgaagatacaagtttctaacacgaaaataaatttaaaagatgatagtccccggagtagtacagtatcccttgaaccagctcctgtaactgtacatattggatcatcttgtggtagagagaagtgacgatggctctttttcatatcagagattcttcacatgcttaacactggaaatgatttggaaagaaaatgtcaaaagcgattcagtgctgctgaccagtggaaagtatgatctgaagaaacaacgcagtgttcacgcaagccactcagacaagcccaggggttccttggccttctcagtcagctaactttcctggagttctcctttggacttcacttaggggaacagctcatggaagagaatgaatctcttaaacaggaacttggctaaagctaaaatggctcttgcagaggctcacttgggaaaaagatgctcttcttcatcatataaagaagatgacagttgaatagcaggagtggcagtcaaaactgaaattatagctctgggagtaggaaggttatatttataatgtggatgttaccagttaggggaagacttttattttcatgaaaagacaataaaacaaaatggaatgtgatgaagtggtgactatttcaaagccagtttagaaagtattagtacgggcattacaatcttttggttgttttgtgttttggggcttaaccctcttttaagctgttgtgatcctagggaagtcaacacatagtgtaaaataattaccatgccctaatgaaaagaagatgtcatttcctaattttgatatctcattttcggcattttttaaaatgtaaaaggaaaacctcttgtgttcacacagattgctgaattgatttctccatatttgttaataatttactattatttacaaagattcaaatgcttttatgactaatgtaaaatgaaaagaggcttacattttaaatgttattaaaattatgtacttaaatctataattatttaattattgtaaaaagtccaagcagatcaataaactatataattaatgggtttggaaaatcatcaccctactgaacttacaaaatatcttgaaaatgtgaaaaatatcattttaaataatgggtacattgtataagtggaagctataattttcaacaaaaagatggtacaaatgtaaaagtaaaaagcacaaactatacaaaagcaaaatctatggccaagtgatttaaaagcattacttgtacattcctttaaacatttgttgttagaagcaaaagagtaatttatcctgctaaatttggcaccatttgtaattataaaaattttgattaatactatttatattaatttctttaccttcattttttctccttaaggagttgattgtttttggaaatgtttttttccttgcacataagacagtttcataccattcttatagaatcatattaggtgggtgtttgcacatactaaatttataaagctagttttgattaaagctctatgtgagatatatatacatacacaagtcttctataataagagtcgttggtgaattttgaattctattttgttaggaattaaggttgaaatcaacatgaaagaatctcaatcatgcattataaaataaaagtacatgggtgttaagaaacaagagacttttaaagatttaaaatatatttctgatagaatttaactaagtggtgtgtattttaaaattcacattcttaaacataaatctatccaagatagaaaatgaaatagctggactactctttctttaagatacttgaaaattttaaaccacattgcaacactttatggtgctttgcgtgtttggcatgacatacacagtggtcctggtatataagtgcttgggggaaaatacatattttgtttacattaaattttgaagtgatttaggctttattgaaaacaatactggccttccctccccttctctaacatccattttcatttacgttatttaaaatatacaggcactgttttgggtacagaggatatagccaagagcaaattgatagtagtttacctcagagtattaaaaaaatcataataagtcatgttaatctaaaactatataatagccttagattaaatgtgcagatgtctaattaaagatttaaaatgtatagcgtatgtccttagaacatttgatttttaggtatacattcggcaaaaacagtctgttatggaaaagaaggattgatgggacattaacttcttccgagctaacattgtttctgaagattgacctattctatataaatttaaatttttctatgtttttctttttttttttgcgatgaggtttcgctcttgttgcccaggctggagtacagtggtgtgatcttggctcaccgcaacctccgcctcgtgggttcaaatgattctcctgtctcagcctcctgagtaactggggttacaggcgcccaccactacgcccagctaatttttggtatttttggtagacacagggtttcaccatgttggccaggctggtcttcaactcctgaccccaggtgatccgcccacctcagcctcccaaggtgctgggattgcaggcgtgagccaccgtacccggcctctatcgtatattataattgcttattgttatagaagctgaatgttttacttactacttttaaatttatttggtcttcccaaggaaatcatacaaacggtagagattatgataatctgagcattctgtgtgcttagtttgatttttttatttataagcagtactatttttatagatgtttaaaattcataaaacactgtattctgagaggtaggtattattcaaatgttagaaattttttttaaaaaaatgccctgaggcttagaaaggacaaatgactgaaatcacaattagtaatctggtctttagacttaaagcctagttatatgcttttattatagcttagtcattaattcacacattttcccttatcttttttatcttttaaaggtgaccataaaactttaaattgtgtgtgtacgtctatgtatgaggtatatgttaccctgtttgtgttattcaaactacctaaaagataggatgatttttgtttaagtgaatcccaaactagcagtctgagaaatacaggaaagcctgataattgacttaccagagttggctttttttttttaagttaccataatttagatataaagttgtcatgtcctggaatttaaaaaagaaatctctagctgagagatgttaatggtcaggagttgaaaatgacaattgtgctttgctttttatttttattttttgtttacttttgagttttttggagtttttttcctatatttttaattgagaagtaaaaattatatatttatggtgtacaacacgatgtgatacatgtataccttgtggaatggctaaatcaagctatctaacatgttacctcacaaactttttttgtagcgagaacacttaaaattttgtaacaattttcaagtatacagcatattgttattaactgtaatcacgtgatatacagtagatctcttgaacttatatttactaactgcaatttcgtgtccttttacaaacatctccccatttccccatcccccagcctctgataaccagaattttactctccatcccatgaagttgactttttttgcactccgtaagtgagatcatctagaattttggcatgtctttctgtgcctggcttatttcacttaacacagtggtcccctgtgtagctgggaccacaggcgtgtgccactacacccaggtttatccatgttgtcagaaatgacaggatttcctttttttaaaagttgaatggtattctcttatgtatattttccacatttgctttttccattcatccattgatggacagttaaattgattccatatcttggctattgagtaatgctgcagtgaacatgggattgcagatgtctcttccacatactgatttcgtttcctttgaacatataccaaatagtgggattggtggataatatggtagttctattttttaatgttttgaggaccctccatactgttttccgtaatggctataataatttacattgccaccaacagtgtacaaagcttttctttccttttctctgcatcctctccaacacttcccttttgtcttcttgataatagtcattctaacgggtatgattacagtagctttgtagtgggttttctgtgctgtgctttttaatttcatgtatgtaaaaaacattgggtattttgaatgtttttcttttctcaccttatcctagaacttgaggctgggcgcggtggctcatccctgtaatctcagcactttgggaggccaaattgggcggatcacttgaggtcaggagttcgagaccggcctggccaacatggtgaaaccccatttctactaaaaatacaaaaattggccaggcgtggtggtgcacgcctgtagtcccagccaatcagtaggctgaggcacgagaatcgcttgaacccaggaggccaaggctgcggtgagccacgattgcaccactgcactctaacctgagcaacacagactccatctc

SEQ ID NO: 153585 - DNA, 803 bp, Homo sapiens
aaaaaaaagagagagtgtgtgattagaagctaaataggaaagttttgagcttcaagtcagtgaggagtaaaaaagatttttaaaaagcaaagaaaacaaaatataagggaaaaatatgagaaaaataaaaataaaaagagaataataggccaggcactgtggctcatgcccctaatcccagcacttttgggaggtcaaggtgagcagaacacctgaggacaggagtttgagaccagcctgcccaacgtggtgaaaccccatctctatggaaaaatacaaaaatcagacgggcacagtggtggtgcccacctgtgatcccagctacttcaggaggcttgaggcaggagaattacttgaaccctgggaggcagaggttgcagtgagctgagattgtgccactgtactccagcctgggcaacaagagcggagactccgtttccaaaaaaataagagagaatagaagaagctactgcatgatgttagttaccaagcctgccatgggtcctctcttgctagacacacttccatagatccccccactgagctgtggatgggcaaacccctgtggaatcccaccctccccaacaccccacttgagccctgggccccctcctcccttcctcacctccaccttctccctgccttctctcttctctcgtgtgagcccccaggccttttccactttgagggagggtgcttcgaagaatgttgcccacacctaagtgtttagaaagcctatggtccgttcactcccgtgagagggtcttgaaagaataaaaataaattctaaaaaaagcctcaaa

SEQ ID NO: 153586 - DNA, 379 bp, Homo sapiens
gtttttatagcagagaaatataagcacagggaggttctgtcacttgccagtgatgatcccagcctgggagaggcagggatgcagcatgctcgcctttttgccctgccacttctcccagggagttcctaaaattcctgcactaagcctgtctctctccctagacctactcggagtgtgaagatggcacctacagtccagagatctcctggcatcacaggaaagggacaaaaggttctgaagacagcccacccaagcatgcaggcaacaacgaaagccattcttccaggagaaggaatcggcattccaagtcaaaagtcaccaatggcgttggaaagaaatgaaaaaccctggttaatcaaagatgttccagagtgcctag

SEQ ID NO: 153587 - DNA, 2572 bp, Homo sapiens
tttcgtctagtcacccccggggtcccggccttctcgggctgtggccgccgccaccgcggcaggacggggaggcgggccatggcgtcctgcgtggggagccggaccctaagcaaggatgatgtgaactacaaaatgcatttccggatgatcaacgagcagcaagtggaggacatcaccattgacttcttctaccggccgcataccatctaccctgctcagcttcacacatcgacagcctcatgtacttcgcctttaccacggatgactctgttccataagacaacatctggagaggcatcctctctggaattctcttatttcttatcatcaaagtgtgagctttccccaatggaccgctcactcgacctcatccagccttatggcgaatggtttttggactcagtgagctctacttcctgttcctggtattcctactcttccctgaattcgagcaggctaaatctctaatggattggctagatccaaatcttcgatacgccacaagggaagcaaatgtcatggagtatgctgtgaactgccatgtgatcacctgggagaggattatcagccactttgatatttttgcatttggacatttctggggctgggccatgaaggccttgctgatccgtagatacgggctctgctggacaatcagtattacctgggagctgactgagctcttcttcatgcatctcctccccaattttgccgagtgctggtgggatcaagtcattctggacatcctgttgtgcaatggcggcggcatttggctgggcatggtcgcttgccggtttttagagaggaggactgaccactgggcaagcttcaaggacattcataccaccaccgggaagatcaagagagctgttctgcagttcactcctgctagctggacctatgttcgatggtttgaccccaaatcttcttttcagagagtagctggagtgtacctcttacatgatcatctgggcagctgactcgagttgaataccttcttcttgaagcatatctttgtgttccaagccagtcatccattaagttggggtagaattctcttttattggtgggcatcaacagcttcccacagttgaggcagtactacgcttacctcaccgacacacagtgcaagcgccgtagggaacacaatgctgggtgtttggggtcattggtttcctggcccgccattgtttgcataaaatttggacaagtatctcttcttctaagacccaaatactctatgttgtgctttggcttctttgcgtggctttcaccactttcctcctgtctgtacggcatgatttggtatgcagaacactatggtcacccgagaaaaagacctactccggagtgtgaagatggcaccctacagtccagagatctcctggggatcacaggaaagggacaaaaggttctgaagacagcccacccaagcatgcaggcaacaacgaaagccattcttccagggagaaggaatcgggcattccaagtcaaaagtcaccaatgggcgttgggaaagaaatgaaaaaccctgggttaattcaaagatgtttccagagtgcctaggaactgaggaggggaaatgggaacttcatttgggaactccccgtggaggaggttcgagggcgcacaggggcaagccaggaagaggcgagggcactttgggggtcattattttgagatcgttaagtctttgttttcccacagacctgggccgcgttcaggcagatcatcgcctgggggggccttttgccaacgtggggtctcttctaacttcagcacttgacatgcggtcaccggtggcagcgcggtgtgttgaaagggaaacggtagctatttcatttcacagttgccaagagcagctccgcgccatgctggatcgtggatgcagcgtaaacatctttccttcagacgaggcattaaccccatggttaatggactggtcaccagtttttaattttattttttatgaatctacctttcccattgattgatttaagttcaggccacttttctgtctttttatttggttactgttgttatttgtttttaagttatggatgctttttaacagcctttagaaagccgctgctgaaattgatacctgggggaagggttcccccttcctgtctagagcagaaaagggatgagaggtgttgtattcctgtttggtaacctcagtctccctgtaaagacctccctacccacatggcgaagtatacacccaatcaggagaagggtagctgccctgcataggaagcctcgcttccgattattccccttccccaatattattcatccagacttagccacaagtgcacaaaagcaaacctgcttagagaggcaggtgaacacccacagcttctccccagtctaggtgcccttttacatcgggtttgttctccttccatggtgtgttgctgacattgtcactgagtcccatgtgaggtgctggtgagtattacctttcatctgtgccatgctctagaaccttgaccttgatagttcaccacctctgatggatccctgttttaaataaaaacgattcactttaaagcctaaaaaaaaaaaa

SEQ ID NO: 153588 - DNA, 538 bp, Homo sapiens
  misc_feature (1)...(538): n = a,t,c or g
taaaattttcctaaatcatactccgtaaacaaaactctccagcagccaggatatggaggttggtttaccccctataccccttaaaattttatattttccctaaagccttaaaattctggagggaggttggcccaatatgtcccccccccaaaataagggttctttccaaaaattcccaggtaggttttaaaacggccccctataaggaaaaaagtttttcgttgccagcccgggtaaacttgggcccccccaggggttctttaaaacggcccccccnnnnnnnnnnnnnnnnnnnnnnnaaaatttttgaagtaggtcttattaacaaaagtaatggtcaactaaatattaagaatcaacatttgttgggagtgatgtaaatacaaagtcatttggagactatgagtgaatgaagatggacacaaggatacaagaacaggtctcatctaagagctccttatactcttgtttcctttctcaaccacacactaacagggaaaacacactttgtctttgccttctgtggatggccttgtgt

SEQ ID NO: 153589 - DNA, 817 bp, Homo sapiens
  misc_feature (1)...(817): n = a,t,c or g
taatttttccctaaagccttaatattctgtagggaggttggcccaataagtcccccccccaaaataaggttccctttccaaaattcccaggtaaccgattttcccctccccgcgttgttaaacccccgcccgggcccagccttttaaacggccccccataaggaaaaaaatattaccttgccagcccccgtaaactttggcccccccaaggatcctttaaaaaggcccccccnnnnnnnnnnnnnnggttgaaatccatattacctatttattcaacaaaaaactgagtatcttctatggtccaggccatgtccttggcactgcgaacagagataagtcctggccctcaaggagctcacagtctagtgggggaaaaaagacacaagaataaataaatataatgtatttggagtttgcaaagggggcccctatgggagacaaagaacagagggaacctaaatatcctatagttaggcatccacagggaaaggaaagacctggggcaatgtacatttttgttaaagattaggataaggcagtgggttcttcaaagtgtgggctgggctaattacctacattcagattcatttgggaggcacatatttaacaagtaggattcccagttacctttcttgcacatattcttgatttagtacgtgtgtggggggggtgggtgtacggtttgaggcctgagaatctggcattttaaaagcacctttaggtgatgctactgctccttaaagtttcagaactgatgagataaagtttgttcttttaactggaataaagaatgatctacacatctgaaatgctaact

SEQ ID NO: 153590 - DNA, 1132 bp, Homo sapiens
cctctgctacccacttctttatcagttgaagatgctgccatattgcttcagcaggtgatgagggcattcagcaaacaggcctcaactgtagtctttagcgacactgttgtagtcagtgaaaaattttataaatgactgtacagaactgttccgtgagctgatgcaccagaaagctgaaaaggaaatgaaaaataatcctgtgcatttaatcactgaagaagatctgaaacaaatctccactttagaaagcgttagtacaagtaaaaaggataaaaaagatgagcgaagaaggaaagcaacagagggcagtggaagcatgagaggaggaggtgggggcaatgccagagagtacaaaattaaaaaagtcaagaagaaaggaagaaaagatgatgatagtgatgatgaatctcaatcatcccacactgaaaatgaggaaagtggttatgacaaaaaggatgaaaacatcttagaggatgtaaagtggggaaaaacttcacaattcttggagatattccaagacattgaaaaggcaagggataaaacattggaagctgattcagagttagaaagtgtattcatgtcttcaacaacttctgcttctgggacgggcagaaaacgcacaatcaaggacttgcaagaagaagtttcaaacctgtacaataacattaggttatttgaaaaagggatgaagttttttgcagatgacacacaggctgctcttaccaaacacttgctgaagtcagtgtgtactgatatcactaacctcattttcaacttcttagcttcggatttaatgatggcagtagacgatcctgcagccattacaagtgaaataagaaagaaaattttaagtaaattatcagaagaaaccaaagtagctcttacaaaactccataactctctgaatgaaaaggatcagcatgctcttttggtaaagtatcaaggtttggttgtaaagcagctagtcagtcaaagtaagaagactgggcagggagattatcccttgaataatgaattagacaaagaacaagaagatgttgccagtactactcgtaaagagcttcaagaactttcttcatccattaaagaccttgttctcaaatctaggaaatcatctgtgacggaagagtaa

SEQ ID NO: 153591 - DNA, 4404 bp, Homo sapiens
  misc_feature (1)...(4404): n = a,t,c or g
tttcgtgcctgtcggctgacgtgtctgcagttcctccgcgtctactgcgagtcaggccgtgatggcggacgcctgggaagagattaggcggttggcggccgacttccagcgggcgcagttcgccgaggccacgcagaggttgtccgagcggaactgcattgagattgttaatagattgattgctcagaaacagctagaagtagttcatacactcgatggaaaggaatatattactccagcccaaattagtaaagaaatgagagatgagctacatgtccgaggtggtcgagtaaacattgttgatctacaacaggtaattaatgtggacctgattcatattgaaaatagaattggtgacattattaaatcagaaaagcatgttcagttagtgttgggacaacttgatagatgagaattatttgggatcgcgtgggccaagaggtcaatgataaattgcaagaaagtggtcaggtcaccatatcagaactgtgtaaaacttatgatcttcctgggaactttctgacacaggcactaactcagcgacttgctataattatcattggacatattgatcttgataatagaggagtaatttttacggaagcttttgtagctcgacatagagcacgtatccgtggactattcagtgctattacccggcctacagctgtgaattctttgatttcaaaatatggatttcaggagcagcttctttactctgtgcttgacgaacttgttaatagcggacgcttacgaggcactgtggttggtgggagacaggataaagctgtgtttgtccctgacatctactccaggacacagagtacttgggtggattcctttttcaggcagaatggctatctagaatttgatgctttgtccagacttggaatcccagatgctgtaagctacataaagaaaagatataagactacacaactcttgtttttgaaagcagcttgtgttggtcaaggacttgtggatcaagtggaagcatcagtagaagaagccatcagctctggaacatgggttgatattgcacctctgctacccacttctttatcagttgaagatgctgccatattgcttcagcaggtgatgagggcattcagcaaacaggcctcaactgtagtctttagcgacactgttgtagtcagtgaaaaatttataaatgactgtacagaactgttccgtgagctgatgcaccagaaagctgaaaaggaaatgaaaaataatcctgtgcatttaatcactgaagaagatctgaaacaaatctccactttagaaagcgttagtacaagtaaaaaggataaaaaagatgagcgaagaaggaaagcaacagagggcagtggaagcatgagaggaggaggtgggggcaatgccagagagtacaaaattaaaaaagtcaagaagaaaggaagaaaagatgatgatagtgatgatgaatctcaatcatcccacactggaaagaagaagccagagatcagttttatgttccaggatgagattgaagattttttaagaaaacacatacaagatgcccctgaggagtttatttcggaacttgctgagtacttaataaaacctcttaataaaacttatctcgaggtggtacgttcagtattcatgtcttcaacaacttctgcttctgggacgggcagaaaacgcacaatcaaggacttgcaagaaggaagtttcaaacctgtacaataacattaggttatttggaaaaaggggatggaagttttttggcagatgacacacagggctggctcttacccaaacacttgctggaagttcagtgtgtactgatatcacttaacctcattttgcaacttctttaggcttcgggattttaatggatgggcagtaggacgatcctggcaggccatttacaagtggaattaaggaaagaaatttttaagtaaattatcagaagaaaccaaagtagctcttacaaaactccataactctctgaatgaaaagagcatagaagactttattttctgttctggattctgcagcagaagcttgtgatattatggtgaaaaggggagacaaaaaaagggaaagacagatactgttccaacatcgacaagcactggctgaacagctaaaggtcacagaagaccctgctcttattctgcacctcacatcagtcctgttgtttcagttttcaacccacagcatgctccatgcaccgtggaagatgtgtcccacagatcattgcttttcttaatagtaaaattcccagaggatcagcatgctcttttggtaaagtatcaaggtttggttgtaaagcagctagtcagtccaagtaagaagactgggcagggagattatcccgttgaataatgaattagacaaagaacaagaagatgttgccagtactacttcgtaaagagcttcaaggaactttcttcatccattaaaagaccttgttcctcaaatctagggaaatcatctgtgacggaagagtaatgatcttaatttacatttgtcatatagtaagcattttcccccaagggttgaaggtgagtggtcacaaaaaagtagtcactatacaactcccctctccctgcaaaaaccacctcatacacacacaattcagttaaaacagtagtattgtattaaatgtaaatcttaaaaagatgtgaatttttgtaaattgggttcttcatggaagttttttttccacctgatgttcacacaaatactatatgaaatttttcacattattttcacataattttaaaaattaccatatttccaggtttgttctctttcccaaatgttgaatgaaaaacaaattttcccaatccatttatccctggggganggattcatttgttgcgagtgcccagtatacttaaatgtatactttatatacatttaagcagaaatttaaaatgtggtctttttttttttaaaagaaacacttctgtgtcagaaatgaaaataaatcatgttttttatttttaaatagaaagcacttcaaaactaaaatacagaaatttacaaaaaagaaaaattattactaagcccttgctcttatttttggcagaataaacattgattttggttggggctgcaaggatgcctttacaggtgcacaagaacgctagagtggcccatgcattgctgtgttctcttctaaaacaagctactaacaagagagagaacacatgcaatttattaccagtaagcataagtcatatttaacattggaataactaagcattttatacaaagatttttctttgacccagtttgcatttgtacattttatttttttagttcaacagctgctctgtcacataatactttgtaaatactagtgtgaaaaacaggatagggatgcccttttcccagtggtagggagcatctgtaagtgcatttaaatcattagaagcttttttcccaaaacctagaaacccttattaaaaaatagacatttttttctaaagattattagttaaaaataactaaaagagttccttagagtaatcatttcaaccaaattaatttcaagcaacaacttacttactatttatcaaaaagggatttaattattttgaatataattataaattaaatttcaaatatttaaaaatactattttatataattccttatgacattttaaactttatattttaaaatatttgaatacgaaaagatcagtctacctctactccattctagacaaagtattaatccttagtggaaagtaattaattaaattgccaacttggcattattattaaacttgataggaacgcaacattaaatttaaaaatgttttcccgtgggtaattttctattatatatattttcatatgggcaaagggaaaaaatgataaatcctctgtaatcacaaaccccaatttcgttttgtttattcagcttctaaaatattgaacacccacgacttttaattcaaccctttaaggacccttatcatttatgtttcagtaggatatcaaagtaatccatgtttgtgtcaaatgatccatagaaaataaataggaggaggacagtgaagcaagttaaaaggtaaagccttgttttaatttgtttgcattaatttyyyytcatttgtcaaaatgcttctyttgttgccacgagtaaagaacagtttttattgttttgtaagtaaaattacgtagctgattttgtatgtaaagattaatttccataataaaaattattgtatgtttactgtgatcttaatgggcagggttaagaaagttatttaaaataaagttacctattctactaaattttatagtactttgaagcttctattaattaacacaaagattaattggtgcatatattttatatatatacattttgaattctcattttgaacattattaaaggattttatttttcttacac

SEQ ID NO: 153592 - DNA, 389 bp, Homo sapiens
  misc_feature (1)...(389): n = a,t,c or g
attccgtccgaaatatctcgctccgttgccttttctttgnnnnactactctctgtttctggcctggaggctatccagcggactccaaaaaatcaggtttactcacgtcatccaccagaaaatggaaagtcaaagttcctgaattgctatgtgtctgggttccatccatccgacattgtaggtgacttactgatgaatggagagagaattgaataagcgtagcattcagaccttgctttcagaaaggactgggccttctatctattggactacactgaattcacccccactgaaaagatgagtatgcctgccgtgtgaaccatgtgactttgtcacagcccaagatatgtaagtgggatcgagacatgttatcagcatctatggaggctt

SEQ ID NO: 153593 - DNA, 972 bp, Homo sapiens
tcgcccacgcgtccgcccacgcgtccgcagcattcgggccgagatgtctcgctccgtggccttagctgtgctcgcgctactctctctttctggcctggaggctatccagcgtactccaaagattcaggtttactcacgtcatccagcagagaatggaaagtcaaatttcctgaattgctatgtgtctgggtttcatccatccgacattgaagtttgacttactgaagaatggagagagaattgaaaaagtggagcattcagacttgtctttcagcaaggactgggctttctatctcttgtactacactgaattcaccccccactgaaaaaagatgagtatgcctgccgttgtgaaccattgtgactttgtcacagcccaagatatgttaagtgggatcgagacatgtaagcagcatgatggagggtttgaagatgccgcatttggattggatgaattccaaattctggcttgcttgctttttaatattgatatgcttatacacttacactttatgcacaaaatgtagggttataataatggtaacatggacatgagcttctttataattctactttgagtgctgtctccatgtttgatgtatctgagcaggttgctccacaggtagctctaggagggctggcaacttataggtggggagcagagaattctcttatccaacatcaacatcttggtcagatttgaactcttcaatctcttgcactcaaagcttgttaagatagttaagcgtgcataagttaacttccaacttacatactctgcttagaatttgggggaaaatttagaaaatataattgacaggattattggaaatttgttataatgaatgaaacattttgtcatataagattcatatttacttcttatacatttgataaagtaaggcatggttgtggttaatctggtttatttttgttccacaagttaaataaatcataaaacttgaaaaaaaa

SEQ ID NO: 153594 - DNA, 448 bp, Homo sapiens
  misc_feature (1)...(448): n = a,t,c or g
atcgaattcgatgacactagncagngtggtggaattcacaacagctgtcgtctctgggactgtgaaacagtctggagaggtgttggtgaatgttaaggagcactcccggcagatcaacgacatccagttatccagggacatgaccatgtttgtgaccgcgtccaaggacaacacagccaagctttttgactccacaactcttgaacatcagaagactttccggacagaacgtcctgtcaactcagctgccctctcccccaactatgaccatgtaagagaaccccacctgccttcctgctgaagcctcaggaagcttccaagttctagatgcttgtccagaagttgggctacaacattgtgggggaaatgatgtcaggcagagaggagatgcccagaggagtgacaaagctggaaggattgaatagccccagggcagccagcaggaggt

SEQ ID NO: 153595 - DNA, 486 bp, Homo sapiens
  misc_feature (1)...(486): n = a,t,c or g
ctcgtgcgntcgcgtcacagccgggatgaagccgatcctactgcagggccatgagcggtccattacgcagattaagtataaccgcgaaggagacctcctctttactgtggccaaggaccctatcgtcaatgtatggtactctgtgaatggtgagaggctgggcacctacatgggccataccggagctgtgtggtgtgtggacgctgactgggacaccaagcatgtcctcactggctcagctgacaacagctgtcgtctctgggactgtgaaacagacaacaatgagccctacatgaagatcccttgcaatgactctaaaatcaccagtgctgtttggggacccctgggggagtgcatcatcgctggccatgagagtggagagctcaaccagtatagtgccaagtctggagaggtgttggtgaatgttaaggagcactcccggcagatcaacgacatccagttatccagggacatgaccatgtttgt

SEQ ID NO: 153596 - DNA, 419 bp, Homo sapiens
atctgccatccccaagcaagcgggccaagttcaagagagtaggcaaagagaagtgccgcccagtcctggctggaggtggaagcggctctgcaggcacgcccctgcagcactccttcctgaccgaggtgactgatgtctatgagatggaggggggactcctgaacctgctcaatgatttccactctggccggctgcaggccttcgctggaagacctcagtaattctatccagaagctgcacctggccgagaacgccgagcctgaggagcagtccgctgcgtaggcgtcccacgcaggcccacactgcccctctcattctcttcaaactgtgactttttacagactcgggcgggtgttctgcggccccccaggtgctatgggggaggggggcgttgaatggaattaaaccagaaagaaagc

SEQ ID NO: 153597 - DNA, 1793 bp, Homo sapiens
ggaattcacagaagcagatgaagctcctacagaaaaagcagagccagctggtgcaagagaaggaccacctgcgcggtgagcacagcaagccgtcctggcccgcagcaagcttgagagcctatgccgtgagctgcacgggcacaaccgctccctcaaggaagaaggtgtgcagcgggcccgggaggaggaggagaagcgcaaggaggtgacctcgcacttccaggtgacactgaatgacattcagctgcagatggaacagcacaatgagcgcaactccaagctgcgccaagagaacatggagctggctgagaggctcaagaagctgattgagcagtatgagctgcgcgaggagcatatcgacaaagtcttcaaacacaaggacctacaacagcagctggtggatgccaagctccagcaggcccaggagatgctaaaggaggcagaagagcggcaccagcgggagaaggattttctcctgaaagaggcagtagagtcccagaggatgtgtgagctgatgaagcagcaagagacccacctgaagcaacagcttgccctatacacagagaagtttgaggagttccagaacacactttccaaaagcagcgaggtattcaccacattcaagcaggagatggaaaagatgactaagaagatcaagaagctggagaaagaaaccaccatgtaccggtcccggtgggagagcagcaacaaggccctgcttgagatggctgaggagaaaacagtccgggataaagaactggagggcctgcaggtaaaaatccaacggctggagaagctgtgccgggcactgcagacagagcgcaatgacctgaacaagagggtacaggacctgagtgctggtggccagggctccctcactgacagtggccctgagaggaggccagaggggcctggggctcaagcacccagctcccccagggtcacagaagcgccttgctacccaggagcaccgagcacagaagcatcaggccagactgggcctcaagagcccacctccgccagggcctagagagcctggtgttgggtcatgctgggaagggagcggcagcccagccaggcctggcccataaaaggctcccatgctgagcagcccattgctgaagccaggatgttctgacctggctggcatctggcacttgcaattttggattttgtgggtcagttttacgtacatagggcattttgcaaggccttgcaaatgcatttatacctgtaagtgtacagtgggcttgcattggggatgggggtgtgtacagatgaagtcagtggcttgtctgtgagctgaagagtcttgagaggggctgtcatctgtagctgccatcacagtgagttggcagaagtgacttgagcatttctctgtctgatttgaggctcagacccctccctgcccttcagagctcaagacaagtaatacacccaggtcttgactgcatttgtcttgtgagcagggcttgcttggtcagctcaggccctcctagctgctctggaggctcctttgattctctagacctggaaaaggtgtccctaggcagagccctggcagggcgctcagagctggggatttcctgcctggaacaagggacctggagaatgtttttgcgtgggatgatgtgctggtcaggagccccttgggcatcgcttcccctgccctttggtagtgccaggaccaggccaatgatgcttctcagtagccttatcattcacaggtgcctctctagcctgcacaaatgattgacaagagatcacccaaaggattatttctgaaggtgttg

SEQ ID NO: 153598 - DNA, 2514 bp, Homo sapiens; identical to SEQ ID NO: 114891

SEQ ID NO: 153599 - DNA, 517 bp, Homo sapiens
aaggcaaaatcccatcagacctggaaagcaggagacagggtagcaaatccagagcaggggctgtggaaccacttcccatgtgaagagtctgagggagaggccacctgggaggagatggtgctgaagaagtcaggagagagctcagcaaatcaaggaagcctctgcagagatcacagctcctggcttcagatgaagcagaacaggaaacccagccaagagaagaccagagacacgacaaggatggagaatccagacagaggcttcgttccagggaaggaatgctcctttgagcagctggagcacgttcgggagatgcaggagaagctagcccggctgcacttcagcctggatgtgtgtggggaggaggaggacgatgaagaggaagaggatggggtcactgaggggctgccagaggagcagaagaagacaatggctgaccgtaacctggaccagctgcttagcaatgtgggttcatgtctgggtgctttggttcctgggggcatgaggggtggagaag

SEQ ID NO: 153600 - DNA, 549 bp, Homo sapiens
ttttttttgctttctttctcggtttaattccattcaacgcccccctcccccatagcacctggggggccgcagaacacccgcccgagtctgtaaaaagtcacagtttgaagagaatgagaggggcagtgtgggcctgcgtgggacgcctacgcagcggactgctcctcaggctcggcgttctcggccaggtgcagcttctggatagaattactgaggtcttccagattgctaagcagctggtccaggttacggtcagccattgtcttcttctgctcctctggcaagcccctcagtgaccccaatcctcttcctcttcatcgtcctcctcctccccacacacatccaggctgaagtgcagccggggctaagcttctcctggcatctcccgaacgtgctccagctgctcaaaggagcattccttcccgaaggcctgcagccgggccagagtggaaatcattgagcaggttcaggagtcccccctccatctcataagacatcagtaacctcggtcaggaaagaatgctgcaggggcgtgcctgcagagccgct

SEQ ID NO: 153601 - DNA, 6393 bp, Homo sapiens
atgcgcatgcgcgggcgtgcctcgcggcttgagggcgcgcggggcgtgggtggctgcgcgcgcggggggcgcacgtggggcctgaggggcgggggcggtgccgggagtcccgccacgtcagtctccggccctgagccaatcccgcgcccggcctgccgcgagggggccggttgtgccgggaagtggctccagggagaagaggcctcttccctcacccgctgtgggagctgcgccccgaaagcctgccccggcacgtcgggctctcctgacccgccaagaccagagagccgttggcgccctccgcccgggcctgccggtccgtttattttaagaagctttgtgcgcctgctgtggggatttctgatccaggctgcgaagaatttcgaagtctggaaaatagcaactgtgtttgtttctaaaggatcttctcctgacccagcatcgctcatcacaatgaagaaccaagacaaaaagaacggggctgccaaacaatccaatccaaaaagcagcccaggacaaccggaagcaggacccgagggagcccaggagcggcccagccaggcggcttcctggcagtagaagctagagaggtcctcggcagctagccaggctccttcggaagcgcggagtgggggctcaagccagaaacggctcaagtctggggcctcttcgtgatgtctctgaggagctgagccgccaactggaagacatactgagcacatactgtgtggacaataaccaggggggccccggcgaaggatggggcacagggtgagccggcttgaacccgaaagatgcagagaagtcccggacctattgttggcaaggaattggggagccttgaaccaacttccagtagttcaattggagagaaggaaccctccaagggggattccaaacacagaagagattccggcagagttgacgaagttcggagcaagggaaccattcgaaggccacaggagaagaaaaaagccaagggtttgggtgagcagagggcggctctttgtgaagctgggaaggagatcacgttgctgatgcagacattgaatactctgagtaccccagaggagaagctggctgctctgtgcaagaagtatgctgaactgctggaggagcaccggaattcacagaagcagatgaagctcctacagaaaaagcagagccagctggtgcaagagaaggaccacctgcgcggtgagcacagcaaggccgtcctggcccgcagcaagcttgagagcctatgccgtgagctgcagcggcacaaccgctccctcaagctgggggacccttgtgaggtagcagtggatgatggctctcgggctgacttctttgcccaggaagaaggtgtgcagcgggcccgggaggaggaggagaagcgcaaggaggtgacctcgcacttccaggtgacactgaatgacattcagctgcagatggaacagcacaatgagcgcaactccaagctgcgccaagagaacatggagctggctgagaggctcaagaagctgattgagcagtatgagctgcgcgaggagcatatcgacaaagtcttcaaacacaaggacctacaacagcagctggtggatgccaagctccagcaggcccaggagatgctaaaggaggcagaagagcggcaccagcgggagaaggattttctcctgaaagaggcagtagagtcccagaggatgtgtgagctgatgaagcagcaagagacccacctgaagcaacagcttgccctatacacagagaagtttgaggagttccagaacacactttccaaaagcagcgaggtattcaccacattcaagcaggagatggaaaagatgactaagaagatcaagaagctggagaaagaaaccaccatgtaccggtcccggtgggagagcagcaacaaggccctgcttgagatggctgaggagaaaacagtccgggataaagaactggagggcctgcaggtaaaaatccaacggctggagaagctgtgccgggcactgcagacagagcgcaatgacctgaacaagaggtctgggcccctggttattgaaaaagttcggaattactctttacccttgtggagtgttctgagtgttggaagtacccaggaagaagccctgagcaggtgccctcaggagcagtgcccatggctccccacatcagccaagaggcccaaccccaggaagccactcctgcccggggatggggaaggcctgaggcccagccagcgcccaatggatgacaaaaagaagaaacggagtcccaagccctgcctggcccagccagcccaggccccaggcacactacggagggtccctgtgcctaccagccacagcggctccttggccctaggacttcctcatctgccatcccccaagcagcgggccaagttcaagagagtaggcaaagagaagtgccgcccagtcctggctggaggtggaagcggctctgcaggcacgcccctgcagcactccttcctgaccgaggtgactgatgtctatgagatggaggggggactcctgaacctgctcaatgatttccactctggccggctgcaggcctttcgggaaggaatgctcctttgagcagctggagcacgttcgggagatgcaggagaagctagcccgggtgcaacttcagcctggatgtgtgtcgggaggaggaggacgatgaagaggaagaggatggggtcactgaggggctgccagaggagcagaagaagacaatggctgaccgtaacctggaccagctgcttagcaatgcgcgcgggcgggcctggcagttggcgcccatggagccagagctgctggttcggaaggtgtctgcattgcaggcctgcgtccggggcttcttggtccgacgccagttccagagcctgcgagctgagtatgaggcgattgtacgagaggtcgagggcgacctgggcacgcttcagtggaccgagggccgcattcccaggccgcgattcctcccagagaaggcaaaatcccatcagacctggaaagcaggagacagggtagcaaatccagagcaggggctgtggaaccacttcccatgtgaagagtctgagggagaggccacctgggaggagatggtgctgaagaagtcaggagagagctcagcaaatcaaggaagcctctgcagagatcacagctcctggcttcagatgaagcagaacaggaaacccagccaagagaagaccagagacacgacaaggatggagaatccagaagccacagatcaaagactgccccacagccaacctcagcttcaagagcttcagtaccaccgcagccacttggccatggaattgctgtggctgcaacaggccatcaatagccgtaaggagtacctacttcttaaacaaacactgagatccccagaggcgggcccgatcagagaggaaccccgcgtgttcctagaacatggggaacaggcctgtgagagggaccagtcacaaccaagcgcaccactggaggaccagtcctacaagagacaggaccactggagagctagaacaggagggatgactcctgtcacaggggtcaaatcaccccacagattcccaggaagttttggccactacacaaaaaaacatttgctgggggctaagttcagagaaccatgctacagcaagtctggaccaccgtcgtctataccatcaaacagccaggccttgggggacaggctcaccaaagggccagacgatggaagacagacctttggagggacctgcctgctgcagatgaaaatcctggaggaccagacccccagaggtttaaaacctaggaaccattgtcccaggaagtccaggacacagctgtctgcactctatgaggactcaaatattaaggagatgtctcccagaaaactagaccacaaagagcctgactgccgaacagtcaggacacaagagttgggcctctcagaggaccacatcatctgggatggtggcagtccagcagccaagagggtagtggtgtaccggaatggggacccattcttcccaggctcccagctggtggtgactcaacgccgcttccccaccatggaggccttcctctgcgaggtgacatcagctgtgcaggccccactggctgtgcgtgccctctacacaccttgtcatggccaccctgtcaccaacctggcagacttgaagaacagagggcagtatgtggccgctggatttgaacgattccacaagctccatgtgttcaggaatggggacctggtaagtcccccatttagtctgaagctgtcccaggctgccagccaggactgggaaactgtgttgaagctcctgactgagaaggtcaagttgcagagtggggctgtgtgcaaactctgcaccctagaggggctcccactgtcagcagggaaggagctggtaactggccattactatgtggctgtcggagaggatgagttcaaggaccttccctatctggagctgctggtgcccagcccctccctgcccaggggctgctggtatgcccaaggccacagggcccaggtaacccagccctctccaaaggaaccagaccgaattaagccatctgctttctatgccagaccccagcagaccattcagccaagaagcaagctccccacactctcattcccatcaggagttataggagtatatggagctccccaccgaaggaaggagacagcgggggccctggaagtagcagatgatgaagacactcagacagaggagcccttggatcagactgtccaggggaagggaactctgatggccacaaggaagcaaaacagctgcagaggaaagggcaggatgggaaaaggccgtgtcctcacccactctggggagatgggttctgggaaggaactaacacaggtggcctcaaacactaagcagaacagttccaagccaggacccacctgtcgatgccaaggtgaggtaatagagaagggatccacactggttgaggagaaagggcatcagaagccgatcctactgcagggccatgagcggtccattacgcagattaagtataaccgcgaaggagacctcctctttactgtggccaaggaccctaggacaagggctcgggtgaacttcgtcatatttcttaacaactcttcaggggacaccaagcatgtcctcactggctcagctgacaacagctgtccgtctctgggactgtgaaacaggaaaagcagctggcccttctcaaagaccaattcggctgtccggacctgcggttttggactttggggggcaacattcatcatgttctccaacggacaaagcagatggggctaccagtgctttgtggagcttttttggacctggcgggattccgaggccagatttgacaacaatgaagccctacatggaagattcccttgcaatgactctaaaaatcaccagtgctggtttggggacccctgggggaggtgcatcatcgctgggccatggagagtgggagagctcaaccagtatagtgccaagtcctggagaggtgttggtgaatgttaaggagcactccccggcagatccaacgacattccagtttattccagggacatggaccatgtttgtgaccgcgtccaaggacaacacagccaagctttttgactccacaactcttgaacatcagaagactttccggaccagaacgtcctggtcaactcagcttgccctctcccccaactaatgacaaaggtggttttgggcgggtggtcaggaagccatggattgtaacccacaaccctccacccaggattgggcaagtttgaggccaggtttctttccatttggccttttggaagaagagtttggaaagagtccaagggtcactttggaccctatcaacagtgttgccttcccatcctgatggcaagagcttacagcagcggcggcgaagatgggttacgtccccgatccattactttcgaccccaccagtacttcgaatttgaagtttgagggcttaaagaagctggatcctcctgccgggcgtggttggctcatgcctgtaatcccaccactttttttttttaaggcaggcgggatcacctgaggtagggagtttaagacccagcctgaccaacatggagaaacctcgtctctacttaaaaatacaaaaatacaaaaattagccaggcatggtggcacacgccctatagtcccagctactcaggaggctgaggcaggagaatcacttgaacccaggaggcagaaggttgcagtgagctgagatcacgtcattgcactccatcctgagccacaagagcaaaactccgtctcaaaaaaaaaaaaagaagaaggtggatctccaaccaggccagagaagattctcacagaaggttttgaactctaagaaataaattggtttggtaataaatggcttctggtcagataaaaaaaaaa

SEQ ID NO: 153602 - DNA, 2085 bp, Homo sapiens
gcgaaaactcgcctctgcccaaggctgtgcggggcgtccgcccccgcacttcgctgattggccgcactagcccgctcgtcacgctcttttgtctcagctggcagaggataaaagccgccgcggctgccttaggaacggcgctgcctcgtctctgctacccctggttgggcggccctgcgaagcagctccttcgggcagccccgggtcgcttagcggccaaggaggcttcagttctttgccgcctgcaaggcggagaccagaaggcggaatccacagctggcgacgcgggagcatctgctgtccaccagcggagcacagataccctatcgtcgtcagtcatggctagcatcattgcacgtgtcggtaacagccggcggctgaatgcacccttgccgccttgggcccattccatgctgaggtccctggggagaagtctcggtcctataatggccagcatggcagacagaaacatgaagttgttctcggggagggtggtgccagcccaaggggaagaaacctttgaaaactggctgacccaagtcaatggcgtcctgccagattggaatatgtctgaggaggaaaagctcaagcgcttgatgaaaacccttaggggccctgcccgcgaggtcatgcgtgtgctttcaggcgaccaaccctaacctaagtgtggcagatttttttgcgagccatgaaattgggtgtttttgggggagtctgaaagcagttttgactttccccatgggtaaatttttttaacacccttacaaagctcaagggggagaaagcttccctttatgtgatccggtttagaggtgcagctccagaacgctattcaggcaggcattatagctgagaaagatgcaaaccgggactcgcttgcagcagctccttttaggcggtgagctgagtagggacctccgactcagacttaaggattttctcaggatgtatgcaaatgagcaggagcggcttcccaactttctggagttaatcagaatggtaagggaggaagaggattgggatgatgcttttattaaacggaagcgtccaaaaaggtctgagtcaatggtggagagggcagtcagccctgtggcatttcagggctccccaccgatagtgatcggcagtgcttgactgcaatgttgatagagataggtgataccctcgacgactccgatgaaggatgtgatcctggtggagtctcaggaccctccacttccatcctggggtgcccctcccctcagagacagggccagacctcaggatgaagtgctggtcattgattccccccacaattccagggctcagtttccttccaccagtggtggttctggctataagaataacggtcctggggagatgcgtagagccaggaagcgaaaacacacaatccgctgttcgtattgtggtgaggaaggccactcaaaagaaacctgtgacaacgagagtgacaaggcccaggtttttgagaatttgatcatcactctccaggagctgacccatactgagatggagaggtcaagagtggcccctggcgaatacaatgacttctctgagccactgtaagggaccacccccaggtttcagtgaacccttacctatattcagcatccagtagtgggaaaactggggtgggggtgggggtgggacttctaactgcatgaattaatccacaaagcggctatcttttggggtggagtagaaagggtcttggataccagcacattggagggagatagccctgaccctctggcccctgctcccttctcccctgcagcccacgggtctgttttcctgtgtgtgccccatttcccttgacagctttattcctttgtgaaagtggtataatttattgttaaatatttgaacaataaaaaaggtacaaaaagtgaagtacaaattacccaaatctctccacccttatataatcattgtcaaccctttgatgagtgatatttccctatacctatgtacccagatagatatatgcatagataaaagtgatgaaatataagtgctgttctatctgtattttttcaccaaacaatatatgttgtgagcttctatgtcaataaatatatatat

SEQ ID NO: 153603 - DNA, 437 bp, Homo sapiens
caccattacgcctagcttggcacgaggccagcacatcgcagcagccagtaaggaaagggctcgcccctgcccccgggggcccctctgataagcaggggtgcaggcaaggagggaggccccggcgacagggccgcccacgcggactttctgcccgcagaggagggggcacacgggatggcggctcccacgggtctcctctcatagctccgcttcccacctacccgcaccctccctcgggtctgttccccttgggtgcactccccttagcgcggcctaggcaccaaggagctgctctcggcagtgttcacgagatacaatgaattgaccagatctgtcataactgatggccgttccttcagaagctcattccagtcgccccacttcccaattactgcctttgggttccctcaccactccactggagagcccaggccact

SEQ ID NO: 153604 - DNA, 460 bp, Homo sapiens
aaattgggcagggacagggcattctctccagcaggtgactgggcatgaccactacaatgctgatctgaaaccgatcgatgggttcaatggaaggtttggctaccgcaggaacactccagccctccgtcagagcacgtccgtcttcggagagagacctgatcgtatggtttctgtgctcaacagaaaactctctgcagaggaattagagcgaaaacggcaagagatgatggaaaacgccaaatggagggaggaggagagactgaacatcctcaagaggcatgctaaggatgaggaacgggagcagaggctagagaagctggactcccgggatgggaagttcatccaccgcatgaagctggagagtgcatctacttcctccctggaggatcgggtgaagcggaatatctactctttacagagaacttcggtagctctggagaagaactttatgaaaagatga

SEQ ID NO: 153605 - DNA, 521 bp, Homo sapiens
taagcttgcacgagggaagcatagttcagcataagatatttaaattggacctatatatattttctttttcaatgagagtgcgtattttgatctcttatatcacagaagaagatggcaaattcctcccctgttttgtccaaagtccctggatatggcttacaggtccggaactctgaccgtaaccagggtcttcagggtcctctgacagcagagcaaaagagagggcatgggatgaagaaccattccagatccagaagctcctcccactcacccccaagacatgccagcaagaagagcaccagggaagcagggtcccgggacaggaggtctcgatccctgggcagaaggtcacggtccccaagacccagcaaactgcacaactctaaggtgaacaggagagagacaggccaaactaggagcccatcacctaaaaaagaggtctaccaaaggcgacatgctcccggatacaccagaaaactctctgcagaggaattagagcgaaaacggcaagagatgatgga

SEQ ID NO: 153606 - DNA, 2301 bp, Homo sapiens
aaaggccctccgaggctacggtggttgggatggcgtacctgagcgagtgtcgcctgcgactggagaaaggctttatcttggacggggtggctgtgagcaccgctgcccgcgcttatgggcgctctaggcccaagctgtggtcggcgattccgccctacaacgcgcaggaggactaccacgcccgcagctacttccagagtcacgtggttccgccccttttgcggaaaactgatcagagtctcaggacacttgtggattgcgtgttcagcatggggaatgcaagtgactacgcctggttggcatcccataccacacccaggggaatggggaagccaagagggcattctctccagcaggtgactgggcatgaccactacaatgctgatctgaaaccgatcgatgggttcaatggaagagagtctgggacatcaggcaacgtggcgacccgaagcagccaaaatgagacctcgacagcaaaggcctcgacagcggagcccggacctttgcaaaatctgcaagtaacgccaacgtcacaaagcgcgaccgagccctgtacgtcatcgttccgcgacgccgacgcgatgtgtgagagattattggaagaaaaccttgccattgttgaagacatcttgccctcacacgcctgccttgggtatggaaggaatctgaagaagagctggcacccgcagaccctcaggaatgtggagaaagtgtggaaggccgagcagaagcatgaggctgagcggaagaagattgaggagcttcagcgggagctgcggagaagagagagcccgggaagagatgcagcgctatgcggaggatgttggggccgtcaaaaccaggaaaaaagaagaaaagttggacttggatgtaccagggtcctggtgggatggttgaaccgtgaacgagtacctgctggggcgccccattgacaaatatgtttttgagaagatggaggagaaggaggcaggctgctcttctgaaacaggacttctcccaggctctatctttgccccatcaggtgccaattcccttcttgacatggccagcaagatccgggaggacccactcttcatcatcaggaagaaggaggaggagaaaaaacgagaggtattaaataatccagtgaaaatgaagaaaatcaaagaattgttgcaaatgagtctggaaaaaaaggagaagaagaaaaagaaggagaagaaaaagaagcacaagaaacataagcacagaagctcgagtagtgatcgttccagcagcgaggatgagcacagtgcagggaggcacaactctaaggtgaacaggagagagacaggccaaactaggagcccatcacctaaaaaagaggtctaccaaaggcgacatgctcccggatacaccagaaaactctctgcagaggaattagagcgaaaacgggcaagagatgatggaaaacgccaaatggagggaggaggagagactgaacatcctcaagaggcatgctaaggatgaggaacgggagcagaggctagagaagctggactcccgggatgggaagttcatccaccgcatgaagctgggagagtgcatcttactttcctccctgggaggatccgggttgaagcggatttcttactctttttacagagaacttcggtagctctggagaagaactttatgaaaagatgaaaactgtcccctctcttattggttttcctgcattttccagggaaagctgctgaccccttaattctctttataagagatcaaatgacttctttcacagatgtcaaaaccaccagtgttcaaagtgaccctgcttcaattgagtcctgaaacagctcacttcctttgagagctagtgtgacttgctttgtgggacactcagtaactttgggttttgactctttaacgggttgggcactggaccatctcggtgggagtgcttgtgccactctggaaggctgttccctggggttgtgatgtttatcatgccacttccttcttacctgtgccaacagacctatttcactgcctcagcgtacaccagacccttcagaaacctctctggtgtcacccagatagattgtgcttactgagacaaatgaacgtttacttgatttagaagataatgtgacagaatgatgtcaggttaggtcaaagccaagggagtgacagaatctggaaaatcaaacaatacaaaaagccctaaatgaactgttaactatttgatctttggatgtaaaattgtaatgcgtatatgtacaaatgtacaatttttacatgcttttaaaaaaggttagctttgtgaaaaaaaaaaaaaaa

SEQ ID NO: 153607 - DNA, 465 bp, Homo sapiens
aatgtcataaaatgttgacttactgattccaaattcatccattacacttttaagtgatcgtccagcttcaattctacttagaaccttcattttctcctccaaattcagtgttgtatatttccctctcttattcatactgaatttaactctgaaccaccagcaggagaaaacaaagggaaaagccttaatgaattggcaaaaaaaaaaacccacattttttaaacaaaacttagctgaaagccccaaaaggcatgggcattgtattggaggataatggactgaaggggctaaccatgactgaagagctagtctagagggggaggtcttatgcactcaaaaagctgccagttgcaaagtcctgtctggctcttgctcctgcaagccatgagtgatcatttttcagaatgccccctacctctcctctcttttgacagatacaacagcctcagtcaggaatgacaggaa

SEQ ID NO: 153608 - DNA, 2875 bp, Homo sapiens
gtgaaactttctgctgactttgtatttctccaaaggtcatttagacttctaaggggggctgaggagagccgtgagcctcacttttcctgaagtgagccagcagaaacggcaccgaaattctgcccaggatgccaccggtattcaaagaagtggccagctccttgctgcccaccccggttccagaagcaaagagacacttcctatgtttttgcatcagtagaagctgctagccctgaggctcaaccgaccgcatgacatcggccggacacggaaatgccggcggaggcgggaaagagtctgcgggcgcagctgcaggcactgctgcccgccagcactcggattcgccacagcctgtgtctgcgacaggcgtgcccgtgggcactgggcaagccggcagtgtcccagcgagcttcagccgcgcctctgggatacagctgcgaaaagcggggagagaatggtttctcgtgcccgacggtggccccgcctcaggctccagccgcgcggcccggaagcgccgcggccaccgcctacggaaaatggctgcctccctgcggccgccgccgctccagcggctccagggtcgaagccataggggaagccgcttctcggttacctcggccagcttggcttccgtggaggccgctcctcgctttctgaggctcaaacgcaagccaccgcccgaaaggccgccgatctgaggagcgcaaccgccagcccaccgctggcctaccgcagccctgtccaggtacagagccagagcgccggccggaagtggaagtgacgctttccgagggtggcgcaggcccgccctctggctaaggcgcctgagcccggcctacttcctcgccagagaaactgctgtcttccccggcggtagggaagggttaatgccaccgagtatccagacccgctgaagcctagagggccttgtaccggctcaccgcgtggctgtcgctgtctcgtgttccccatgggggaagcgtcgcactgccacgtctgttctgcgtggctgtcgggcggcgtttggtcccgggagcctcgccggagttaaattcagtatgaataagagagggaaatatactacactgaatttggaggagaaaatgaaggttctaagtagaattgaagctggacgatcacttaaaagtgtaatggatgaatttggaatcagtaagtccacattttatgacattaaaaaaaataagaaggtaattctggactttgtactggagccggacatgcccttaataggggctgagaagagaaagaggacaacgggagccaaatatggtgatgtagatgatgcggtctacatgtggtaccaacagaaacgctcagccggtgttccggtaagaggcgtggagcttcaggctgctgcatagagatttgcacggtgtgataggcgaacagacttgatagctagcactggttggctatttagattaccaaatcggcatgcaattgggaaccgaataggatgtggtgaacaggtcctaagttcagtttctgaaaatgttgagccatttcgacaaaaactgtccatgataatcaaagaggagaaactgtgtctagctcagctatacagtggggatgaaacagacctcttttggaagtcaatgccagaaaattctcaggcaagtaggaaagatatctgcctaccagggaagaaaataaacaaagaaaggttgtctgcctttttatgtgcaaatgcagacggaactcataaattaaagtcaatcattattggaaaatcaaaactgcccaaaagagtgaaagaggacacaagtacattgcctgtgatatataaacccagtaaagatgtttggttcaccagagaattgttttcagaatggttttttcaaaactttgttcctgaggtccgacattttcaacttaatggtctaagaattcatgacgaggacgtcagggcattgttacttctggacagttgcccggctcatccttcctctgaatccctaaccagtgaggatggtcgaataaaatgtatgttcttcccccataacacttcaaccttgattcaaccagatgaatcaaggtgtgatcttgagctgcaaacggctgtatagatggaagcaacttgaagagagtcttgtaatatttgaagaaagcgatgatgagcaagagaaaggagataaaggagtttccaaaattaaaatctacaatataaaaagtgcaatttttaactgggcaaaaagttgggaagaagtaaaacaaataaccatagcacatgcctgggaaaatcttctttacaaaaaggaacctgaatatgattttcaaggcttagaacatggcgaatatagagaaatttcttgaaaaactggggggagttggaacctaagttggatgaagattgggtgttggttaaatggagatgaagaaaagggttgtctcctaaaaaccaaaggtggaataacaaaaggaagttgttcaaaaaggaggagaagctgagaagcagactgctgaatttaaattatctgctgtaagagagagtttggactaccttcttgactttgttgatgccacacctgagtttcagagattccacttcacactgaaagagatgcaacaagaaatagtcaagaaacagttccagagtaaaatccattctagaattggtagctttttgaaacctaggcctcataatattaaggactccttcagtgggccttcaacttctggttctaatcattagattttgtgtttaaagatttctgccattatatgatgtaggccagctgtgaattgtcttgttttagcaactgacattattttgtatatcagtgcccatttatataatggttataaaatttacagtttgaaaataatacatttgtgtttctttaaatttaaaaaa

SEQ ID NO: 153609 - DNA, 1644 bp, Homo sapiens
ttttttttttttttttttgcagtcactcaaatctaacttgctttaaatattcaaatgagtgaattaaaaaggaaggctttctgtgttttggattttattttctcctgttttgcactattactccatatcaggctgcctgtgggaatagttttttgtcttttgttttttgtttgtttgcagttggggtgcatttttgttttgtttttgttgttgttgcttgttggctgttttgactgtgtggtttttaggggcaactttttcaggcaagagtctatgaccagtgctacttagcatctcctgagaatggacactgaattgtaactgtaccactcttattaggacaattaatttttcaaattaatttaataaactctcccctttcaatgggcttgacaaacttgagttaaaactagtagtatgggctgggcgcggtggctcatgcctgcaatcccagtactttgggaggccaagctgggcagatcacaaggttagcagttcaagaccagcctgaccaacattgtgaaaccccatctctaataaaaatgcaaaaaaatcacctgggcatggtggtgtgtgcctgcaatcccagctactcagggggctgaggcaggggaactgcttgaaccagggaggtggaagctgcagtgagccgagatcacaccagtgcaccccagcctgggcaatagagtgagaatccgtctcaaaaaaaaaaaaaaaaaaaaagctagtagtatgagccaacattcttggaacacttactgtgtgccagctactgtttcatgagcttgacctatgtcaacccctccttacttaaactccattatgtagctacaattacccctatcctacagataagagaacatgcacagaggtaagccaattgtccaaagccacacaataagcaagtcaccaagccagatattggaccctgggaatgcgactttttgagcttgtacttctattataaaccaaacaaattttaaaatgcatatgatttttatagattctgtttaaataaatgttggtgtaatatctttgaaaatgtttcaaaaagtttcaatgtatttaaagcaaagtattttaaaattatgtcttcaattaaaaaaaattctaaatgtaagctgctgtctaacacaagcatgcttaaatttactgaacatgacctatgttgatttggggaggtatccagatgttcagtattttaaagctgccatgattttaaaaataatttaaataagaagaggggtatcatccagcaacatggtggaataggagtttccccttcacaaaaatatcccatttgaacaacccatcccgcacccagaaaataccttacccatgcctcctaaggaatgcaggtgaaagattacagcacttgagcgaagcacgagaataagaaaagcatgcacagcagatggtaaggaggacagttttatattacctgcatcagccttccccgaaaaccatgcagcgcatcatggagaatgatccctttagcatgtggggagaagaatggatcgagcaatgagttcatagtgaaccccagtatcaggccttctccagttaaccttggtgccaggataggccctgcagacccaagcagtaggcctgccttagtttcaagctggcatgggcagtcccacc

SEQ ID NO: 153610 - DNA, 3591 bp, Homo sapiens
atgggcgctgtcagggacgaactccactcgcttgttgttccacccctcatggggaggggagcacagactccgatggcagcggcggcgctgcgggaccccgcgcagggctgcgtgacctttgaggacgtgaccatttacttctcccaggaggagtgggtgctcctcgatgaggctcagagactcctgtactgcgatgtgatgctggaaaactttgcacttatagcctcgctgggacttatatctttcaggtcccacatcgtttcccagttggagatggggaaagagccctgggtgcctgacagtgtggatatgacatcagccatggccagaggggcttatggcaggcctggctctgatttttgccatggaacagagggcaaggacttaccttctgagcataacgtttctgtagaaggagtggcacaggacaggagtcccgaggcaactctgtgcccccagaagacctgcccctgtgacatatgtggcctacgtttgaaagacattttgcatttggctgaacaccagacaacacatcccaggcagaaaccatttgtgtgtgaggcatatgtgaaaggctctgagttcagtgcaaaccttccccggaaacaggtgcagcagaacgtacacaaccctatcagaacggaggagggccaggcttcccctgtaaagacctgcagagaccacacatcagatcagctttccacctgcagggagggtgggaaggactttgtggccacagcagggtttctgcagtgtgaggtcactcccagcgatggggagccgcacgaggccaccgaaggtgtggtggattttcacattgcactaaggcataacaagtgctgtgaatctggggatgccttcaataacaaatccactcttgttcagcaccagagaatccacagcagagaaaggccttatgaatgcagcaaatgtggaatcttcttcacttacgccgctgacctcactcaacaccagaaagttcacaatagaggaaaacccgtatgagtgctttgaaggtggaaaattcttcaagccagcactccagccttgttaaacatcgcagggttcacacgggtgaaagccctcacgtgtgtggtgactgtgggaaattcttcagccgaagctccaacctcattcagcataagagggttcacactggtgaaaagccatatgagtgcagcgactgtgggaagttcttcagccagcgttccaacctcattcatcataagagggttcatacgggcagaagtgcccatgagtgcagtgaatgtgggaaatctttcaactgcaactccagcctaattaaacattggagagttcacactggagaaagaccttacaagtgtaacgaatgtgggaaattcttcagccacattgccagcctcattcaacatcagatagttcacactggcgagcggcctcacgggtgtggtgagtgtgggaaagccttcagccgaagctctgacctcatgaaacatcagcgagttcacactggtgagcggccttatgaatgcaatgaatgtgggaagttatttagccagagctccagcctcaatagccatcggagacttcacactggtgaacggccttaccagtgcagtgaatgtgggaaattctttaaccaaagctccagcctcaataaccaccggagacttcacaccggcgagcggccttatgagtgcagcgaatgtgggaaaaccttcaggcagaggtccaatctgaggcagcacctgaaagttcacaaaccagacaggccttacgaatgcagcgaatgtgggaaagccttcaaccaaaggcctaccctcattcggcatcagaagattcacatcagagaaaggagcatggagaatgtgctccttccctgttcacagcacacaccagagataagctctgagaacagaccttatcagggcgctgtcatctacaatgttgaatcttgttcatccaagtacccacactggggaggttccctaggaatgctagctgtgttggaagctatctggagacaagttacattctcttactgtagagtttatcagcgttttttcactgctggggttgtgatagaagccatgtcagcaccacacactgcagctctccaaagagtgtgtccaccactcctctgtgctcagggaaggcagacctctcctctctctttccaatccctaaagggaattaggagtagtctgaagccttgggaagatgtcattcccgcccctgtatggctggtttaacccatgaacatgaccagcttttggctgtgaagacctgagcagggttttgccaacagcttgttctagagaaggtttccctttttctgggacattgttggtctcatgttatgcctgtgaaggatttgtccagccttcatgttactctacacaacaacttatctcctgtgtattgccctggttcatgtgagagataatggccttatgataaagccgcctttagtcttacatgttctgatcactgggtggggaggttcaagagcaaagttaaaatctaccaaactgagaggggtctccacattatcttggaggggacacgaggatggcaaataaacttctggcaatccacatttgacctcatttgcattgtcaccaacgcctcctacgagaaattgtaggaatttatgggtataatattgtggtctgaatggcgtgaatttttatcccgaggagggggcagttgtgacaacctccagtgcatgtgggaacagcatgaattgggtcccttattcccagggggtgccccatattccccaatactgtaaagcagatgctgtttagcacctgccaaggagccatatgccctgaagttcagcattaggcaggtatctcttaactgtaagacataccaggcccagctggggaccataatttgtacagaaacactggatgtgattaatagggagtaggcgagattatagcaaaccagcagaaatggaactctgctaaatgtgcatccgtgaatgctcccttgaatgtggctgtgcaggattcagggtttgcagaaattctcaggacctcagacctctgtcctatgactaatgttactggcagagcaaataatctaaaggttttggttttgtggattaccatctccgtgctgtgcatctgaaggccagtgctgtgctggcaggaaaatagggactgagaaaaagcagatcctatactatagggactgtagtatctatgacgtagccagccattctttgctcccaaggcaagaagaaagagatgacagagtcaatatagggttgccaaatcggattttctaaaatgagtaggaagttggatttttatgtgcaacagtttcttttaatgctttgttgatatgtgattgtcatgcaataattattcatatttggtaagttttgtacatatattatgtacactcagggaaccaataccataatcatgataatgaacgtatccatcacctgcaaagctacctcatgcccctttacattccctccttgccttccctaggaaaccgttgatttacattttttactttagatttgtttgccttttctagaattaacacaattggaatcataaagtatttatactctcaaaaaaaaaa

SEQ ID NO: 153611 - DNA, 1673 bp, Homo sapiens
ggaacacagagaaaggttcacccgggagagatggcctagccacttccttagtgactgtttggtatatgtaggtccccctgccattactctttcagccttctgcaatctagttctacttagtcacacacttctctaagaccactcatacgtaaacactacgtagaggcccctttttgcctcattttacattggttagttatcattttgaaacttttcttcacatatgtaacagtgccggagtttttctgcttctctgtgtttggtcagaaactcttctttaggatacacctaaagatgagaagcttcatacccagtactcctcttcattcactcatatgtttttgggatcagtcccttctgctggctgtgcattggtctaatgggaacagaatagagtccagaaataacccaacatgtatgtgggacaactgggtttttgacagagggtgcaaaggtctttgaaaaaatgatgctggggattaattgggggcattcaggtggcaaaatttaaaaacaaattggtccatatcttaacactggcaaagattaaagtccaaatggattatagttccccaaaactgtataatttctagaagacaacaaggaaaacgtgttcagccttgggttaggaaaagatttcttaaatccaacaccaaaagcacaatccatgaaggaaaaatcgataaattgtactttatcaaaattgagaacttctctttgaaaggtaccataaggagaacaaaaagacaagctgtagagtggcagaaaaatatttgcaaaacatttctgataaatgagttgcatctaggttacataaagaagtctcaaaactgaacaaagtaaaacccattgttgacttaatgcgctgtttcctcctgagcttgctgcctctggcccctgctctctctccttttccatttgttttcaacattgaatccagaatgttcttcttgagatccaagtcagatcacaccaaccctcagaactctccaatagacgaccatggcactcaaaagtccacaatagccttcaatgctgggcaaaacatgaagcaccccttttctcccttctctgaccccatcacctctgtgttcaccctgctcctgccgtcctccctgcctccaaaacaggtcaggccttcgtgcctttgcactttactatttggcaataccccaaatgttcttcagggttctttagcctctttcatttcttttcctgaaggtgtcattctcactgagggcttatctaaaagctggcagctactgggggcattcctgtctcatcttccctgctgtattttgtaactcccgggctctcttttgtacttttaaacatacctatatggttttacctttgttgtttaatatttgccatgttgtttcccccacttgaatgtaagcctcccaaagattttatttttttaaactgaattattactgtattcccagaacaattcccctggcaaatatttggtactcaatagtaatgcctaagttagtaaataaatgatgaatttagaatcaaaataacgtgtctatggccaaaataaaacctgaaaaccctgtcctattttcccagaggtaactgctgttaatagtttagttgtgtgcttccagacataccttcacagaatcatttatcacaataaaggtgtcatactatgcaaaaaaaaa

SEQ ID NO: 153612 - DNA, 2229 bp, Homo sapiens
atgggccatgtgagtagtgacgatgggcacagtgatgaggatgagctgaggaaatccctgtctgagctggtggatgacaagttcgggacaggcacgaagaaggtgacgcgaatcctggatggtggcaaccccttcctggatgtcccacaggcgctcagtgccaccacctacaagcacggcgtcctgacccggaagactcacgctgacatggatggcaagaggacgccccgtgggaggcgtggctggaagaaattctacgcagtgctcaaagggaccatcctgtacctgcagaaggtgagagactgccccagagaccttactcacccaggggcctctgactacagcaagaagtccaacgtgctgaagcttaagacagccgactggagggtattcctcttccaggcaccgagcaaggaagaaatgctgtcctggatcctcaggatcaacctggtggcagccatcttctctgccccggccttcccagccgctgtcagctccatgaagaagttctgtcggcccctgctgccctcctgcaccacccgcctctgccaggaggagcaactgcggtctcatgagaataagttgaggcagctgactgcggagctggccgaacacaggtgtcacccagtcgagaggggcatcaagtccaaggaggccgaggagtaccggttgaaggagcactatctcaccttcgagaaaagccgttatgagacctatatccacctcctggctatgaaaatcaaagtgggctcagatgatctggagcggattgaggcccggctggccactctggaaggggatgacccttctctccggaagacacattcaagccctgccctcagccagggccatgtgactggcagcaaaaccacaaaggatgccactgggcctgatacttagctgacatggatttgcagaccccagggtgggcagatgtctccagtggggtcagtgagcacaattccagccaggggccacttggaccaagctccagtcagttgatgggcagctagaggggtgcagaaagcctgtgggcccaggagatggagatgccgtttgtggcgttgatctccttgcgtccttgggcatctccgggcatcagaccctctccctggcccttgttttcctctccaccatggagcctcattttgtaggccagtttgtgtgcatgctatagacaccacctcgctggagaagctgaaagggctgttgtcttcccaggtctttctcttctcatcaagctcctctcctcatcttttttgtgtgtgagggcaggtcttgactctagggtctcagctgggaaccccaccctttctcctcctccttcctctgagttgaccagcagcaggtctgccgaccaccagcaccatcctctcctcccagcagcctccagaaccatgcccaggtctcctgcctcacatcacaataatctgggacccaggcttgtgccctttcagtgtaaagctgactccatcacatgtgcatccacttcttttcatccattgagatcacactgcctcctttttatacagacacaaatatacatctataagaataatatatacataaggaacccctgtaaagatggttttggaactggaatcagttagaggatgaaatcagataaaggaaaagcctattttggagcttcccctgttaggaaggatggctgcacctggccccctggcattcctgacgctctaggagggaagggggaggcagtgctggcctcccttgccctgtttttccctcttccagctgacctgtgacttatactggctcttacccgatgatacttttgggaaaaaatagagcgtgtatgcactgccccgtttgtcccatgggatatcccgggggtgttaagtccggatgggtaccacgggccctgttttatatttggggtctttatgttggtgctgccaggtctctgagctccagaggtggcctcttggacagatctactgctataggaataaaagacactctgtctcgcaaatggccgcttgtcaacaagcccaaagatgcttgtcggaggacggttatggaagcccttaattcttggttgtgggaaaaggtggaatgacaagttattgattgtttttctgtcgctatttctttcatttgtctagtgaatcagaaaggcttagcaaggccacatctgggaagagtggagaaatttgccacttgacgatcacggattagctagcacctttaagccctgcatttctc

SEQ ID NO: 153613 - DNA, 488 bp, Homo sapiens
acatctatgttcgagatacctccaagcttggcacgaggtgctgacccacacttggccccggctctggcatccacaggacgctgccttatccgtcatctcgctggggctgggggctagaggctgagcaggtcacactgaacaaaagaagtgtgtccccatcactaggctaacatctgagtttcttccacagtatttggtaacacagtcagaaacaagactgaagatgattctggaggcaactgggaaccccccagaacgattctgcaggcttctgggaagctgaaaaaccccaaggccagactggcctcagaatgcctgagtccttttgattccactggaaaagccatccatctgtgccaagtgtgtgggagagcttcaaggagccattacagcctgggccaccattgaggcacagccacgtgggggagtagtcctgaaagtgtcctgggtgtggcaaaggcttttccactaagttggacctcagatgg

SEQ ID NO: 153614 - DNA, 741 bp, Homo sapiens
ttgtagaaaaaaaggtctcactgtgctcaggctggtcttgagctcctgtctgggcaacttggctaaacctcatctgtacaaaaaatacgaaaactagctgggtgtggtggtgtgcatccgtggtcccagctactagagaggctgaggtgggaggattccttcaccccagggaggtcaaggctgcagtgagccatgatctcatcactgtactccagcttgggcaacagagtgagaccctgtctccaacaacaacaaacaaaaacaaaaaccaaaggaatctaatctatctagggcaacttccagaccttagggtttgatccccactttgtcacttccctacatgtatgatgttggatctcaatttccaaacagtgacatgagtaccataacctttcaaaaagtatctatggtgtagcctactggggtgctgggctattgttctcagtgctttgggacagattaagtaaaaccaagcaaaccaaagatctctggccctgtgggaattcatattcttggtgagggcccatttactttttccttctttttggattcatatatcccttttggttataattcaatcagaaaatcgaaaaaactgagatgtttccaatactcagatttataaattattgccatacttgtgtcagattttttttaaaaaagaagtaaaatattacaaagtttatgtccatctcccattctcctcgtgccaagcttggtgtaatcggtgtcacaagcggt

SEQ ID NO: 153615 - DNA, 914 bp, Homo sapiens
ccaagcgtctgcctaggctgagacacgtgctgagctccctgaagatggaccggctgccccctagaagggagactttcaggggcatcagggcccttgggatgctccgccctgaccagctttttggtggcagagggaggcacggggagagggagaggccatgtcgcagtccccctgccgtgggagaggcaacgcggaaatgtatagacccagtgctcagccagaaacagggccagcaagcggctagtgaacggaggcagcccggggctcgtcagggtgggcagagccatggcccaggggttgaaaacccccggagttccccatgagacttggctggccctttcccacccctggggccttcagtctccccatcttgtgtgatgaggagagaccctgaggacagaggtcttcaggctgtgagtctcaacaggaactgagatccccaagggagacagagctgcaggtcacctcccctacctgcttctcagcaggacccaggaggcctggcccagctcctggtggaccccaagcagccagagcttactgctgccatctgaagacctcatctgagcccactttccaccaagcgcccacccaggctgaggtctcctgggaattctcacccgctctcctgctgataaggaaatgacgtcaatggctaccccagagaaatgccccacatcccaggacaccagccatcaggaaggcagctcttcctcacccagaaagaggcaattatttcctctcagcagcctggccccagggagcccccttccctctctggggctctgcctctccttttgttgccctgccatggagccccagggccggggcagcccctctctgcccagggaaggcaccgccctcaaagacaaggcttggccgggcagtgacctttccctgagcggagggggtgg

SEQ ID NO: 153616 - DNA, 1434 bp, Homo sapiens
gctcctcttacagatagtgcggcggcccaagcgtcgcgtctacccgggggattacagtaacccggctgtcagtgatgagtcagagagcggggggctgatgctgctgccatttcatcacctttgcgagcgcagcatccatccctccgctctcccggggcctgggcctacccagcttcgggctctcaggccagcgatgcgctcgcggctgagctagatcctgccgagccgcgctctctgaggcgtcggcggggcgccccctcccgccgttcccgggccgggccaaggagacctgcagagccgcggccatggaggccatctggctgtaccagttccggctcattgtcatcggggattccacagtgggcaagtcctgcctgatccgccgcttcaccgagggtcgctttgcccaggtttctgaccccaccgtgggggtgggattttttctcccgcttggtggagatcgagccagggaaaacgcatcaagctccagatctggggataccgcgggtcaagagaggttcagatccatcactcgcgcctactacaggaactcagtaggtggtcttctcttatctgacattaccaaccgcagctcattccagaatgtccatgcatcttggcaagagcccaaattacacgttcaaccctaccaaattgtacttgttctggtgggtcaccaagtgtgacctggatacacagaggcaagtgactcgccacgaggccgagaaactggctgctgcatacggccatgaagtacattgaaacgtcagcccgagatgccattaatgtggagaaagcccttcacagacctgaccaagagacatatatgagctggttaaaaggggggagattacaatccaggagggctgggaaggggtgaagagtggatttgtaccaaatgtggttcactcttcagaagaggttgtcaaatcagagaggagatgtttgtgctagtcagttcttttatttccaaaacatgctctcctacttgaactgaaaagtaagagaaataaatagaatctttgtgtaactgatgagaactcaacctccatttggataccaagtgagcctccctctcagggggactctgacagactcgtgtgcgggtggatgggggtgcctgagtgctgtgaccaagggactgaattgctgacatgggccaggccaggcactgttttgtggcccatgctaggcagtggctgctccatgagccctttgtggaccacatgttaaaggcctggggtttaggaagctaagtcccaggaaaacatacctacagacaggacaactgttccttggtatttgagctcacttataggccatgaacataaagaaatacataaaggggaaaaaagtttcacaatggggacaattagcataactaaacaaagattatgagctctacttattccgtgagaataccctgcaccaaag

SEQ ID NO: 153617 - DNA, 2562 bp, Homo sapiens; identical to SEQ ID NO: 138277

SEQ ID NO: 153618 - DNA, 3225 bp, Homo sapiens; identical to SEQ ID NO: 142601
  misc_feature (1)...(3225): n = a,t,c or g

SEQ ID NO: 153619 - DNA, 2876 bp, Homo sapiens; identical to SEQ ID NO: 124338

SEQ ID NO: 153620 - DNA, 2640 bp, Homo sapiens; identical to SEQ ID NO: 139941
  misc_feature (1)...(2640): n = a,t,c or g

SEQ ID NO: 153621 - DNA, 3345 bp, Homo sapiens; identical to SEQ ID NO: 119304
  misc_feature (1)...(3345): n = a,t,c or g

SEQ ID NO: 153622 - DNA, 2994 bp, Homo sapiens
ttagtgcggtttaatgaccgtcaggacttgaaagccctgcttgtggactctaaaggatccccttgttttcttattggtaggtctggctttagcagacaaagctttgagagaatcctcatgcccgctttccagtcgggaaacctgtcgtgccagctgcattaatgaatcggccaacgcgcggggagaggcggtttgcgtattgggcgccagggtggtttttcttttcaccagtgagacgggcaacagctgattgcccttcaccgcctggccctgagagagttgcagcaagcggtccacgctggtttgccccagcaggcgaaaatcctgtttgatggtggttccgaaatcggcaaaatcccttgtctccttctgagtgcccttcactgcctggcggtgtttctccctggcccttcgtgggctgggcttctgcgaccgatcctgcccgctttccagtcgggaaacctgtcgtgccagctgcattaatgaatcggccaacgcgcggggagaggcggtttgcgtattgggcgccagggtggtttttcttttcaccagtgagacgggcaacagctgattgcccttcaccgcctggccctgagagagttgcagcaagcggtccacgctggtttgccccagcaggcgaaaatcctgtttgatggtggttccgaaatcggcaaaatccctgtccaggttaagaaccattttatcgcccttatacaatactgtcgctccaggagcaaactgatgtcgtgagcttaaactagttcttgatgcagatgacgttttaagcacagaagttaaaagagtgataacttcttcagcttcaaatatcaccccagcttttttctgctcatgaaggttagatgcctgctgcttaagtaattcctctttatctgtaaaggctttttgaagtgcatcacctgaccgggcagatagttcaccggggtgagaaaaaagagcaacaactgatttaggcaatttggcggtgttgatacagcgggtaataatcttacgtgaaatattttccgcatcagccagcgcagaaatatttccagcaaattcattctgcaatcggcttgcataacgctgaccacgttcataagcacttgttgggcgataatcgttacccaatctggataatgcagccatctgctcatcatccagctcgccaaccaaaacacgataatcactttcggtaagtgcagcaactttacgacggcgactcccattcgcaatttctatgacaccagatactcttccaccgaacgccggtgtctgcacagccccataggagacactggggataccacgataaatgacatggctttgcctctgaaagagagatgtgctttcaaattcatttttagcagggcccacatgggtggtaatatcatcattagtgatgcccaagtcccatgtaatcaaccacagaaggatattgctctgtggcactattgatgcgaggccatgacctttaccaacttcatccgtttcacgtacaacattttttagaaccatgcttccccaggcatcccgaatttgctcctccatccacggggactgagagccattactattgctgtgtttggtaagcaaaatacgtacatcaggctcgaaccctttaagatcaacgttcttgagcagatcacgaagcatatcgaaaaacttgttctccttcatgaatgcctcttccactgcctggcggctgtattctccaatgtaccattcattgtgctggacatccaaacacatcacgcatatgattaatttgttcaattgtataaccaacacgttgctcaacccgtcctcgaatttccatatccgggtgcggtagtcgccctgctttctcggcatctctgatagctgcccgctttccagtcgggaaacctgtcgtgccagctgcattaatgaatcggccaacgcgcggggagaggcggtttgcgtattgggcgccagggtggtttttcttttcaccagtgagacgggcaacagctgattgcccttcaccgcctggccctgagagagttgcagcaagcggtccacgctggtttgccccagcaggcgaaaatcctgtttgatggtggttccgaaatcggcaaaatccattaattgcgttgcgctcactgcccgctttccagtcgggaaacctgtcgtgccagctgcattaatgaatcggccaacgcgcggggagaggcggtttgcgtattgggcgccagggtggtttttcttttcaccagtgagaccgggaacagctgattgcccttcaccggctggccctgttggtggaggtaaaggtgcgtactcgttagggcctgcgtttggcggggcgcaggaggggtggtaggcgggatacacggaaaaattacctgagcttgaagcctgcttgtgcgctctaaagatcccctgcccgctttccagtcgggaaacctgtcgtgccagctgcattaatgaatcggccaacgcgcggggagaggcggtttgcgtattgggcgccagggtggtttttcttttcaccagtgagacgggcaacagctgattgcccttcaccgcctggccctgagagagttgcagcaagcggtccacgctggtttgccccagcaggcgaaaatcctgtttggatggtggttccgaatcggcaaaatcctgcccgctttccagtcgggaaacctgtcgtgccagctgcattaatgaatcggccaacgcgcggggagaggcggtttgcgtattgggcgccagggtggtttttcttttcaccagtgagacgggcaacagctgattgcccttcaccgcctggccctgagagagttgcagcaagcggtccacgctggtttgccccagcaggcgaaaatcctgtttgatggtggttccgaaatcggcaaaatccctggcgtaccccccacgccagctaaagccaataaccgtcggggttacaaccctccttttggactctaaagaaccccccttcttgcccttgtccccacatgtgcctggcaacat

SEQ ID NO: 153623 - DNA, 3573 bp, Homo sapiens; identical to SEQ ID NO: 119766

SEQ ID NO: 153624 - DNA, 2232 bp, Homo sapiens; identical to SEQ ID NO: 119027
  misc_feature (1)...(2232): n = a,t,c or g

SEQ ID NO: 153625 - DNA, 2157 bp, Homo sapiens
atgggcaagggcttcatgtctaaaacaccaaaagccatggcagcaaaagccaaaattgacaaatgggatctaattaaactgaggagcttctgcacatcaaaagaaactaccatcagtctacacaatgttttaactttcatctggaaagggcactggccagccggtgaagggcaatcagctgttgcccgtctcactggtgaaaagaaaaaccaccctggcgcccaatacgcaaaccgcctctccccgcgcgttggccgattcattaatgcagctggcacgacaggtttcccgactggaaagcgggcagtgagcgcaacgcaattaatggattttgccgatttcggaaccaccatcaaacaggattttcgcctgctggggcaaaccagcgtggaccgcttgctgcaactctctcagggccaggcggtgaagggcaatcagctgttgcccgtctcactggtgaaaagaaaaaccaccctggcgcccaatacgcaaaccgcctctccccgcgcgttggccgattcattaatgcagctggcacgacaggtttcccgactggaaagcgggcagtttggttatgcagactggcttccttgctcctcagctcgcagacagcctgttgtgggacttcacccttgtgattatgaatggaggttatgcattcagcaacagggacttcctctcaccaaggctccctttactacagctacgactgaatgtcccatctgccagcagcagagaagggggtctctaagtccacagcaggctgtaagccgaaaccatcaggggtcgagccttgatgtacgtattttgcttaccaaatccagcaatagtaatggctctcagtccccgtggatggaggagcaaattcgggatgcctggggaagcatggttctaaaaaatgttgtacgtgaaacggatgaagttggtaaaggtcagatccggatgagaactgtttttgaacaggccattgatcaacgctcttcaactgctgccccgatggtggattcgttaattgcgcgcgtaggagtaatggctcgcggtaatgccattactttgcctgtatgtggtcgggatgtgaagtttactcttgaagtgctccggggtgatagtgttgacaacacctctcgggtatggtcaggtaatgaacgtgaccaggagctgcttactgaggacgcactggatgatctcatcccttcttttctactgactggtcaacagacaccggcgttcggtcgaagagtatctggtgtcatagttaattgccgatggccctcgccgtcggattttgccgatttcggaaccaccatcaaacaggattttcgcctgctggggcaaaccagcgtggaccgcttgctgcaactctctcagggccaggcggtgaagggcaatcagctgttgcccgtctcactggtgaaaagaaaaaccaccctggcgcccaatacgcaaaccgcctctccccgcgcgttggccgattcattaatgcagctggcacgacaggtttcccgactggaaagcgggcaggattttgccgatttcggaaccaccatcaaacaggattttcgcctgctggggcaaaccagcgtggaccgcttgctgcaactctctcagggccaggcggtgaagggcaatcagctgttgcccgtctcactggtgaaaagaaaaaccaccctggcgcccaatacgcaaaccgcctctccccgcgcgttggccgattcattaatgcagctggcacgacaggtttcccgactggaaagcgggcaggattttgccgatttcggaaccaccatcaaacaggattttcgcctgctggggcaaaccagcgtggaccgcttgctgcaactctctcagggccaggcggtgaagggcaatcagctgttgcccgtctcactggtgaaaagaaaaaccaccctggcgcccaatacgcaaaccgcctctccccgcgcgttggccgattcattaatgcagctggcacgacaggtttcccgactggaaagcgggcacaagcccaagccaagcccacatcagaaacaaccttccttccccgtgcgcccgaaagcattaaatccacggaatcggatgggtgaagatttccaaaatacccaaccaaccaacccaacaagtctgccgaaaggaattagagataccccaaccaaatag

SEQ ID NO: 153626 - DNA, 2602 bp, Homo sapiens; identical to SEQ ID NO: 131065

SEQ ID NO: 153627 - DNA, 3198 bp, Homo sapiens; identical to SEQ ID NO: 124768
  misc_feature (1)...(3198): n = a,t,c or g

SEQ ID NO: 153628 - DNA, 2262 bp, Homo sapiens; identical to SEQ ID NO: 119030

SEQ ID NO: 153629 - DNA, 2421 bp, Homo sapiens; identical to SEQ ID NO: 119313

SEQ ID NO: 153630 - DNA, 5100 bp, Homo sapiens; identical to SEQ ID NO: 139962

SEQ ID NO: 153631 - DNA, 2139 bp, Homo sapiens
atgaaactcatggaaacacttaaccagtgcataaacgctggtcatgaaatgacgaaggctatcgccattgcacagtttaatgatgacagcccggaagcgaggaaaataacccggcgctggagaataggtgaagcagcggatttagttggggtttcttctcaggctatcagagatgccgagaaagcagggcgactaccgcacccggatatggaaattcgaggacgggttgagcaacgtgttggttatacaattgaacaaattaatcatatgcgtgatgtgtttggtacgcgattgcgacgtgctgaagacgtatttccaccggtgatcggggttgctgcccataaaggtggcgtttacaaaacctcagtttctgttcatcttgctcaggatctggctctgaaggggctacgtgttttgctcgtggaaggtaacgacccccagggaacagcctcaatgtatcacggatgggtaccagatcttcatattcatgcagaagacactctcctgcctttctatcttggggaaaaggacgatgtcacttatgcaataaagcccacttgctggccggggcttgacattattccttcctgtctggctctgcaccgtattgaaactgagttaatgggcaaatttgatgaaggtaaactgcccaccgatccacacctgatgctccgactggccattgaaactgttgctcatgactatgatgtcatagttattgacagcgcgcctaacctgggtatcggcacgattaatgtcgtatgtgctgctgatgtgctgattgttcccacgcctgctgagttgtttgactacacctccgcactgcagtttttcgatatgcttcgtgatctgctcaagaacgttgatcttaaagggttcgagcctgatgaggagcgactcaagccttcgcgaaagaaaataaccaaaaagcatacaaagaaacatattgaatccgcaaaaggacttgatgtgtgggacagctggccgctgcaaaacgctgacggaacagtagctgaatacaacggctatcacgttgtgtttgctcttgcgggaagcccgaaagacgctgatgacacatcaatctacatgttttatcaaaaggtcggcgacaactcaatcgacagctggaaaaacgcgggccgtgtctttaaagacagcgataagttcgacgccaacgatccgatcctgaaagatcagacgcaagaatggtccggttctgcaacctttacatctgacggaaaaatccgtttattctacactgactattccggtaaacattacggcaaacaaagcctgacaacagcgcaggtaaatgtgtcaaaatctgatgacacactcaaaatcaacggagtggaagatcacaaaacgatttttgacggagacggaaaaacatatcagaacgttcagcagtttatcgatgaaggcaattatacatccggcgacaaccatacgctgagagaccctcactacgttgaagacaaaggccataaataccttgtattcgaagccaacacgggaacagaaaacggataccaaggcgaagaatctttatttaacaaagcgtactacggcggcggcacgaacttcttccgtaaagaaagccagaagcttcagcagagcgctaaaaaacgcgatgctgagttagcgaacggcgccctcggtatcatagagttaaataatgattacacattgaaaaaagtaatgaagccgctgatcacttcaaacacggtaactgatgaaatcgagcgcgcgaatgttttcaaaatgaacggcaaatggtacttgttcactgattcacgcggttcaaaaatgacgatcgatggtattaactcaaacgatatttacatgcttggttatgtatcaaactctttaaccggcccttacaagccgctgaacaaaacagggcttgtgctgcaaatgggtcttgatccaaacgatgtgacattcacttactctcacttcgcagtgccgcaagccaaaggcaacaatgtggttatcacaagctacatgacaaacagaggcttcttcgaggataaaaaggcaacatttgcgccaagcttcttaatgaacatcaaaggcaataaaacatccgttgtcaaaaacagcatcctggagcaaggacagctgacagtcaactaa

SEQ ID NO: 153632 - DNA, 3990 bp, Homo sapiens; identical to SEQ ID NO: 139966

SEQ ID NO: 153633 - DNA, 2460 bp, Homo sapiens
tcagggtgctggcttttcaagttccttaagaatggcctcaattttctctatacactcagttggaacacgagacctgtccaggttaagcaccattttatcgcccttatacaatactgtcgctccaggagcaaactgatgtcgtgagcttaaactagttcttgatgcagatgacgttttaagcacagaagttaaaagagtgataacttcttcagcttcaaatatcaccccagcttttttctgctcatgaaggttagatgcctgctgcttaagtaattcctctttatctgtaaaggctttttgaagtgcatcacctgaccgggcagatagttcaccggggtgagaaaaaagagcaacaactgatttaggcaatttggcggggttgatacagcgggtaataatcgcctggccctgagagagttgcagcaagcggtccacgctggtttgccccagcaggcgaaaatcctgtttgatggtggttccgaaatcggcgaaatcctgcccgctttccagtcgggaaacctgtcgtgccagctgcattaatgaatcggccaacgcgcggggagaggcggtttgcgtattgggcgccagggtggtttttcttttcaccagtgagacgggcaacagctgattgcccttcaccgcctggccctgagagagttgcagcaagcggtccacgctggtttgccccagcaggcgaaaatcctgtttgatggtggttccgaaatcggcaaaatcctgcccgctttccagtcgggaaacctgtcgtgccagctgcattaatgaatcggccaacgcgcggggagaggcggtttgcgtattgggcgccagggtggtttttcttttcaccagtgagacgggcaacagctgattgcccttcaccgcctggccctgagagagttgcagcaagcggtccacgctggtttgccccagcaggcgaaaatcctgtttgatggtggttccgaaatcggcaaaatcctgcccgctttccagtcgggaaacctgtcgtgccagctgcattaatgaatcggccaacgcgcggggagaggcggtttgcgtattgggcgccagggtggtttttcttttcaccagtgagacgggcaacagctgattgcccttcaccgcctggccctgagagagttgcagcaagcggtccacgctggtttgccccagcaggcgaaaatcctgtttgatggtggttccgaaatcggcaaaatcctgcccgctttccagtcgggaaacctgtcgtgccagctgcattaatgaatcggccaacgcgcggggagaggcggtttgcgtattgggcgccagggtggtttttcttttcaccagtgagacgggcaacagctgattgcccttcaccgcctggccctgagagagttgcagcaagcggtccacgctggtttcgcccagcaggcgaaaatcctgtttgatggtggtgtcgaaatcggcaaaattccgcacccggatatggaaattcgaggacgggttgagcaacgtgttggttatacaattgaacaaattaatcatatgcgtgatgtgtttggtacgcgattggacgtgctgaagacgtatttccaccggtgatcggggttgctgcccataaaggtggcgtttacaaaacctcagtttctgttcatcttgctcaggatctggctctgaaggggctacgtgttttgctcgtggaaggtaacgacccccagggaacagcctcaatgtatcacggatgggtaccagatcttcatattcatgcagaagacactctcctgcctttctatcgatccacacctgatgctccgactggccattgaaactgttgctcatgactatgatgtcatagttattgacagcgcgcctaacctgggtatcggcacgattaatgtcgtatgtgctgctgatgtgctgattgttccacgcctgctgagttgtttgactacactccgcactgcagtttttcgatatgcttcgtgatctgctcaagaacgttgatcttaaaggggtcgagcctgatgtacgtaattctttctctctggctgcccttaacattttttccttcatttcaactttggtgaatctgccaattatgtgtcttggagttgctcttctcgaggagtgtctttgtggcgttctctgtatttcctgaatctgaacgttggcctgccttgctagattggggaagttctcctggataatatcctgcagagtgttttccaacttggttccattctccacatcactttcaggtacaccaatcagacgtagatttggtcttttcacatagtcccatatttcttggaggctttgctcatttctttttattcttttttctctaaacttcccttctcgcttcatttcattcatttcatcttccattgctgataccctttcttccagttgatcgcattggctcctgaggcttctgcattcttcacgtagttctcgagacttggttttcagctccat

SEQ ID NO: 153634 - DNA, 2236 bp, Homo sapiens; identical to SEQ ID NO: 142624

SEQ ID NO: 153635 - DNA, 2823 bp, Homo sapiens; identical to SEQ ID NO: 139972
  misc_feature (1)...(2823): n = a,t,c or g

SEQ ID NO: 153636 - DNA, 7038 bp, Homo sapiens
atgctcattggagcatttcagatttcagattttcagatttgggatgctcaaccgatgtttcagaaagaacaagtggatcctcttcagatgaaattgcagcaggtgaatggacttggccagggattaattcagagtgcaggaaaagactgtgatgtacagggtttagaacatgacatggaagagatcaatgctcgatggaatacattgaataaaaaggtcgcacaaagaattgcacagctacaggaagctttgttgcattgtgggaagtttcaagatgccttggagccattgctcagctggttggcagataccgaggagctcatagccaatcagaaacctccatctgctgagtataaagtggtgaaagcacagatccaagaacagaagttgctccagcggctcctagatgatcgaaaggccacagtagacatgcttcaagcagaaggaggcagaatagcccagtcagcagagctggctgatagagagaaaatcactggacagctggagagtcttgaaagtagatggactgaactactcagtaaggcagcagccaggcaaaaacagctggaagacatcctggttctggccaaacagttccatgagacagctgagcctatttctgacttcttatctgtcacagagaaaaagcttgctaactcagaacctgttggcactcagactgccaaaatacagcagcagatcattcggcacaaggctctggaagaagacatagaaaaccatgcaacagatgtgcaccaggcagtcaaaattgggcagtccctctcctccctgacatctcctgcagaacagggtgtgctgtcagaaaagatagactcattgcaggcccgatacagtgaaattcaagaccgctgttgtcggaaggcagccctacttgaccaagctctgtctaatgctaggctgtttggggaggatgaggtggaggtgctcaactggctggctgaggttgaggacaagctcagttcagtgttcgtaaaggatttcaaacaggatgtcctgcacaggcagcatgctgaccacctggctttaaatgaagaaattgttaatagaaagaagaatgtagatcaagctattaaaaatggtcaggctcttctaaaacaaaccacaggtgaggaggtgttacttatccaggaaaaactagatggtataaagactcgttacgcagacatcacagttactagctccaaggccctcagaactttagagcaagcccggcagctggccaccaagttccagtctacttatgaggaactgaccgggtggctgagggaggtggaggaggagctggcaaccagtggaggacagtctcccacaggggaacagataccccagtttcagcagagacagaaggaattaaagaaggaggtcatggagcacaggctggtgttggacacagtgaatgaggtgagccgtgctctcttagagctggtgccctggagagccagagaagggctggataaacttgtgtccgatgctaacgagcagtacaaactagtcagtgacactattggacaaagggtggatgaaattgatgctgctattcagagatcacaacagtatgagcaagctgccgatgcagaactagcttgggttgctgaaacaaaacggaaactgatggctctgggtccaattcgcctggaacaggaccagaccacagctcagcttcaggtacagaaggctttctccattgacattattcgacacaaagattcaatggatgaactcttcagtcaccgtagtgaaatctttggcacatgtggggaggagcaaaaaactgtattacaggaaaagacagagtctctaatacagcaatatgaagccattagcctactcaattcagagcgttatgcccgcctagagcgggcccaggtcttagtaaaccagttttgggaaacttatgaagagctcagcccctggattgaggaaactcgggcactaatagcacagttaccctctccagccattgatcatgagcagctcaggcagcaacaagaggaaatgaggcaattaagggaatctattgctgaacacaaacctcatattgacaaactactaaagataggcccacaactaaaggaattaaaccctgaggaaggggaaatggtggaagaaaaataccagaaagcagaaaacatgtatgcccaaataaaggaggaggtgcgccagcgagccctggctctggatgaagccgtgtcccagtccacacagtttcatgataaaattgagcctatgttggagacactggagaatctttcctctcgcctgcgtatgccaccactgatccctgctgaagtagacaagatcagagagtgcatcagtgacaataagagtgccaccgtggagctagaaaaactgcagccatcctttgaggccttgaagcgccgtggagaggagcttattggacgatctcagggagcagacaaggatctggctgcaaaagaaatccaggataaattggatcaaatggtattcttctgggaggacatcaaagctcgggctgaagaacgagaaatcaaatttcttgatgtccttgaattagcagagaagttctggtatgacatggcagctctcctgaccaccatcaaagacacccaggatattgtccatgacttggaaagcccaggcattgatccttccatcatcaaacaacaggttgaagctgctgagactattaaggaagagacagatggtctgcatgaagagctggagtttattcggatccttggagcagatttgatttttgcctgtggagaaactgagaagcctgaagtgaggaagagcattgatgagatgaataatgcttgggagaacttaaacaaaacatggaaagagaggctagaaaaacttgaggatgctatgcaagctgctgtgcagtatcaggacactcttcaggctatgtttgactggctagataacactgtgattaaactctgcaccatgccccctgttggcactgacctcaatactgttaaagatcagttaaatgaaatgaaggagttcaaagtagaagtttaccaacagcaaattgagatggagaagcttaatcaccagggtgaactgatgttaaagaaagctactgatgagacggacagagacattatacgagaaccactgacagaactcaaacacctctgggagaacctgggtgagaaaattgcccaccgacagcacaaactagaaggggctctgttggcccttggtcagttccagcatgccttagaggaactaatgagttggctgactcataccgaagagttgttagatgctcagagaccaataagtggagacccaaaagtcattgaagttgagctcgcaaagcaccatgtcctaaaaaatgatgttttggctcatcaagccacagtggaaacagtcaacaaagctggcaatgagcttcttgaatccagtgctggagatgatgccagcagcttaaggagccgtttggaagccatgaaccaatgctgggagtcagtgttacagaaaacagaggagagggagcagcagcttcagtcaactctgcagcaggcccagggcttccacagtgaaattgaagatttcctcttggaacttactagaatggagagccagctttctgcatctaagcccacaggaggacttcctgaaactgctagggaacagcttgatacacatatggaactctattcccagctgaaagccaaggaagagacttataatcaactacttgacaagggcagactcatgcttctaagccgtgacgactctgggtctggctccaagacagaacagagtgtagcacttttggagcagaagtggcatgtggtcagcagtaagatggaagaaagaaagtcaaagctggaagaggccctcaacttggcaacagaattccagaattccctacaagaatttatcaactggctcactctagcagagcagagtttaaacatcgcttctccaccaagcctgattctaaatactgtcctttcccagatagaagagcacaaggtttttgctaatgaagtaaatgctcatcgagaccagatcattgagctggatcaaactgggaatcaattaaagttccttagccaaaagcaggatgttgttctgatcaagaatttgttggtgagcgtgcagtctcgatgggagaaggttgtccagcgatctattgaaagagggcgatcactagatgatgccaggaagcgggcaaaacaattccatgaagcttggaaaaaactgattgactggctagaagatgcagagagtcacctggactcagaactagagatatccaatgacccagacaaaattaaacttcagctttctaagcataaggagtttcagaagactcttggtggcaagcagcctgtgtatgataccacaattagaactggcagagcactgaaagaaaagactttgcttcccgaagatagtcagaaacttgacaatttcctaggagaagtcagagacaaatgggatactgtttgtggcaagtctgtggagcggcagcacaagttggaggaagccctgctcttttcgggtcagttcatggatgctttgcaggcattggttgactggttatacaaggtggagccacagctggctgaggaccagcccgtgcacggggaccttgacctcgtcatgaacctcatggatgcacacaaggttttccagaaggaactgggaaagcgaacaggaaccgttcaggtcctgaagcggtcaggccgagagctgattgagaatagtcgagatgacaccacttgggtaaaaggacagctccaggaactgagcactcgctgggacactgtctgtaaactctctgtttccaaacaaagccggcttgagcaggccttaaaacaagcggaagtgtttcgagacacagtccacatgctgttggagtggctttctgaagcagagcaaacgcttcgctttcggggagcacttcctgatgacacagaggccctgcagtctctcattgacacccataaggaattcatgaagaaagtagaagaaaagcgagtggacgttaactcagcagtagccatgggagaagtcatcctggctgtctgccaccccgattgcatcacaaccatcaaacactggatcaccatcatccgagctcgcttcgaggaggtcctgacatgggctaagcagcaccagcagcgtcttgaaacggccttgtcagaactggtggctaatgctgagctcctggaagaacttctggcatggatccagtgggctgagaccaccctcattcagcgggatcaggagccaatcccgcagaacattgaccgagttaaagcccttatcgctgagcatcagacatttatggaggagatgactcgcaaacagcctgacgtggaccgggtcaccaagacatacaaaaggaaaaacatagagcctactcacgcgcctttcatagagaaatcccgcagcggaggcaggaaatccctaagtcagccaacccctcctcccatgccaatcctttcacagtctgaagcaaaaaacccacggatcaaccagctttctgcccgctggcagcaggtgtggctgttagcactggagcggcaaaggaaactgaatgatgccttggatccttctatagtgtcacctaaatgtcgacggccaggcggccgccaggcctacccactagtcaattcgggaggatcgaaacggcagatcgcaaaaaacagaggagcgactcaagccttcgcgaaagaaaataaccaaaaagcatacaaagaaacgtacggcgtctctcatattacacgccatgatatgctgcagatccctaaacagcagcaaaacgaaaaataccaagtgcctcaattcgatcaatcaacgattaaaaatattgagtctgcaaaaggacttgatgtgtgggacagctggccgctgcaaaacgctgacggaacagtagctgaatacaacggctatcacgttgtgtttgctcttgcgggaagcccgaaagacgctgatgacacatcaatctacatgttttatcaaaaggtcggcgacaactcaatcgacagctggaaaaacgcgggccgtgtctttaaagacagcgataagttcgacgccaacgatccgatcctgaaagatcagacgcaagaatggtccggttctgcaacctttacatctgacggaaaaatccgtttattctacactgactattccggtaaacattacggcaaacaaagcctgacaacagcgcaggtaaatgtgtcaaaatctgatgacacactcaaaatcaacggagtggaagatcacaaaacgatttttgacggagacggaaaaacatatcagaacgttcagcagtttatcgatgaaggcaattatacatccggcgacaaccatacgctgagagaccctcactacgttgaagacaaaggccataaataccttgtattcgaagccaacacgggaacagaaaacggataccaaggcgaagaatctttatttaacaaagcgtactacggcggcggcacgaacttcttccgtaaagaaagccagaagcttcagcagagcgctaaaaaacgcgatgctgagttagcgaacggcgccctcggtatcatagagttaaataatgattacacattgaaaaaagtaatgaagccgctgatcacttcaaacacggtaactgatgaaatcgagcgcgcgaatgttttcaaaatgaacggcaaatggtacttgttcactgattcacgcggttcaaaaatgacgatcgatggtattaactcaaacgatatttacatgcttggttatgtatcacactctttaaccggcccttacaagccgctgaacaaaacagggcttgtgctgcaaatgggtcttgatccaaacgatgtgacattcacttactctcacttcgcagtgccgcaagccaaaggcaacaatgtggttatcacaagctacatgacaaacagaggcttcttcgaggataaaaaggcaacatttgcgccaagcttcttaatgaacatcaaaggcaataaaacatccgttgtcaaaaacagcatcctggagcaaggacagctgacagtcaactaa

SEQ ID NO: 153637 - DNA, 2331 bp, Homo sapiens
atgaaactcatggaaacacttaaccagtgcataaacgctggtcatgaaatgacgaaggctatcgccattgcacagtttaatgatgacagcccggaagcgaggaaaataacccggcgctggagaataggtgaagcagcggatttagttggggtttcttctcaggctatcagagatgccgagaaagcagggcgactaccgcacccggatatggaaattcgaggacgggttgagcaacgtgttggttatacaattgaacaaattaatcatatgcgtgatgtgtttggtacgcgattgcgacgtgctgaagacgtatttccaccggtgatcggggttgctgcccataaaggtggcgtttacaaaacctcagtttctgttcatcttgctcaggatctggctctgaaggggctacgtgttttgctcgtggaaggtaacgacccccagggaacagcctcaatgtatcacggatgggtaccagatcttcatattcatgcagaagacactctcctgcctttctatcttggggaaaaggacgatgtcacttatgcaataaagcccacttgctggccggggcttgacattattccttcctgtctggctctgcaccgtattgaaactgagttaatgggcaaatttgatgaaggtaaactgcccaccgatccacacctgatgctccgactggccattgaaactgttgctcatgactatgatgtcatagttattgacagcgcgcctaacctgggtatcggcacgattaatgtcgtatgtgctgctgatgtgctgattgttcccacgcctgctgagttgtttgactacacctccgcactgcagtttttcgatatgcttcgtgatctgctcaagaacgttgatcttaaaggatcgcaaaaaacagtacatacagaaggagacatgaacatgaacatcaaaaaaattgtaaaacaagccacagttctgacttttacgactgcacttctggcaggaggagcgactcaagccttcgcgaaagaaaataaccaaaaagcatacaaagaaacgtacggcgtctctcatattacacgccatgatatgctgcagatccctaaacagcagcaaaacgaaaaataccaagtgcctcaattcgatcaatcaacgattaaaaatattgagtctgcaaaaggacttgatgtgtgggacagctggccgctgcaaaacgctgacggaacagtagctgaatacaacggctatcacgttgtgtttgctcttgcgggaagcccgaaagacgctgatgacacatcaatctacatgttttatcaaaaggtcggcgacaactcaatcgacagctggaaaaacgcgggccgtgtctttaaagacagcgataagttcgacgccaacgatccgatcctgaaagatcagacgcaagaatggtccggttctgcaacctttacatctgacggaaaaatccgtttattctacactgactattccggtaaacattacggcaaacaaagcctgacaacagcgcaggtaaatgtgtcaaaatctgatgacacactcaaaatcaacggagtggaagatcacaaaacgatttttgacggagacggaaaaacatatcagaacgttcagcagtttatcgatgaaggcaattatacatccggcgacaaccatacgctgagagaccctcactacgttgaagacaaaggccataaataccttgtattcgaagccaacacgggaacagaaaacggataccaaggcgaagaatctttatttaacaaagcgtactacggcggcggcacgaacttcttccgtaaagaaagccagaagcttcagcagagcgctaaaaaacgcgatgctgagttagcgaacggcgccctcggtatcatagagttaaataatgattacacattgaaaaaagtaatgaagccgctgatcacttcaaacacggtaactgatgaaatcgagcgcgcgaatgttttcaaaatgaacggcaaatggtacttgttcactgattcacgcggttcaaaaatgacgatcgatggtattaactcaaacgatatttacatgcttggttatgtatcaaactctttaaccggcccttacaagccgctgaacaaaacagggcttgtgctgcaaatgggtcttgatccaaacgatgtgacattcacttactctcacttcgcagtgccgcaagccaaaggcaacaatgtggttatcacaagctacatgacaaacagaggcttcttcgaggataaaaaggcaacatttgcgccaagcttcttaatgaacatcaaaggcaataaaacatccgttgtcaaaaacagcatcctggagcaaggacagctgacagtcaactaa

SEQ ID NO: 153638 - DNA, 2331 bp, Homo sapiens
atgtgcgaactcgatattttacacgactctctttaccaattctgccccgaattacacttaaaacgactcaacagcttaacgttggcttgccacgcattacttgactgtaaaactctcactcttaccgaacttggccgtaacctgccaaccaaagcgagaacaaaacataacatcaaacgaatcgaccgattgttaggtaatcgtcacctccacaaagagcgactcgctgtataccgttggcatgctagctttatctgttcgggcaatacgatgcccattgtacttgttgactggtctgatattcgtgagcaaaaacgacttatggtattgcgagcttcagtcgcactacacggtcgttctgttactctttatgagaaagcgttcccgctttcagagcaatgttcaaagaaagctcatgaccaatttctagccgaccttgcgagcattctaccgagtaacaccacaccgctcattgtcagtgatgctggctttaaagtgccatggtataaatccgttgagaagctgggttggtactggttaagtcgagtaagaggaaaagtacaatatgcagacctaggagcggaaaactggaaacctatcagcaacttacatgatatgtcatctagtcactcaaagactttaggctataagaggctgactaaaagcaatccaatctcatgccaaattctattgtataaatctcgctctaaaggccgaaaaaatcagcgctcgacacggactcattgtcaccacccgtcacctaaaatctactcagcgtcggcaaaggagccatgggttctagcaactaacttacctgttgaaattcgaacacccaaacaacttgttaatatctattcgaagcgaatgcagattgaagaaaccttccgagacttgaaaagtcctgcctacggactaggcctacgccatagccgaacgagcagctcagagcgttttgatatcatgctgctaatcgccctgatgcttcaactaacatgttggcttgcgggcgttcatgctcagaaacaaggttgggacaagcacttccaggctaacacagtcagaaatcgaaacatccctaaacagcagcaaaacgaaaaataccaagtgcctcaattcgatcaatcaacgattaaaaatattgagtctgcaaaaggacttgatgtgtgggacagctggccgctgcaaaacgctgacggaacagtagctgaatacaacggctatcacgttgtgtttgctcttgcgggaagcccgaaagacgctgatgacacatcaatctacatgttttatcaaaaggtcggcgacaactcaatcgacagctggaaaaacgcgggccgtgtctttaaagacagcgataagttcgacgccaacgatccgatcctgaaagatcagacgcaagaatggtccggttctgcaacctttacatctgacggaaaaatccgtttattctacactgactattccggtaaacattacggcaaacaaagcctgacaacagcgcaggtaaatgtgtcaaaatctgatgacacactcaaaatcaacggagtggaagatcacaaaacgatttttgacggagacggaaaaacatatcagaacgttcagcagtttatcgatgaaggcaattatacatccggcgacaaccatacgctgagagaccctcactacgttgaagacaaaggccataaataccttgtattcgaagccaacacgggaacagaaaacggataccaaggcgaagaatctttatttaacaaagcgtactacggcggcggcacgaacttcttccgtaaagaaagccagaagcttcagcagagcgctaaaaaacgcgatgctgagttagcgaacggcgccctcggtatcatagagttaaataatgattacacattgaaaaaagtaatgaagccgctgatcacttcaaacacggtaactgatgaaatcgagcgcgcgaatgttttcaaaatgaacggcaaatggtacttgttcactgattcacgcggttcaaaaatgacgatcgatggtattaactcaaacgatatttacatgcttggttatgtatcaaactctttaaccggcccttacaagccgctgaacaaaacagggcttgtgctgcaaatgggtcttgatccaaacgatgtgacattcacttactctcacttcgcagtgccgcaagccaaaggcaacaatgtggttatcacaagctacatgacaaacagaggcttcttcgaggataaaaaggcaacatttgcgccaagcttcttaatgaacatcaaaggcaataaaacatccgttgtcaaaaacagcatcctggagcaaggacagctgacagtcaactaa

SEQ ID NO: 153639 - DNA, 2541 bp, Homo sapiens
atgccccgccaggtgggcagtgggcctgggcccctcttgggagttgctgggcaggctgcagtaggcactggcgggaagaaatccctgtgtcagtatcgtaagccggatggctcaggcatcgtctctttgaaaatcgactggatcatagagcgttaccagctgcctcaaagttaccagcatagaaaggcaggagagtgtcttctgcatgaatatgaagatctggtacccatccgtgatacattgaggctgttccctgggggtcgttaccttccacgagcaaaacacgtagccccttcagagccagatcctgagcaagatgaacagaaactgagggattttgccgatttcggaaccaccatcaaacaggattttcgcctgctggggcaaaccagcgtggaccgcttgctgcaactctctcagggccaggcggtgaagggcaatcagctgttgcccgtctcactggtgaaaagaaaaaccaccctggcgcccaatacgcaaaccgcctctccccgcgcgttggccgattcattaatgcagctggcacgacaggtttcccgactggaaagcgggcaggattttgccgatttcggaaccaccatcaaacaggattttcgcctgctggggcaaaccagcgtggaccgcttgctgcaactctctcagggccaggcggtgaagggcaatcagctgttgcccgtctcactggtgaaaagaaaaaccaccctggcgcccaatacgcaaaccgcctctccccgcgcgttggccgattcattaatgcagctggcacgacaggtttcccgactggaaagcgggcaggattttgccgatttcggaaccaccatcaaacaggattttcgcctgctggggcaaaccagcgtggaccgcttgctgcaactctctcagggccaggcggtgaagggcaatcagctgttgcccgtctcactggtgaaaagaaaaaccaccctggcgcccaatacgcaaaccgcctctccccgcgcgttggccgattcattaatgcagctggcacgacaggtttcccgactggaaagcgggcaggattttgccgatttcggaaccaccatcaaacaggattttcgcctgctggggcaaaccagcgtggaccgcttgctgcaactctctcagggccaggcggtgaagggcaatcagctgttgcccgtctcactggtgaaaagaaaaaccaccctggcgcccaatacgcaaaccgcctctccccgcgcgttggccgattcattaatgcagctggcacgacaggtttcccgactggaaagcgggcaggattttgccgatttcggaaccaccatcaaacaggattttcgcctgctggggcaaaccagcgtggaccgcttgctgcaactctctcagggccaggcggtgaagggcaatcagctgttgcccgtctcactggtgaaaagaaaaaccaccctggcgcccaatacgcaaaccgcctctccccgcgcgttggccgattcattaatgcagctggcacgacaggtttcccgactggaaagcgggcaggattttgccgatttcggaaccaccatcaaacaggattttcgcctgctggggcaaaccagcgtggaccgcttgctgcaactctctcagggccaggcggtgaagggcaatcagctgttgcccgtctcactggtgaaaagaaaaaccaccctggcgcccaatacgcaaaccgcctctccccgcgcgttggccgattcattaatgcagctggcacgacaggtttcccgactggaaagcgggcaggattttgccgatttcggaaccaccatcaaacaggattttcgcctgctggggcaaaccagcgtggaccgcttgctgcaactctctcagggccaggcggtgaagggcaatcagctgttgcccgtctcactggacgatgtcacttatgcaataaagcccacttgctggccggggcttgccattattccttcctgtctggctctgcaccgtattgaaactgagttaatgggcaaatttgatgaaggtaaactgcccaccgatccacacctgatgctccgactggccattgaaactgttgctcatgactatgatgtcatagttattgacagcgcgcctaacctgggtatcggcacgattaatgtcgtatgtgctgctgatgtgctgattgttcccacgcctgctgagttgtttgactacacctccgcactgcagtttttcgatatgcttcgtgatctgctcaagaacgttgatcttaaagggttcgagcctgatgtacgtattttgcttaccaaatacagcaatagtaatggctctcagtccccgtggatggaggagcaaattcgggatgcctggggaagcatggttctaaaaaatgttgtacgtgaaacggatgaagttggtaaaggtcagatccggatgagaactgtttttgaacaggccattgatcaacgctcttcaactggtgcctggagaaatgctctttctatttgggaacctgtctgcaatgaaattttcgatcgtctgattaaaccacgctgggagattagataa

SEQ ID NO: 153640 - DNA, 3852 bp, Homo sapiens
atgtgcgaactcgatattttacacgactctctttaccaattctgccccgaattacacttaaaacgactcaacagcttaacgttggcttgccacgcattacttgactgtaaaactctcactcttaccgaacttggccgtaacctgccaaccaaagcgagaacaaaacataacatcaaacgaatcgaccgattgttaggtaatcgtcacctccacaaagagcgactcgctgtataccgttggcatgctagctttatctgttcgggcaatacgatgcccattgtacttgttgactggtctgatattcgtgagcaaaaacgacttatggtattgcgagcttcagtcgcactacacggtcgttctgttactctttatgagaaagcgttcccgctttcagagcaatgttcaaagaaagctcatgaccaatttctagccgaccttgcgagcattctaccgagtaacaccacaccgctcattgtcagtgatgctggctttaaagtgccatggtataaatccgttgagaagctgggttggtactggttaagtcgagtaagaggaaaagtacaatatgcagacctaggagcggaaaactggaaacctatcagcaacttacatgatatgtcatctagtcactcaaagactttaggctataagaggctgactaaaagcaatccaatctcatgccaaattctattgtataaatctcgctctaaaggccgaaaaaatcagcgctcgacacggactcattgtcaccacccgtcacctaaaatctactcagcgtcggcaaaggagccatgggttctagcaactaacttacctgttgaaattcgaacacccaaacaacttgttaatatctattcgaagcgaatgcagattgaagaaaccttccgagacttgaaaagtcctgcctacggactaggcctacgccatagccgaacgagcagctcagagcgttttgatatcatgctgctaatcgccctgatgcttcaactaacatgttggcttgcgggcgttcatgctcagaaacaaggttgggacaagcacttccaggctaacacagtcagaaatcgaaacctcaaaatttattcacacatggttacgctttggggaaattatgaggggatctctcagtaccaagtgcctcaattcgatcaatcaacgattaaaaatattgagtctgcaaaaggacttgatgtgtgggacagctggccgctgcaaaacgctgacggaacagtagctgaatacaacggctatcacgttgtgtttgctcttgcgggaagcccgaaagacgctgatgacacatcaatctacatgttttatcaaaaggtcggcgacaactcaatcgacagctggaaaaacgcgggccgtgtctttaaagacagcgataagttcgacgccaacgatccgatcctgaaagatcagacgcaagaatggtccggttctgcaacctttacatctgacggaaaaatccgtttattctacactgactattccggtaaacattacggcaaacaaagcctgacaacagcgcaggtaaatgtgtcaaaatctgatgacacactcaaaatcaacggagtggaagatcacaaaacgatttttgacggagacggaaaaacatatcagaacgttcagcagtttatcgatgaaggcaattatacatccggcgacaaccatacgctgagagaccctcactacgttgaagacaaaggccataaataccttgtattcgaagccaacacgggaacagaaaacggataccaaggcgaagaatctttatttaacaaagcgtactacggcggcggcacgaacttcttccgtaaagaaagccagaagcttcagcagagcgctaaaaaacgcgatgctgagttagcgaacggcgccctcggtatcatagagttaaataatgattacacattgaaaaaagtaatgaagccgctgatcacttcaaacacggtaactgatgaaatcgagcgcgcgaatgttttcaaaatgaacggcaaatggtacttgttcactgattcacgcggttcaaaaatgacgatcgatggtattaactcaaacgatatttacatgcttggttatgtatcaaactctttaaccggcccttacaagccgctgaacaaaacagggcttgtgctgcaaatgggtcttgatccaaacgatgtgacattcacttactctcacttcgcagtgccgcaagccaaaggcaacaatgtggttatcacaagctacatgacaaacagaggcttcttcgaggataaaaaggcaacatttgcgccaagcttcttaatgaacatcaaaggcaatagaggaacagaaggaaaacaagggatacaatattttccacataagcctttgggtgttggaagtccacatatcaggtttgactatcttcttgtaagtatattgccttcgatccgtaatcccacgggaaagtttgtggtcaaagacttggcaaaacgcaagaattatgcacctgtagcaatgcttcaatcagccatgacacgcactcacaatcatcgctcatgtgaagagccagtgaaggatatgctattagcctttcccaatgaccgagctgcaactatcaggtctaaagaccatcataaacatttcagggattttgccgatttcggaaccaccatcaaacaggattttcgcctgctggggcaaaccagcgtggaccgcttgctgcaactctctcagggccaggcggtgaagggcaatcagctgttgcccgtctcactggtgaaaagaaaaaccaccctggcgcccaatacgcaaaccgcctctccccgcgcgttggccgattcattaatgcagctggcacgacaggtttcccgactggaaagcgggcaggattttgccgatttcggaaccaccatcaaacaggattttcgcctgctggggcaaaccagcgtggaccgcttgctgcaactctctcagggccaggcgcacgccatagtgactggcgatgctgtcggaatggacgatatcccgcaagaggcccggcagtaccggcataaccaagcctatgcctacagcatccagggtgacggtgccgaggatgacgatgagcgcattgttagatttcatacacgggtcaccgtcgacagcgacacacttgcatcggatgcagcccggttaacgtgccggcacggcctgggtaaccagggaacagctccaatgtatcacggatgggtaccagatcttcatattcatgcagaagacactctcctgcctttctatcttggggaaaaggacgatgtcacttatgcaataaagcccacttgctggccggggcttgacattattccttcctgtctggctctgcaccgtattgaaactgagttaatgggcaaatttgatgaaggtaaactgcccaccgatccacacctgatgctccgactggccattgaaactgttgctcatgactatgatgtcatagttattgacagcgcgcctaacctgggtatcggcacgattaatgtcgtatgtgctgctgatgtgctgattgttcccacgcctgctgagttgtttgactacacctccgcactgcagtttttcgatatgcttcgtgatctgctcaagaacgttgatcttaaagggttcgagcctgatgtacgtattttgcttaccaaatacagcaatagtaatggctctcagtccccgtggatggaggagcaaattcgggatgcctggggaagcatggttctaaaaaatgttgtacgtgaaacggatgaagttggtaaaggtcagatccggatgagaactgtttttgaacaggccattgatcaacgctcttcaactggtgcctggagtaatgctctttctatcttgggaacctgtctgcaatga

SEQ ID NO: 153641 - DNA, 6769 bp, Homo sapiens
atggacaacttcttcgccccggttttcaccatgggcaaatattatacgcaaggcgacaaggtgctgatgccgctggcgattcaggttcatcatgccgtttgtgatggcttccatgtcggcagaatgcttaatgaattacaacagtactgcgatgagtggcagggcggggcggattttgccgatttcggaaccaccatcaaacaggattttcgcctgctggggcaaaccagcgtggaccgcttgctgcaactctctcagggccaggcggtgaagggcaatcagctgttgcccgtctcactgagaaaacagaacacaagtagaccaccatctatgcatgtggatgactttgttgctgctgaaagtaaagaagtggttcctcaagatggaatacctccaccaaaacggccactcaaagtatcacagaagatttcttcccgtgtggaaaatctgaatacattgaacctgccaaaagagctcatgttgtgccaccaccaagaggaaggggcaggggaggatttggacagggtatacgacctcatgatatttttcgtcagagaaaacagaacacaagtagaccaccatctatgcatgtggatgactttgttgctgctgaaagtaaagaagtggttcctcaagatggaatacctccaccaaaacggccactcaaagtatcacagaagatttcttcccgtggtgggttttcaggcaatagaggaggacggggtgctttccacagtcagaataggtttttcacaccacctgcttcaaaaggctttgcagaactttcagcggtataccggcatacagcatgtgcatcgcataggaatggcggaacgtatgtggtgtgaccggaacagagaacgtcacaccgtcagcagcagcggcggcaaccgcctccccaatccagggccaggcggtgaagggcaatcagctgttgcccgtctcactggtgaaaagaaaacccaccctggcgcccaatacgcaaaccgcctctccccgcgcgttggccgattcattaatgcagctggcacgacaggtttcccgactggaaagcgggcagtgagcgcaacgcaattaatggattttgccgatttcggaaccaccatcaaacaggattttcgcctgctggggcaaaccagcgtggaccgcttgctgcaactctctcagggccaggcggtgaagggcaatcagctgttgcccgtctcactggtgaaaagaaaaaccaccctggcgcccaatacgcaaaccgcctctccccgcgcgttggccgattcattaatgcagctggcacgacaggtttcccgactggaaagcgggcaggattttgccgatttcggaaccaccatcaaacaggattttcgcctgctggggcaaaccagcgtggaccgcttgctgcaactctctcagggccaggcggtgaagggcaatcagctgttgcccgtctcactggtgaaaagaaaaaccaccctggcgcccaatacgcaaaccgcctctccccgcgcgttggccgattcattaatgcagctggcacgacaggtttcccgactggaaagcgggcaggattttgccgatttcggaaccaccatcaaacaggattttcgcctgctggggcaaaccagcgtggaccgcttgctgcaactctctcagggccaggcggtgaagggcaatcagctgttgcccgtctcactggtgaaaagaaaaaccaccctggcgcccaatacgcaaaccgcctctccccgcgcgttggccgattcattaatgcagctggcacgacaggtttcccgactggaaagcgggcaggattttgccgatttcggaaccaccatcaaacaggattttcgcctgctggggcaaaccagcgtggaccgcttgctgcaactctctcagggccaggcggtgaagggcaatcagctgttgcccgtctcactggctatcagagatgccgagaaagcagggcgactcccgcacccggatatggaaattcgaggacgggttgagcaacgtgttggttatacaattgaacaaattaatcatatgcgtgatgtgtttggtacgcgattgcgacgtgctgaagacgtatttccaccggtgatcggggttgctgcccataaaggtggcgtttacaaaacctcagtttctgttcatcttgctcaggatctggctctgaaggggctacgtgttttgctcgtggaaggtaacgacccccagggaacagcctcaatgtatcacggatgggtaccagatcttcatattcatgcagaagacactctcctgcctttctatcttggggaaaaggacgatgtcacttatgcaataaagcccacttgctggccggggcttgacattattccttcctgtctggctctgcaccgtattgaaactgagttaatgggcaaatttgatgaaggtaaactgcccaccgatccacacctgatgctccgactggccattgaaactgttgctcatgactatgatgtcatagttattgacagcgcgcctaacctgggtatcggcacgattaatgtcgtatgtgctgctgatgtgctgattgttcccacgcctgctgagttgtttgactacacctccgcactgcagtttttcgatatgcttcgtgatctgctcaagaacgttatcttaaagggttcgagcctgatggattttgccgatttcggaaccacccatcaaacaggattttcgcctgctggggcaaaccagcgtggaccgcttgctgcaactctctcagggccaggcggtgaagggcaatcagctgttgcccgtctcactggtgaaaagaaaaaccaccctggcgcccaatacgcaaaccgcctctccccgcgcgttggccgattcattaatgcagctggcacgacaggtttcccgactggaaagcgggcaggattttgccgatttcggaaccaccatcaaacaggattttcgcctgctggggcaaaccagcgtggaccgcttgctgcaactctctcagggccaggcggtgaagggcaatcagctgttgcccgtctcactggtgaaaagaaaaaccaccctggcgcccaatacgcaaaccgcctctccccgcgcgttggccgattcattaatgcagctggcacgacaggtttcccgactggaaagcgggcaggattttgccgatttcggaaccaccatcaaacaggattttcgcctgctggggcaaaccagcgtggaccgcttgctgcaactctctcagggccaggcggtgaagggcaatcagctgttgcccgtctcactggtgaaaagaaaaaccaccctggcgcccaatacgcaaaccgcctctccccgcgcgttggccgattcattaatgcagctggcacgacaggtttcccgactggaaagcgggcaggattttgccgatttcggaaccaccatcaaacaggattttcgcctgctggggcaaaccagcgtggaccgcttgctgcaactctctcagggccaggcggtgaagggcaatcagctgttgcccgtctcactggcttgcaaaacaacatttcaagcctgttctccatatctgaaactaaaggaggaatacagcttccagagtgaagaagatcaaaggaacactaagctctaccagcagctggtgagaaacagctatgaccatgattacgaattcgagctcggtacccatatggacaacttcttcgcccccgttttcaccatgggcaaatattatacgcaaggcgacaaggtgctgatgccgctggcgattcaggttcatcatgccgtttgtgatggcttccatgtcggcagaatgcttaatgaattacaacagtactgcgatgagtggcagggcggggcggattttgccgatttcggaaccaccatcaaacaggattttcgcctgctggggcaaaccagcgtggaccgcttgctgcaactctctcagggccaggcggtgaagggcaatcagctgttgcccgtctcactggtgaaaagaaaaaccaccctggcgcccaatacgcaaaccgcctctccccgcgcgttggccgattcattaatgcagctggcacgacaggtttcccgactggaaagcgggcaggattttgccgatttcggaaccaccatcaaacaggattttcgcctgctggggcaaaccagcgtggaccgcttgctgcaactctctcagggccaggcggtgaagggcaatcagctgttgcccgtctcactggtgaaaagaaaaaccaccctggcgcccaatacgcaaaccgcctctccccgcgcgttggccgattcattaatgcagctggcacgacaggtttcccgactggaaagcgggcaggattttgccgatttcggaaccaccatcaaacaggattttcgcctgctggggcaaaccagcgtggaccgcttgctgcaactctctcagggccaggcggtgaagggcaatcagctgttgcccgtctcactggtgaaaagaaaaaccaccctggcgcccaatacgcaaaccgcctctccccgcgcgttggccgattcattaatgcagctggcacgacaggtttcccgactggaaagcgggcaggattttgccgatttcggaaccaccatcaaacaggattttcgcctgctggggcaaaccagcgtggaccgcttgctgcaactctctcagggccaggcggtgaagggcaatcagctgttgcccgtctcactgggattttgccgatttcggaaccaccccatcaaacaggattttcgcctgctggggcaaaccagcgtggaccgcttgctgcaactctctcagggccaggcggtgaagggcaatcagctgttgcccgtctcactgggattttgccgatttcggaacccacccatcaaacaggattttcgcctgctggggcaaaccagcgtggaccgcttgctgcaactcttctcagggccaggcggtgaagggcaatcagctgttgcccgtctcactggtgaaaagaaaaaccaccctggcgcccaatacgcaaaccgcctctccccgcgcgttggccgattcattaatgcagctggcacgacaggtttcccgactggaaagcgggcagtgagcgcaacgcaattaatggattttgccgatttcggaaccaccatcaaacaggattttcgcctgctggggcaaaccagcgtggaccgcttgctgcaactctctcagggccaggcggtgaagggcaatcagctgttgcccgtctcactggtgaaaagaaaaaccaccctggcgcccaatacgcaaaccgcctctccccgcgcgttggccgattcattaatgcagctggcacgacaggtttcccgactggaaagcgggcaggattttgccgatttcggaaccaccatcaaacaggattttcgcctgctggggcaaaccagcgtggaccgcttgctgcaactctctcagggccaggcggtgaagggcaatcagctgttgcccgtctcactggtgaaaagaaaaaccaccctggcgcccaatacgcaaaccgcctctccccgcgcgttggccgattcattaatgcagctggcacgacaggtttcccgactggaaagcgggcaggattttgccgatttcggaaccaccatcaaacaggattttcgcctgctggggcaaaccagcgtggaccgcttgctgcaactctctcagggccaggcggtgaagggcaatcagctgttgcccgtctcactggaacatgacggtatctgcgagatccatgttgctaaatatgctgaaatattcggattgacctctgcggaagccagtaaggatatacggcaggcattgaagagtttcgcggggaaggaagtggttttttatcgccctgaagaggatgccggcgatgaaaaaggctatgaatcttttccttggtttatcaaacgtgcgcacagtccatccagagggctttacagtgtacatatcaacccatatctcattcccttctttatcgggttacagaaccggtttacgcagtttcggcttagtgaaacaaaagaaatcaccaatccgtatgccatgcgtttatacgaatccctgtgtcagtatcgtaagccggatggctcaggcatcgtctctctgaaaatcgactggatcatagagcgttaccagctgcctcaaagttaccagcgtatgcctgacttccgccgccgcttcctgcaggtctgtgttaatgagatcaacagcagaactccaatgcgcctctcatacattgagaaaaagaaaggccgccagacgactcatatctgcaagttagtagaggccaataatccacaggcaatttctcaacaagacctggtacacatggctattcagattgcctgtggaatgagctacctggccagaacggaagtcatccacaaagacctggctgctaggaactgtatcactgatgacacacttcaagttaagatcacagacaatgccgtctcatggactatcactgtctggaagacaatgaaaacaggccagtttgttggatggctcttgaaagtctggttaataacgagttttctagcactagtgatgtgtggggcctttggagtgatgctgtgggaactcatgactctgggccagacgccctacatggacactgaccccttcgagatggccgcatacctgaaagatggttaccgaatagcccagccaatcaactgtcctgatgaaccatttgctgtgatggcctgttgctgggccttagatccgggggagaggcccaagtttcagcagctggtacagtgtctcacagtttcatgcagcctgggggcctacgtctga

SEQ ID NO: 153642 - DNA, 21527 bp, Homo sapiens
  misc_feature (1)...(21527): n = a,t,c or g
ttttttttttttttttttttgtttgcaattaatctagtcccagcacttttatttgtagagttctcaaatcaaaagtaacaaataattatacatcaggattgttaggaataccaattattttacaactgccactacgtgtttcttcttctctgacacaagtggcacagatccaggcttgctgtgtttaatacgattcacttcctttcgtcgacgagcttctttcatgatgcgctgttcctgaatctggctatagatagattttggtagatgtcgatgacgagctatacgttttatatgaggataatgctgaaatttctccttcaatttctggttataatccttggctgctttttctcgtgatgtaagcacacccaatttttcagaagcattagctttccacaggcgaatgttcatttcatcagatccacacataatactgatgaatcccctaatgatttttatcaaaatcattaagttaaggtagatacacatcttgtcatatgatcaaatggtttcgccaaaaatcaataatcagacaacaaaatgtgcgaactcgatattttacacgactctctttaccaattctgccccgaattacacttaaaacgactcaacagcttaacgttggcttgccacgccttacttgactgtaaaactctcactcttaccgaacttggccgtaacctgccaaccaaagcgagaacaaaacataacatcaaacgaatcgaccgattgttaggtaatcgtcacctccacaaagagcgactcgctgtataccgttggcatgctagctttatctgttcgggcaatacgatgcccattgtacttgttgactggtctgatatccgtgagcaaaaacggcttatggtattgcgagcttcagtcgcactacacggtcgttctgttactctttatgagaaagcgttcccgctttcagagcaatgttcaaagaaagctcatgaccaatttctagccgaccttgcgagcattctaccgagtaacaccacaccgctcattgtcagtgatgctggctttaaagtgccatggtataaatccgttgagaagctgggttggtactggttaagtcgagtaagaggaaaagtacaatatgcagacctaggagcggaaaactggaaacctatcagcaacttacatgatatgtcatctagtcactcaaagactttaggctataagaggctgactaaaagcaatccaatctcatgccaaattctattgtataaatctcgctctaaaggccgaaaaaatcagcgctcgacacggactcattgtcaccacccgtcacctaaaatctactcagcgtcggcaaaggagccatggattctagcaactaacttacctgttgaaattcgaacacccaaacaacttgttaatatctattcgaagcgaatgcagattgaagaaaccttccgagacttgaaaagtcctgcctacggactaggcctacgccatagccgaacgagcagctcagagcgttttgatatcatgctgctaatcgccctgatgcttcaactaacatgttggcttgcgggcgttcatgctcagaaacaaggttgggacaagcacttccaggctaacacagtcagaaatcgaaacctcaaaatttattcacacatggttacgctttggggaaattatgaggggatctctcagactcaagccttcgcgaaagaaaataaccaaaaagcatacaaagaaacgtacggcgtctctcatattacacgccatgatatgctgcagatccctaaacagcagcaaaacgaaaaataccaagtgcctcaattcgatcaatcaacgattaaaaatattgagtctgcaaaaggacttgatgtgtgggacagctggccgctgcaaaacgctgacggaacagtagctgaatacaacggctatcacgttgtgtttgctcttgcgggaagcccgaaagacgctgatgacacatcaatctacatgttttatcaaaaggtcggcgacaactcaatcgacagctggaaaaacgcgggccgtgtctttaaagacagcgataagttcgacgccaacgatccgatcctgaaagatcagacgcaagaatggtccggttctgcaacctttacatctgacggaaaaatccgtttattctacactgactattccggtaaacattacggcaaacaaagcctgacaacagcgcaacacacagtaaatgccagaggactgcaaagtaaggatatgaaatcttacaaccagcctccctacgtactgtggtcctccagctggagccacacgggaacagaaaacggataccaaggcgaagaatctttatttaacaaagcgtactacggcggcggcacgaacttcttccgtaaagaaagccagaagcttcagcagagcgctaaaaaacgcgatgctgagttagcgaacggcgccctcggtatcatagagttaaataatgattacacattgaaaaaagtaatgaagccgctgatcacttcaaacacggtaactgatgaaatcgagcgcgcgaatgttttcaaaatgaacggcaaatggtacttgttcactgattcacgcggttcaaaaatgacgatcgatggtattaactcaaacgatatttacatgcttggttatgtatcaaactctttaaccggcccttacaagccgctgaacaaaacaaggcttgtgctgcaaatgggtcttgatccaaacgatgtgacattcacttactctcacttcgcagtgccgcaagccaaaggcaacaatggggnagaatccccattgcgacgtgctgaagacgtatttccaccggtgatcggggttgctgcccataaaggtggcgtttacaaaacctcagtttctgttcatcttgctcaggatctggctctgaaggggctacgtgttttgctcgtggaaggtaacgacccccagggaacagcctcaatgtatcacggatgggtaccagatcttcatattcatgcagaagacactctcctgcctttctatcttggggaaaaggacgatgtcacttatgcaataaagcccacttgctggccggggcttgacattattccttcctgtctggctctgcaccgtattgaaactgagttaatgggcaaatttgatgaaggtaaactgcccaccgatccacacctgatgctccgactggccattgaaactgttgctcatgactatgatgtcatagttattgacagcgcgcctaacctgggtatcggcacgattaatgtcgtatgtgctgctgatgtgctgattgttcccacgcctgctgagttgtttgactacacctccgcactgcagtttttcagatatgcttctgtgatctgctcaagaacgtgggggatctatagagccgcacggcaggtttcaacccagacgtggggtatagagcaaccaaaattgagaaaaggcatgtatgaagaagttcagaatactacagaaacacagtttggatatttggctcaggattttcatccttttaatcagagagaccggcagcattttacctctgccatagagatgtgtggctctttacacttgagagagatggaagaaatttctacgcagcaaagcattgaagagatgacttgggtgctgttaagagcattcagttttcaaagggacacagagcataagagtttgaaaaatttgcagcctgacaacaattctatagaaaagaaaatcccattttctgaggagaaattccagccagctcctgaaatttgtgtgagtaacaagaagccaaatgtgaatcgcatagacaatgaggaaaatttctatagggcatatcagaggtcttcccggcagcccctcccatcacaggcttggaggcataggaggaaaaagtggttttgtgggctgggcatagggttcccaagctgtgcgcagcatatggactcggtgccttgcatcccagttactctagccgtggctgaaaaaggccaatgtcagctcgggccctggcttcagagcgtgcaacccataaggcttggcagcttccatggggtgttgagcctgcaggagtttgagcagcagggcactgaaaaaacaccggcgttcggtcgaagagtatctggtgtcatagaaattgccgatgggagtcgccgtcgtaaagctgctgcactcaccgaaagtgattatcgtgttctggttggcgagctggatgatgagcagatggctgcattatccagattgggtagcgattatcgcccaacaagtgcatatgaacgtggtcagcgatacgcaagccgattgcagaatgaatttgctggaaatatttctgcgctggctgatgcggaaaatatttcacgtaagattattacccgctgtatcaacaccgccaaattgcctaaatcagttgttgctcttttttctcaccccggtgaactatctgcccggtcaggtgatgcacttcaaaaagcctttacagataaagaggaattacttaagcagcaggcatctaaccttcatgagcagaaaaaagctggggtgatatttgaagctgaagaagttatcactcttttaacttctgtgcttaaaggggatctactagagccgaacggcngatcagcggtcggggaccgcggtcccacttgtattgtcgatcagactatcagcgtgagactgcgattccatcaatgcctgtcaagggcaaaccgtgtatttttaccagagcttggtgcacacagagagttttattacaaaggatacatctttagtcaggaaagcaaagatcatatatactgccagagactcaagccccttctttacaagaacttgcaaatcctcagttttgtcgtgcacctccgaagcagagcagacaaaggccataaataccttgtattcgaagccaacacgggcacagaaaacgtataccaaggcgaagtatctttatttaacaaagcgtactacggcggcggcacgaacttcttctgtaaagaaagccagaagcttcagcagagcgctaaaaaacgcgatgctgagttagcgaacggcgccctcggtatcatagagttaaataatgattacacattgaaaaaagtaatgaagccgctgatcacttcaaacacggtaactgatgaaatcgagcgcgcgaatgttttcaaaatgaacggcaaaatggtacttgttcactgaattcccgcggttcaaaaatgacgatcgatggtattaactcaaacgatatttacatgcttggttatgtatcaaactctttaaccggcccttacaagccgctgaacaaaacagggcttgtgctgcaaatgggtcttgatccaaacgatgtgacattcacttactctcacttcgcagtgccgcaagccaaaggcaacaatgtggttatcacaagctacatgacaaacagaggcttcttcgaggataaaaaggcaacatttgcgccaagcttcttaatgaacatcaaaggcaataaaacatccgttgtcaaaaacagcatcctggagcaaggacagctgacatggctccaagtagcgaagcgagcaggactgggcggcggccaaagcggtcggacagtgctccgagaacgggtgcgcatagaaattgcatcaacgcatatagcgctagcagcacgccatagtgactggcgaagctggattttgccgattttcggaaccaccatcaaacaggattttcgcctgctggggcaaaccagcgtggaccgcttgctgcaactctctcagggccaggcggtgaagggcaatcagctgttgcccgtctcactggtgaaaagaaaaaccaccctggcgcccaatacgcaaaccgcctctccccgcgcgttggccgattcattaatgcagctggcacgacaggtttcccgactggaaagcgggcagagaattatccccgatttcgaaaccaccatcaaccaggattttcgcctgatggggcaaaacagcgggacccgcttatgcaactctctcagggccaggcgtggaattgtgagcggatatcaatttcacacaggaaacagctatgaccatgattacgaattcgagctcggtaccctgatcagaaaagtaaaaattgaacagagtggagcaacccatggggacagcaaggggattaggacaatggccatcctcaaaaaaaaaaacggaaaaactgagccccagccccaaatgaaaaaggggacgaaaaaatgggtagaatatccggctcctcccatgaagggattttgccgatttcggaaccaccatcaaacaggattttcgcctgctggggcaaaccagcgtggaccgcttgctgcaactctctcagggccaggcggtgaagggcaatcagctgttgcccgtctcactggtgaaaagaaaaaccaccctggcgcccaatacgcaaaccgcctctccccgcgcgttggccgattcattaatgcagctggcacgacaggtttcccgactggaaagcgggcagtgagcgcaacgcaattaatcaggaaggcccaagacattgagcatgaagtcagcagagctgttgtgaagagcaaccagatggggaaggaggatgaggagtgtgggggcaagcaggccggcctgagggaatgccacgtgttggacgctggaggtcccatggcccacagcaggaaggcccaagacattgagcatgaagtcagcagagctgttgtgaagagcaaccagatggggaaggaggatgaggagtgtgggggcaagcaggccggcctgagggaatgccacgtgttggacgctggagcaccagttcccatcttccctgccacacctgcaattctgtacaccagaacacaggcatcagaatcacctagagtggctggtaaaaatgaaggctcttatgccccacccctaattcagtggattataaggaattttgccgatttcggaaccaccatcaaacaggattttcgcctgctggggcaaaccagcgtggaccgcttgctgcaactctctcagggccaggcggtgaagggcaatcagctgttgcccgtctcactggtgaaaagaaaaaccaccctggcgcccaatacgcaaaccgcctctccccgcgcgttggccgattcattaatgcagctggcacgacaggtttcccgactggaaagcggccagtgagcgcaacgcaattaatggattttgccgatttcggaaccaccatcaaacaggattttcgcctgctggggcaaaccagcgtggaccgcttgctgcaactctctcagggccaggcggtgaagggcaatcagctgttgcccgtctcactggtgaaaagaaaaaccaccctggcgcccaatacgcaaaccgcctctccccgcgcgttggccgattcattaatgcagctgggcacgacaggtttcccgactggaaagcgggcagtgagcgcaacgcaattaatggattttgccgatttcggaaccaccatcaaacaggattttcgcctgctggggcaaaccagcgtggaccgcttgctgcaactctctcagggccaggcggtgaagggcaatcagctgttgcccgtctcactggtgaaaagaaaaaccaccctggcgcccaatacgcaaaccgcctctccccgcgcgttggccgattcattaatgcagctggcacgacaggtttcccgactggaaagcgggcaggattttgccgatttcggaaccaccatcaaacaggattttcgcctgctggggcaaaccagcgtggaccgcttgctgcaactctctcagggccaggcggcatcccgaattttgttcctccatccacggggattgagagccattactattgctgtatttggtaagcaaaatacgtacatcaggctcgaaccttttaagatcaacgttcttgagcagatcacgaagcatatcgaaaaactgcagtgcggaggtgtagtcaaacaactcagcaggcgtgggaacaatcagcacatcagcagcacatacgacattaatcgtgccgatacccaggttaggcgcgctgtcaataactatgacatcatagtcatgagcaacagtttcaatggccagtcggagcatcaggtgtggatcgatagaaaggcaggagagtgtcttctgcatgaatatgaagatatagtacccatccgtgatacattgaggctgttccctgggggtcgttaccttccacgagcaaaacacgtagccccttcagagccagatcctgagcaagatgaacagaaactgaggttttgtaaacgccacctttatgggcagcaaccccgatcaccggtggaaatacgtcttcagcacgtcgcaatcgcgtaccaaacagggggatcctctagaggattttgccgatttcggacccaccatcaaacaggattttcgcctgctggggcaaaccagcgtggaccgcttgctgcaactctctcagggccaggcggtgaagggcaatcagctgttgcccgtctcactggtgaaaagaaaaaccaccctggcgcccaatacgcaaaccgccctctccccgcgcgttggccgattcattaatgcagctggcacgacaggtttcccgactggaaagcgggcagtgagcgcaacgcaattaatggattttgccgatttcggaaccaccatcaaacaggattttcgcctgctggggcaaaccagcgtggaccgcttgctgcaactctctcagggccaggcggtgaagggcaatcagctgttgcccgtctcactggtgaaaagaaaaaccaccctggcgcccaatacgcaaaccgcctctccccgcgcgttggccgattcattaatgcagctggcacgacaggtttcccgactggaaagcgggcaacggtttttcgcccttgacgttgggagtccacgttctttaatagtggattcttgttccaaactggaacaacactcaaccctatctggggctattcttttgatttataagggattttgccgatttcggaaccaccatcaaacaggattttcgcctgctggggcaaaccagcgtggaccgcttgctgcaactctctcagggccaggcggtgaagggcaatcagctgttgcccgtctcactggtgaaaagaaaaaccaccctggcgcccaatacgcaaaccgcctctccccgcgcgttggccgattcattaatgcagctggcacgacaggtttcccgactggaaagcgggcagtgagcgcaacgcaattaatggattttgccgatttcggaaccaccatcaaacaggattttcgcctgctggggcaaaccagcgtggaccgcttgctgcaactctctcagggccaggcggatttgtcgcctgctggcgcccaaacccagcgtggcccggcttttgccaactctctcaggggccagccgggattttgcccgatttcggaaccacctatcaaacaggattttcgcctgctggggcaaatccagcgtggaccgcttgctgcaactctctcagggccaggcggtgaagggcaatcagctgttgcccgtctcactggtgaaaagaaaaaccaccctggcgcccaatacgcaaaccgcctctccccgcgcgttggccgattcattaatgcagctggcacgacaggtttcccgactggaaagcgggcagtgagcgcaacgcaattaatggattttgccgatttcggaaccaccatcaaacaggattttcgcctgctggggcaaaccagcgtggaccgcttgctgcaactctctcagggccaggcggtgaagggcaatcagctgttgcccgtctcactggtgaaaagaaaaaccaccctggcgcccaatacgcaaaccgcctctccccgcgcgttggccgattcattaatgcagctggcacgacaggtttcccgactggaaagcgggcaggattttgccgatttcgggaccccccatcaaacaggattttcgcctgctggggcaaaccagcgtggaccgcttgctgcaactctctcagggccaggcggtgaagggcaatcagctgttgcccgtctcactggtgaaaagaaaaaccaccctggcgcccaatacgcaaaccgcctctccccgcgcgttggccgattcattaatgcagctggcacgacaggtttcccgactggaaagcgggcagtgagcgcaacgcaattaatggattttgccgatttcggaaccaccatcaaacaggattttcgccctgctggggcaaaccagcgtggaccgcacgctgcaactctctcagggccaggcggtgaagggcaatcagctgttgaccgtctcactggtgaaaagaaaaaccaccctggcgcccaatacgcaaaccgcctctcgccgcgcgttggccgattcattaatgcagctggcacgacaggtttcccgactggaaagcgggcaggattttgccgatttcggaaccaccatcaaacaggattttcgcctgctggggcaaaccagcgtggaccgcttgctgcaactctctcagggccaggcggtgaagggcaatcagctgttgcccgtctcactggtgaaaagaaaaaccaccctggcgcccaatacgcaaaccgcctctccccgcgcgttggccgattcattaatgcagctggcacgacaggtttcccgactggaaagcgggcaggattttgccgatttcggaaccaccatcaaacaggattttcgcctgctggggcaaatccagcgtggaccgcttgctgcaactcacacagggccaggcggtgaagggcaatcagctgttgcccgtctcactggtgaaaagaaaaaccaccctggcgcccaatacgcaaaccgcctctccccgcgcgttggccgattcattaatgcagctggcacgacaggtttcccgactggaaagcgggcacatgtccctgcatttaggcaatgaagtgtttgatgtgtacaaagccccgctgctgggcaattacatccacctgtttataagagaagacactggtctacagggacaagccgtctttaaatccaaacttacctttaggcttggcgtcatccaacagtgggatagaggtaagtttgccaaggctggcattccagttgtacgcccgaacggcccagaattcaaaaggagtacctgtggtgcaccaagcagacattatacttcaaagctacttcccctcaacgtgattctggatgtcgcttgggcccccaccaacctcatccacaccaagtacccacagctcttgtcggggatgagaccatgattggggtccacaagctacacaagatgatggccaatgggatcctgaaagtgcctgccatcaatgtcaacaactccgtcaccaagagcaagtttgacaacctctccggctgccaggagtccctcatagatagcatcaagtgggccacagacgtgatgattgccagcaaggattttcgcctgctggggcaaaccagcgtggaccgcttgctgcaactctctcagggccaggcggtgaaggggcaatcagctgttgcccgtctcactggtgaaaagaaaaaccaccctggcgcccaatacgcaaaccgcctctccccgcgcgttggccgattcattaatgcagctggcacgacaggtttcccgactggaaagcgggcacagagcaaacaactggaaactgttttggatgatcttgaccccgagctcgccaaaggaccaagtttgagttcactttcgggattttgccgatttcggaaccaccatcaaacaggattttcgcctgctggggcaaaccagcgtggaccgcttgctgcaactctctcagggccaggcggtgaagggcaatcagctgttgcccgtctcactggtgaaaagaaaaaccaccctggcgcccaatacgcaaaccgcctctccccgcgcgttggccgattcattaatgcagctggcacgacaggtttcccgactggaaagcgggcaggattttgccgatttcggaaccaccatcaaacaggattttcgcctgctggggcaaaccagcgtggaccgcttgctgcaactctctcagggccaggcggtgaagggcaatcagctgttgcccgtctcactggtgaaaagaaaaaccaccctggcgcccaatacgcaaaccgcctctccccgcgcgttggccgattcattaatgcagctggcacgacaggtttcccgactggaaagcgggcaggattttgccgatttcggaaccaccatcaaacaggattttcgcctgctggggcaaaccagcgtggaccgcttgctgcaactctctcagggccaggcggtgaagggcaatcagctgttgcccgtctcactggtgaaaagaaaaaccaccctggcgcccaatacgcaaaccgcctctccccgcgcgttggccgattcattaatgcagctggcacgacaggtttcccgactggaaagcgggcaggattttgccgatttcggaaccaccatcaaacaggattttcgcctgctggggcaaaccagcgtggaccgcttgctgcaactctctcagggccaggcggtgaagggcaatcagctgttgcccgtctcactggtgaaaagaaaaaccaccctggcgcccaatacgcaaaccgcctctccccgcgcgttggccgattcattaatgcagctggcacgacaggtttcccgactggaaagcgggcaggattttgccgatttcggaaccaccatcaaacaggattttcgcctgctggggcaaaccagcgtggaccgcttgctgcaactctctcagggccaggcggtgaagggcaatcagctgttgcccgtctcactggtgaaaagaaaaaccaccctggcgcccaatacgcaaaccgcctctccccgcgcgttggccgattcattaatgcagctggcacgacaggtttcccgactggaaagcgggcaggattttgccgatttcggaaccaccatcaaacaggattttcgcctgctggggcaaaccagcgtggaccgcttgctgcaactctctcagggccaggcggtgaagggcaatcagctgttgtcccgtctcactggtgaaaagaaaaatcaccctggcgcccaatacgcaaaccgcctctccccgcgcgatacccgattcattaatgcagctgacacgacagatttcccgactggaaagcggacagtgagcgcaccgcaattaatggattttgccgatttcggaaccaccatcaaacaggattttcgcctgctggggcaaaccagcgtggaccgcttgctgcaactctctcagggccaggcggtgaagggcaatcagctgttgcccgtctcactggtgaaaagaaaaaccaccctggcgcccaatacgcaaaccgcctctccccgcgcgttggccgattcattaatgcagctggcacgacaggtttcccgactggaaagcgggcaggattttgccgatttcggaaccaccatcaaacaggattttcgcctgctggggcaaaccagcgtggaccgcttgctgcaactctctcagggccaggcggtgaagggcaatcagctgttgcccgtctcactggtgaaaagaaaaaccaccctggcgcccaatacgcaaaccgcctctccccgcgcgttggccgattcattaatgcagctggcacgacaggtttcccgactggaaagcgggcaggattttgccgatttcggaaccaccatcaaccaggattttcgcctgctggtgcaaaccagcatggaccgcttactgcaactctctcaggtccaggcgctgaagggcaatcagctgttgcccgtctcactgggagccttccctgatttcccacactctggcccctcacctggttttgagctcatgaggcaggaagagctgacccatctggccctcccttgtcacgtgtcaggcatgaagaagccactggttctaggcatttctgggaagccccagggactgcaagtggccattaccatctctaaggagagctctgattgcagggattttgccgatttcggaaccaccatcaaacaggatttacgcctgctggggcaaaccagcgtggaccgcttgctgcaactctctcagggccaggcggtgaagggcaatcagctgttgcccgtctcactggtgaaaagaaaaaccaccctggcgcccaatacgcaaaccgcctctccccgcgcgttggccgattcattaatgcagctggcacgacaggtttcccgactggaaagcgggcaggattttgccgatttcggaaccaccatcaaacaggattttcgcctgctggggcaaatccagcgtggaccgcttgctgcaactctctcagggccaggcggtgaagggcaatcagctgttgcccgtctcactggtgaaaagaaaaaccaccctggcgcccaatacgcaaaccgcctctccccgcgcgttggccgattcattaatgcagctggcacgacaggtttcccgactggaaagcgggcagtgagcgcaacgcaattaatggattttgccgatttcggaaccaccatcaaacaggattttcgcctgctggggcaaaccagcgtggaccgcttgctgcaactctctcagggccaggcggtgaagggcaatcagctgttgcccgtctcactggtgaaaagaaaaaccaccctggcgcccaatacgcaaaccgcctctccccgcgcgttggccgattcattaatgcagctggcacgacaggtttcccgactggaaagcgggcaggattttgccgatttcggaaccaccatcaaacaggattttcgcctgctggggcaaaccagcgtggaccgcttgctgcaactctctcagggccaggcggtgaagggcaatcagctgttgcccgtctcactggtgaaaagaaaaaccaccctggcgcccaatacgcaaaccgcctctccccgcgcgttggccgattcattaatgcagctggcacgacaggtttcccgactggaaagcgggcaggattttgccgatttcggaaccaccatcaaacaggattttcgcctgctggggcaaaccagcgtggaccgcttgctgcaactctctcagggccaggcggtgaagggcaatcagctgttgcccgtctcactggtgaaaagaaaaaccaccctggcgcccaatacgcaaaccgcctctccccgcgcgttggccgattcattaatgcagctggcacgacaggtttcccgactggaaagcgggcaaggactgcccgctaaagctggggtgcaccagaaggtggccgtgcagggccattcgcttcagctgctatcccagctgtgttgctcatggcatggaagcagctttaaaagcattttgggacaatctggtcatccaaggaaacaaaagccttcaaagtaaggattttgccgatttcggaaccaccatcaaacaggattttcgcctgctggggcaaaccagcgtggaccgcttgctgcaactctctcagggccaggcggtgaagggcaatcagctgttgcccgtctcactggtgaaaagaaaaaccaccctggcgcccaatacgcaaaccgcctctccccgcgcgttggccgattcattaatgcagctggcacgacaggtttcccgactggaaagcgggcaggattttgccgatttcggaaccaccatcaaacaggattttcgcctgctggggcaaaccagcgtggaccgcttgctgcaactctctcagggccaggcggtgaagggcaatcagctgttgcccgtctcactggtgaaaagaaaaaccaccctggcgcccaatacgcaaaccgcctctccccgcgcgttggccgattcattaatgcagctggcacgacaggtttcccgactggaaagcgggcaggattttgccgatttcggaaccaccatcaaacaggattttcgcctgctggggcaaaccagcgtggaccgcttgctgcaactctctcagggccaggcggtgaagggcaatcagctgttgcccgtctcactggtgaaaagaaaaaccaccctggcgcccaatacgcaaaccgcctctccccgcgcgttggccgattcattaatgcagctggcacgacaggtttcccgactggaaagcgggcaggattttgccgatttcggaaccaccatcaaacaggattttcgcctgctggggcaaaccagcgtggaccgcttgctgcaactctctcagggccaggcggtgaagggcaatcagctgttgcccgtctcactggtgaaaagaaaaaccaccctggcgcccaatacgcaaaccgcctctccccgcgcgttggccgattcattaatgcagctggcacgacaggtttcccgactggaaagcgggcaggattttgccgatttcggaaccaccatcaaacaggattttcgcctgctggggcaaaccagcgtggaccgcttgctgcaactctctcagggccaggcggtgaagggcaatcagctgttgcccgtctcactggtgaaaagaaaaaccaccctggcgcccaatacgcaaaccgcctctccccgcgcgttggccgattcattaatgcagctggcacgacaggtttcccgactggaaagcgggcaggattttgccgatttcggaaccaccatcaaacaggattttcgcctgctggggcaaaccagcgtggaccgcttgctgcaactctctcagggccaggcggtgaagggcaatcagctgttgcccgtctcactggtgaaaagaaaaaccaccctggcgcccaatacgcaaaccgcctctccccgcgcgttggccgattcattaatgcagctggcacgacaggtttcccgactggaaagcgggcaggattttgccgatttcggaaccaccatcaaacaggattttcgcctgctggggcaaaccagcgtggaccgcttgctgcaactctctcagggccaggcggtgaagggcaatcagctgttgcccgtctcactggtgaaaagaaaaaccaccctggcgcccaatacgcaaaccgcctctccccgcgcgttggccgattcattaatgcagctggcacgacaggtttcccgactggaaagcgggcaggattttgccgatttcggaaccaccatcaaacaggattttcgcctgctggggcaaaccagcgtggaccgcttgctgcaactctctcagggccaggcggtgaagggcaatcagctgttgcccgtctcactggtgaaaagaaaaaccaccctggcgcccaatacgcaaaccgcctctccccgcgcgttggccgattcattaatgcagctggcacgacaggtttcccgactggaaagcgggcaggattttgccgatttcggaaccaccatcaaacaggattttcgcctgctggggcaaaccagcgtggaccgcttgctgcaactctctcagggccaggcggtgaagggcaatcagctgttgcccgtctcactggtgaaaagaaaaaccaccctggcgcccaatacgcaaaccgcctctccccgcgcgttggccgattcattaatgcagctggcacgacaggtttcccgactggaaagcgggcaggattttgccgatttcggaaccaccatcaaacaggattttcgcctgctggggcaaaccagcgtggaccgctttctgcaactctctcagggccagccggtgaagggcaatcagctgttgcccgtctcactggtgaaaagaaaaaccaccctggcgcccaatacgcaaaccgcctctctccgcgcgttggccgattcattaatgcagctggcacgacaggtttcccgactggaaagcgggcaggattttgccgatttcggaaccaccatcaaacaggattttcgcctgctggggcaaaccagcgtggaccgcttgctgcaactctctcagggccaggcggtgaagggcaatcagctgttgcccgtctcactggtgaaaagaaaaaccaccctggcgcccaatacgcaaaccgcctctccccgcgcgttggccgattcattaatgcagctggcacgacaggtttcccgactggaaagcgggcaggattttgccgatttcggaaccaccatcaaacaggattttcgcctgctggggcaaaccagcgtggaccgcttgctgcaactctctcagggccaggcggtgaagggcaatcagctgttgcccgtctcactggtgaaaagaaaaaccaccctggcgcccaatacgcaaaccgcctctccccgcgcgttggccgattcattaatgcagctggcacgacaggtttcccgactggaaagcgggcaggattttgccgatttcggaaccaccatcaaacaggattttcgcctgctggggcaaaccagcgtggaccgcttgctgcaactctctcagggccaggcggtgaagggcaatcagctgttgcccgtctcactggtgaaaagaaaaaccaccctggcgcccaatacgcaaaccgcctctccccgcgcgttggccgattcattaatgcagctggcacgacaggtttcccgactggaaagcgggcaggattttgccgatttcggaaccaccatcaaacaggattttcgcctgctggggcaaaccagcgtggaccgcttgctgcaactctctcagggccaggcggtgaagggcaatcagctgttgcccgtctcactggtgaaaagaaaaaccaccctggcgcccaatacgcaaaccgcctctccccgcgcgttggccgattcattaatgcagctggcacgacaggtttcccgactggaaagcgggcaggattttgccgatttcggaaccaccatcaaacaggattttcgcctgctggggcaaaccagcgtggaccgcttgctgcaactctctcagggccaggcggtgaagggcaatcagctgttgcccgtctcactggtgaaaagaaaaaccaccctggcgcccaatacgcaaaccgcctctccccgcgcgttggccgattcattaatgcagctggcacgacaggtttcccgactggaaagcgggcaggattttgccgatttcggaaccaccatcaaacaggattttcgcctgctggggcaaaccagcgtggaccgcttgctgcaactctctcagggccaggcggtgaagggcaatcagctgttgcccgtctcactggtgaaaagaaaaaccaccctggcgcccaatacgcaaaccgcctctccccgcgcgttggccgattcattaatgcagctggcacgacaggtttcccgactggaaagcgggcaggattttgccgatttcggaaccaccatcaaacaggattttcgcctgctggggcaaaccagcgtggaccgcttgctgcaactctctcagggccaggcggtgaagggcaatcagctgttgcccgtctcactggtgaaaagaaaaaccaccctggcgcccaatacgcaaaccgcctctccccgcgcgttggccgattcattaatgcagctggcacgacaggtttcccgactggaaagcgggcaggattttgccgatttcggaaccaccatcaaacaggattttcgcctgctggggcaaaccagcgtggaccgcttgctgcaactctctcagggccaggcggtgaagggcaatcagctgttgcccgtctcactgaaaccatttctttctgccaccaaaactaggttgcatccaaaagtttttcacaagcttaaaaaagaaaaacgaaaaattgacaagtattacacagaagagcccacaaaagcttcagcaacaccaagggcgaagaagcagcgtcagatccagtcaattcgggaggatcgaaacggcagatcgcaaaaaacagtacatacagaaggagacatgaacatgaacatcaaaaaaattgtaaaacaagccacagttctgacttttacgactgcacttctggcaggaggagcgactcaagccttcgcgaaagaaaataaccaaaaagcatacaaagaaacgtacggcgtctctcatattacacgccatgatatgctgcagatccctaaacagcagcaaaacgaaaaataccaagtgcctcaattcgatcaatcaacgattaaaaatattgagtctgcaaaaggacttgatgtgtgggacagctggccgctgcaaaacgctgacggaacagtagctgaatacaacggctatcacgttgtgtttgctcttgcgggaagcccgaaagacgctgatgacacatcaatctacatgttttatcaaaaggtcggcgacaactcaatcgacagctggaaaaacgcgggccgtgtctttaaagacagcgataagttcgacgccaacgatccgatcctgaaagatcagacgcaagaatggtccggttctgcaacctttacatctgacggaaaaatccgtttattctacactgactattccggtaaacattacggcaaacaaagcctgacaacagcgcaggattttcgcctgctggggcaaaccagcgtggaccgcttgctgcaactctctcagggccaggcggtgaagggcaatcagctgttgcccgtctcactggtgaaaagaaaaaccaccctggcgcccaatacgcaaaccgcctctccccgcgcgttggccgattcattaatgcagctggcacgacaggtttcccgactggaaagcgggcaggattttgccgatttcggaaccaccatcaaacaggattttcgcctgctggggcaaaccagcgtggaccgcttgctgcaactctctcagggccaggcggtgaagggcaatcagctgttgcccgtctcactggtgaaaagaaaaaccaccctggcgcccaatacgcaaaccgcctctccccgcgcgttggccgattcattaatgcagctggcacgacaggtttcccgactggaaagcgggcaggattttgccgatttcggaaccaccatcaaacaggattttcgcctgctggggcaaaccagcgtggaccgcttgctgcaactctctcagggccaggcggtgaagggcaatcagctgttgcccgtctcactggtgaaaagaaaaaccaccctggcgcccaatacgcaaaccgcctctccccgcgcgttggccgattcattaatgcagctggcacgacaggtttcccgactggaaagcgggcaggattttgccgatttcggaaccaccatcaaacaggattttcgcctgctggggcaaaccagcgtggaccgcttgctgcaactctctcagggccaggcggtgaagggcaatcagctgttgcccgtctcactggtgaaaagaaaaaccaccctggcgcccaatacgcaaaccgcctctccccgcgcgttggccgattcattaatgcagctggcacgacaggtttcccgactggaaagcgggcatcaggcaccgtgtatgaaatctaacaatgcgctcatcgtcatcctcggcaccgtcaccctggatgctgtaggcataggcttggttatgccggtactgccgggcctcttgcgggatatcgtccattccgacagcatcgccagtcactatggcgtgctgctagcgctatatgcgttgatgcaatttctatgcgcacccgttctcggagcactgtccgaccgctttggccgccgcccagtcctgctcgcttcgctacttggagccactatcgactacgcgatcatggcgaccacacccgtcctgtggatctacccactagtcaattcaccatcttgttga

SEQ ID NO: 153643 - DNA, 16122 bp, Homo sapiens
ctagaggatccccatgtcttgtaagaagtctagatctttaaatgtgggaagaggcttctctcgctctttctgggaagcccggcgtttgtaggttgagcctttgaggtcatatttgatatgcattttgacggatcttggtaaaagattgttcatcaccacaatccgaatgttcttgccacctgtctgcacacagtacagtccaaagaatttaggcagcaaagtccgagggttctggctgaggttcaagtagtatcctggaagcagcttctgcagaaactccgcctctttatgttggagtgtcttaataatgagttcatcgtcgctggacacatagaacagggaaccactagctccagagctacagagttcaatcagcggctcactgcagagggagcacaagtaatcatcgggcgggataccaaatagctcccgaaagtagcggaaggcaaccggcgcataggtcttgaaacggaaggcattgtagtgatgagcaggggtcaggttgctcccttcactggggaagaagatactctccaccacgtagaaatcttgcatgaggacatcacgctctggtttggtactcaggctccccacagtgtaagtaatgcctaactggatggcacctttcaaggctgttgaggttgtctttttatatgttgtctctcctgtcccctcctctccctggaggttggactggctaagaattccaacactgtaatcacacagttggtctttctggtgaccagcccccatcttgaagctaccgagggcgccgttcgctaactcagcatcgcgttttttagcgctctgctgaagcttctggctttctttacggaagaagttcgtgccgccgccgtagtacgctttgttaaataaagattcttcgccttggtatccgttttctgttcccgtgttggcttcgaatacaaggtatttatggcctttgtcttcaacgtagtgagggtctctcagcgtatggttgtcgccggatgtataattgccttcatcgataaactgctgaacgttctgatatgtttttccgtctccgtcaaaaatcgttttgtgatcttccactccgttgattttgagtgtgtcatcagattttgacacatttacctgcgctgttgtcaggctttgtttgccgtaatgtttaccggaatagtcagtgtagaataaacggatttttccgtcagatgtaaaggttgcagaaccggaccattcttgcgtctgatctttcaggatcggatcgttggcgtcgaacttatcgctgtctttaaagacacggcccgcgtttttccagctgtcgattgagttgtcgccgactttacagtgtttcaatcgtggaatcattattaaactctcatgatcaccgagggcgccgttcgctaaatcagcatcgcgttttttagcgctctgatgaatcttctggctttctttacggaagaagttcgtgccgacgccgtagtacgctttgttaaataaagattcttcgccttggtatccgttttctgttcccgtgttggattcgaatacaaggtatttatggcctttgtcttcaacgtagtgagggtctctcagcgtatggttgtcgccggatgtataattgccttcatcggtaaactgctgaacgttctgatatgtttttccgtctccgtcaaaaatcgttttgtgatcttccactccgttgatattgagtgtgtcatcagattttgacacatttccctgcgctgttgtcaggctgacggggcgcgcggcgacagctgttcccgagaggtgctccgatggacgggtgcccattaaatttgacccaacgcatatagcgctcacgagccgcgccatagtaactggagatgctgtacagggtggacgatatcccgtaagaggtccggcagtaacggagaaaaggagcctactccgggcaaccatgcaagatgtcttttgcgacggtgacagcttgcatgcctgcaggtcgactctagaggatcccctaaaggctttttgaagtgcatcacctgaccgggcagatagttcaccggggtgagaaaaaagagcaacaactgatttaggcaatttggcggtgttgatacagcgggtaataatcttacgtgaaatattttccgcatcagccagcgcagaaatatttccagcaaattcattctgcaatcggcttgcataacgctgaccacgttcataagcacttgttgggcgataatcgttacccaatctggataatgcagccatctgctcatcatccagctcgccaaccagaacacgataatcactttcggtaagtgcagcagctttacgacggcgactcccatcggcaatttctatgacaccagatactcttcgaccgaacgccggtgtctgttgaccagtcagtagaaaagaagggatgagatcatccagtgcgtcctcagtaagcagctcctggtcacgttcattacctgaccatacccgagaggtcttctcaacactatcaccccggagcacttcaagagtaaacttcacatcccgaccacatacaggcaaagtaatggcattaccgcgagccattactcctacgcgcgcaattaacgaatccaccatcggggcagctttaccaacttcatccgtttcacgtacaacattttttagaaccatgcttccccaggcatcccgaatttgctcctccatccacggggactgagagccattactattgctgtatttggtaagcaaaatacgtacatcaggctcgaaccctttaagatcaacgttcttgagcagatcacgaagcatatcgaaaaactgcagtgcggaggtgtagtcaaacaactcagcaggcgtgggaacaatcagcacatcagcagcacatacgacattaatcgtgccgatacccaggttaggcgcgctgtcaataactatgacatcatagtcatgagcaacagtttcaatggccagtcggagcatcaggtgtggatcggtgggcagtttaccttcatcaaatttgcccattaactcagtttcaatacggtgcagagccagacaggaaggaataatgtcaagccccggccagcaagtgggctttattgcataagtgacatcgtccttttccccaagatagaaaggcaggagagtgtcttctgcatgaatatgaagatctggtacccatccgtgatacattgaggctgttccctgggggtcgttaccttccacgagcaaaacacgtagccccttcagagccagatcgatatgagtcgtctggcggcctttctttttctcaatgtatgagaggcgcattggagttctgctgttgatctcattaacacagacctgcaggaagcggcggcggaagtcaggcatacgctggtaactttgaggcagctggtaacgctctatgatccagtcgattttcagagagacgatgcctgagccatccggcttacgatactgacacagggattcgtataaacgcatggcatacggattggtgatttcttttgtttcactaagccgaaactgcgtaaaccggttctgtaacccgataaagaagggaatgagatatgggttgatatgtacactgtaaagccctctggatggactgtgcgcacgtttgataaaccaaggaaaagattcatagcctttttcatcgccggcatcctcttcagggcgataaaaaaccacttccttccccgcgaaactcttcaatgcctgccgtatatccttactggcttccgcagaggtcaatccgaatatttcagcatatttagcaacatggatctcgcagataccgtcatgttcctgtagggtgccatcagattttctgatctggtcaacgaacagatacagcatacgtttttgatcccgggagagactatatgccgcctcagtgaggtcgtttgactggacgattcgcgggctatttttacgtttcttgtgattgataaccgctgtttccgccatgacagatccatgtgaagtgtgacaagtttttagattgtcacacttattggccagaattggtcccatgatcactgctagctctaaggaagaccagggattggctgagacgaaaaacatattctcaataaaccctttagggaaataggccaggttttcaccgtaacacgccacatcttgcgaatatatgtgtagaaactgccggaaatcgtcgtggtattcactccagagcgatgaaaacgtttcagtttgctcatggaaaacggtgtaacaagggtgaacactatcccatatcaccagctcaccgtctttcattgccatacggaactccggatgagcattcatcaggcgggcaagaatgtgaataaaggccggataaaacttgtgcttatttttctttacggtctttaaaaaggccgtaatatccagctgaacggtctggttataggtacattgagcaactgactgaaatgcctcaaaatgttcagaacgggcaggacctggattggggaggcgggtgccgccgctgctgctgacggtgtgacgttctctgttccggtcacaccacatacgttccgccattcctatgcgatgcacatgctgtatgccggtataccgttgaaagttctgcaaagcctcagaacacgtaggctggcatccatcgatcgtcatttttgaaccgcgtgaatcagtgaacaagtaccatttgccgttcattttgaaaacattcgcgcgctcgatttcatcagttaccgtgtttgaagtgatcagcggcttcattacttttttcaatgtgtaatcattatttaactctatgataccgagggcgccgttcgctaactcagcatcgcgttttttagcgctctgctgaagcttctggctttctttacggaaagaagttcgttccgcccgccgtagtacgctttgttaaataaagattcttcgccttggtatccgttttctgttcccgtgttggcttcgaatacaaggtatttatggcctttgtcttcaacgtagtgagggtctctcagcgtatggttgtcgccggatgtataattgccttcatcgataaactgctgaacgttctgatatgtttttccgtctccgtcaaaaatcgttttgtgatcttccactccgttgattttgagtgtgtcatcagattttgacacatttacctgcgctgttgtcaggctttgtttgccgtaatgtttaccggaatagtcagtgtagaataaacggatttttccgtcagatgtaaaggttgcagaaccggaccattcttgcgtctgatctttcaggatcggatcgttggcgtcgaacttatcgctgtctttaaagacacggcccgcgtttttccagctgtcgattgagttgtcgccgaccttttgataaaacatgtagattgatgtgtcatcagcgtctttcgggcttcccgcaagagcaaacacaacgtgatagccgttgtattcagctactgttccgtcagcgttttgcagcggccagctgtcccacacatcaagtccttttgcagactcaatatttttaatcgttgattgatcgaattgaggcacttggtatttttcgttttgctgcgagaaatattgctcagcttcaagctgatcttgtagctcccgcatctgtccttcatttcctctatactgtctgaagatattccggtttccagtgaaatccttaaagatctccagatatccacttgcagattctccaaaaagagtctttgaaaactgctctgatggttcatttccaccagcccctttcttgtgcttaattggccataatatctggaatattttaggaatttcttcagtttcagctctatacacatctccttgggttacaggtctaacgtgaaacagtttactaagttttggtttattcagacgttcgaaaatttccatgcacccaggttcccaaatagaaggagcatttctccaggccccagttgaaaagcgttgatcaatggcctgttcaaaaacagttctcatccggatctgccctttaccaacttcatccgtttcacgtacaacattttttagaaccatgcttccccaggcatcccgaatttgctcctccatccacggggactgagagccattactattgctgtatttggtaagcaaaatacgtacatcaggctcgaaccctttaagatcaacgttcttgagcagatcacgaagcatatcgaaaaactgcagtgcggaggtgtagtcaaacaactcagcaggcgtgggaacaatcagcacatcagcagcacatacgacattaatcgtgccgatacccaggttaggcgcgctgtcaataactatgacatcatagtcatgagcaacagtttcagtggccagtcggagcatcaggtgtggatcggtgggcagtttaccttcatcaaatttgcccattaactcagtttcaatacggtgcagagccagacaggaaggaataatgtcaagccccggccagcaagtgggctttattgcataagtgacatcgtccttttccccaagatagaaaggcaggagagtgtcttctgcatgaatatgaagatctggtacccatccgtgatacattgaggctgttccctgggggtcgttaccttccacgagcaaaacacgtagccccttcagaaccagatccagtgagacgggcaacagctgattgcccttcaccgcctggccctgagagagttgcagcaagcggtccacgctggtttgccccagcaggcgaaaatcctgtttgatggtggttccgaaatcggcaaaatcctgcccgctttccagtcgggaaacctgtcgtgccagctgcattaatgaatcggccaacgcgcggggagaggcggtttgcgtattgggcgccagggtggtttttcttttcaccagtgagacgggcaacagctgattgcccttcaccgcctggccctgagagagttgcagcaagcggtccacgctggtttgccccagcaggcgaaaatcctgtttgatggtggttccgaaatcggcaaaatcctgcccgctttccagtcgggaaacctgtcgtgccagctgcattaatgaatcggccaacgcgcggggagaggcggtttgcgtattgggcgccagggtggtttttcttttcaccagtgagacgggcaacagctgattgcccttcaccgcctggccctgagagagttgcagcaagcggtccacgctggtttgccccagcaggcgaaaatcctgtttgatggtggttccgaaatcggcaaaatcctgcccgctttccagtcgggaaacctgtcgtgccagctgcattaatgaatcggccaacgcgcggggagaggcggtttgcgtattgggcgccagggtggtttttcttttcaccagtgagacgggcaacagctgattgcccttcaccgcctggccctgagagagttgcagcaagcggtccacgctggtttgccccagcaggcgaaaatcctgtttgatggtggttccgaaatcggcaaaatcctgcccgctttccagtcgggaaacctgtcgtgccagctgcattaatgaatcggccaacgcgcggggagaggcggtttgcgtattgggcgccagggtggtttttcttttcaccagtgagacgggcaacagctgattgcccttcaccgcctggccctgagagagttgcagcaagcggtccacgctggtttgccccagcaggcgaaaatcctgtttgatggtggttccgaaatcggcaaaatcctgcccgctttccagtcgggaaacctgtcgtgccagctgcattaatgaatcggccaacgcgcggggagaggcggtttgcgtattgggcgccagggtggtttttcttttcaccagtgagacgggcaacagctgattgcccttcaccgcctggccctgagagagttgcagcaagcggtccacgctggtttgccccagcaggcgaaaatcctgtttgatggtggttccgaaatcggcaaaatcctgcccgctttccagtcgggaaacctgtcgtgccagctgcattaatgaatcggccaacgcgcggggagaggcggtttgcgtattgggcgccagggtggtttttcttttcaccagtgagacgggcaacagctgattgcccttcaccgcctggccctgagagagttgcagcaagcggtccacgctggtttgccccagcaggcgaaaatcctgtttgatggtggttccgaaatcggcaaaatcctgcccgctttccagtcgggaaacctgtcgtgccagctgcattaatgaatcggccaacgcgcggggagaggcggtttgcgtattgggcgccagggtggtttttcttttcaccagtgagacgggcaacagctgattgcccttcaccgcctggccctgagagagttgcagcaagcggtccacgctggtttgccccagcaggcgaaaatcctgtttgatggtggttccgaaatcggcaaaatccctcctggggtctggcttccgtcgctcctccagtttggcggcggagtgtggggctgcattgtccactgggggtgccgccgccgccgccgccttcgctgccaccgcggccgccgccgccaccgaagcgctgcccggcgcgccgccggggttggaggctggggggccgcggaatcccagtgagacgggcaacagctgattgcccttcaccgcctggccctgagagagttgcagcaagccggtccacgctggtttgccccagcaggcgaaaatcctgtttgatggtggttccgaaatcggcaaaatcctgcccgctttccagtcgggaaacctgtcgtgccagctgcattaatgaatcggccaacgcgcggggagaggcggtttgcgtattgggcgccagggtggtttttcttttcaccagtgagacgggcaacagctgattgcccttcaccgcctggccctgagagagttgcagcaagcggtccacgctggtttgccccagcaggcgaaaatcctgtttgatggtggttccgaaatcggcaaaatccattaattgcgttgcgctcactgcccgctttccagtcgggaaacctgtcgtgccagctgcattaatgaatcggccaacgcgcggggagaggcggtttgcgtattgggcgccagggtggtttttcttttcaccagtgagacgggccacagctgattgcccttcaccggctggccctgagagagttgcagcaagcgggtccacgctggtttgcccccgcaggcgaaaacctgtttgaagggggttccgaaaatcggcaaaatccagtgagacgggcaacagctgattgcccttcaccgcctggccctgagagagttgcagcaagcggtccacgctggtttgccccagcaggcgaaaatcctgtttgatggtggttccgaaatcggcaaaatcctgcccgctttccagtcgggaaacctgtcgtgccagctgcattaatgaatcggccaacgcgcggggagaggcggtttgcgtattgggcgccagggtggtttttcttttcaccagtgagacgggcaacagctgattgcccttcaccgcctggccctgagagagttgcagcaagcggtccacgctggtttgccccagcaggcgaaaatcctgtttgatggtggttccgaaatcggcaaaatccattaattgcgttgcgctcactgcccgctttccagtcgggaaacctgtcgtgccagctgcattaatgaatcggccaacgcgcggggagaggcggtttgcgtattgggcgccagggtggtttttcttttcaccagtgagacgggcaacagctgattgcccttcaccgcctggccctgagagagttgcagcaagcggtccacgcttggtttgccccagcaggcgaaaatcctgtttgatggtggttccgaaatcggcaaaatccctgcgctgttgtcaggctttgtttgccgtaatgtttaccggaatagtcagtgtagaataaacggatttttccgtcagatgtaaaggttgcagaaccggaccattcttgcgtctgatctttcaggatcggatcgttggcgtcgaacttatcgctgtctttaaagacacggcccgcgtttttccagctgtcgattgagttgtcgccgaccttttgataaaacatgtagattgatgtgtcatcagcgtctttcgggcttcccgcaagagcaaacacaacgtgatagccgttgtattcagctactgttccgtcagcgttttgcagcgggcagctgtcccacacatcaagtccttttgcagactcaattaattgcgttgcgctcactgcccgctttccagtcgggaaacctgtcgtgccagctgcattaatgaatcggccaacgcgcggggagaggcggtttgcgtattgggcgccagggtggtttttcttttcaccagtgagacgggcaacagctgattgcccttcaccgcctggccctgagagagttgcagcaagcggtccacgctggtttgccccagcaggcgaaaatcctgtttgatggtggttccgaaatcggcaaaatcccttataaatcaaaagaatagcccgagatagggttgagtgttgttccagtttggaacaagagtccatgtttaaatctaaagggtgaactttaggggagcctttcgtgctgacaccaggtctactgtagagatcccacgagcctttacatgcatagttgaggttgaggaatctgtgccggccgatcctggaagagagcggtcgccgaccttcactccttgtcgaacggaaatcgccgaaaatatcgcccgccaggcacgacttgccgcagaccatatagggatgttcgggtaccgagctcgaattcgtaatcatggtcatagctgtttccgcctggccctgagagagttgcagcaagcggtccacgctggtttgccccagcaggcgaaaatcctgtttgatggtggttccgaaatcggcaaaatcctgcccgctttccagtcgggaaacctgtcgtgccagctgcattaatgaatcggccaacgcgcggggagaggcggtttgcgtattgggcgccagggtggtttttcttttcaccagtgagacgggcaacagctgattgcccttcaccgcctggccctgagagagttgcagcaagcggtccacgctggtttgccccagcaggcgaaaatcctgtttgatggtggttccgaaatcggcaaaatcctgcccgctttccagtcgggaaacctgtcgtgccagctgcattaatgaatcggccaacgcgcggggagaggcggtttgcgtattgggcgccagggtggtttttcttttcaccagtgagacgggcaacagctgattgcccttcaccgcctggccctgagagagttgcagcaagcggtccacgctggtttgccccagcaggcgaaaatcctgtttgatggtggttccgaaatcggcaaaatccattaattgcgttgcgctcactgcccgctttccagtcgggaaacctgtcgtgccagctgcattaatgaatcggccaacgcgcggggagaggcggtttgcgtattgggcgccagggtggtttttcttttcaccagtgagacgggcaacagctgattgcccttcaccgcctggccctgagagagttgcagcaagcggtccacgctggtttgccccaacaggcgaaaatcctgtttgatggtgggtccgaaatcggcaaaatcccttataaatcaaaaaaataccccgagatagggtttgagtggtgttccagttgggaagcaagagtccactgtttaagaaccttggaattcgaacatcaacgggacgaagaacaccggtgataatggcctcggttccaagcactgtcgtgccagctgcattaatgaatcggccaacgcgcggggagaggcggtttgcgtattgggcgccagggtggtttttcttttcaccagtgagacgggcaacagctgattgcccttcaccgcctggccctgagagagttgcagcaagcggtccacgctggtttgccccagcaggcgaaaatcctgtttgatggtggttcccaaatcggcaaaatcctgcccgctttccagtcgggaaacctgtcgtgccagctgcattaatgaatcggccaacgcgcggggagaggcggtttgcgtattgggcgccagggtggtttttcttttcaccagtgagacgggcaacagctgattgcccttcaccgcctggccctgagagagttgcagcaagcggtccacgctggtttgccccagcaggcgaaaatcctgtttgatggtggttccgaaatcggcaaaatcctgcccgctttccagtcgggaaacctgtcgtgccagctgcattaatgaatcggccaacgcgcggggagaggcggtttgcgtattgggcgccagggtggtttttcttttcaccagtgagacgggcaacagctgattgcccttcaccgcctggccctgagagagttgcagcaagcggtccacgctggtttgccccagcaggcgaaaatcctgtttgatggtggttccgaaatcggcaaaatcctgcccgctttccagtcgggaaacctgtcgtgccagctgcattaatgaatcggccaacgcgcggggagaggcggtttgcgtattgggcgccagggtggtttttcttttcaccagtgagacgggcaacagctgattgcccttcaccgcctggccctgagagagttgcagcaagcggtccacgctggtttgccccagcaggcgaaaatcctgtttgatggtggttccgaaatcggcaaaatcctgcccgctttccagtcgggaaacctgtcgtgccagctgcattaatgaatcggccaacgcgcggggagaggcggtttgcgtattgggcgccagggtggtttttcttttcaccagtgagacgggcaacagctgattgcccttcaccgcctggccctgagagagttgcagcaagcggtccacgctggtttgccccagcaggcgaaaatcctgtttgatggtggttccgaaatcggcaaaatcccccaatgttgcctttttatcctcgaagaagcctctgtttgtcatgtagcttgtgataaccacattgttgcctttggcttgcggcactgcgaagtgagagtaagtgaatgtcacatcgtttggatcaagacccatttgcagcacaagccctgttttgttcagcggcttgtaagggccggttaaagagtttgatacataaccaagcatgtaaatatcgtttgagttaataccatcgatcgtcatttttgaaccgcgtgaatcagtgaacaagtaccatttgccgttcattttgaaaacattcgcgcgctcgatttcatcagttaccgtgtttgaagtgatcagcggcttcattacttttttcaatgtgtaatcattatttaactctatgataccgagggcgccgttcgctaactcagcatcgcgttttttagcgctctgctgaagcttctggctttctttacggaagaagttcgtgccgccgccgtagtacgctttgttaaataaagattcttcgccttggtatccgttttctgttcccgtgttggcttcgaatacaaggtatttatggcctttgtcttcaacgtagtgagggtctctcagcgtttgggtgtccgccggtgtattattgccttcatcgataaactggcggaccgttctgatatgtttttccgtctccgtcaaaaatcgttttgtgatcttccactccggtgattttgagtgtggcattagatatttgacacatttacctgcgctggtgtcaggcgcctggccctgagagagttgcagcaagcggtccacgctggtttgccccagcaggcgaaaatcctgtttgatggtggttccgaaatcggcaaaatccattaattgcgttgcgctcactgcccgctttccagtcgggaaacctgtcgtgccagctgcattaatgaaatcgccaacgcgcggggagaggcggtttgcgtattgggcgccagggtggtttttcttttcaccagtgagacgggcaacagctgattgcccttcaccgcctggcccctttccaattgtctcgtctggagttacccatgagctatttaagtgaagggttaggtgagttacttctgattcatgcccgctttccagtcgggaaacctgtcgtgccagctgcattaatgaatcggccaacgcgcggggagaggcggtttgcgtattgggcgccagggtggtttttcttttcaccagtgagacgggcaacagctgattgcccttcaccgcctggccctgagaaagttgcatcaagcggtccacgctggtttgccccagcaggcgaaaatcctgtttgatgggggttccgaaatcggcaaaatcctgcccgctttccagtcgggaaacctgtcgtgccagctgcattaatgaatcggccaacgcgcggggagaggcggtttgcgtattgggcgccagggtggtttttcttttcaccagtgagacgggcaacagctgattgccctttaccgcctggccctgagagagttgcagcaagcggtccacgctggtttgccccagcaggcgaaaatcctgtttgatggtggttccgaaatcggcaaaatcccgtccatctggaatgggcattaattgcgttgcgctcactgcccgctttccagtcgggaaacctgtcgtgccagctgcattaatgaatcggccaacgcgcggggagaggcggtttgcgtattgggcgccagggtggtttttcttttcaccagtgagacgggcaacagctgattgcccttcaccgcctggccctgagagagttgcagcaagcggtccacgctggtttgccccagcaagcgaaaatcctgtttgatggtgggtctcgaaatctgctaaattctgcccgctttccagtcgggaaacctgtcgtgccagctgcattaatgaatcggccaacgcgcggagagaggcggtttgcgtattgagcgccaaggtggtttttcttttcaccagtgagacgggcaacagctgattgcccttcaccgcctggccctgaaagagttgcagcaagcggtccacgctggtttgccccagcaggcgaaatatctgtatgatggtgggtccgaaatcggcaacatcctgcccgctttccagtcgggaaacctgtcgtgccagctgcattaatgaatcggccaacgcgcggggagaggcggtttgcgtattgggcgccagggtggtttttcttttcaccagtgagacgggcaacagctgattgcccttcaccgcctggccctgagagagttgcagcaagcggtccacgctggtttgccccagcaggcgaaaatcctgtttgatggtggtgtcgaaatcggcaaaatccattaattgcgttgcgctcactgcccgctttccagtcgggaaacctgtcgtgccagctgcattaatgaatcggccaacgcgcggggagaggcggtttgcgtattgggcgccagggtggtttttcttttcaccagtgagacgggcaacagctgattgcccttcaccgcctggccctgagagagttgcagcaagcggtccacgctggtttggcccagcaggcgaaaatcctgtttgatggtggttccgaaatcggcaaaatcccttaataatcaaaagaatagcccgagatagggttgagtgttggtccaatttggaacaagagtccactattaaaagacgtggactccaacgtacaagggcgaaaaaccgtctatcagggcgatggcccacttcgtgaaccatcacccaaatcaagttttttgggggtcgaggtgcccgtaaagcactaaatcgggaaccagaacggtcaggacctggattggggaggcggttgccgccgctgctgctgacggtgtgacgttctctgttccggtcacaccacatacgttccgccattcctatgcgatgcacatgctgtatgccggtataccgctgaaagttctgcaaagcgtgtgcatgtgtctttaacaccttggtggcagacccgcggtgtgactctagaggatccccttttttagtagttctggagtttgacaatgattgtactgtgtagccttttacggtccatctccttgtgaaattgtgtgattcaatcatgtcaaccaaccattcctgcagggcagcaggaccttggcccccatctcccagcaccctcaaggtcaggggtgtgcgcctttccat

SEQ ID NO: 153644 - DNA, 654 bp, Homo sapiens; identical to SEQ ID NO: 144884
  misc_feature (1)...(654): n = a,t,c or g

SEQ ID NO: 153645 - DNA, 649 bp, Homo sapiens
  misc_feature (1)...(649): n = a,t,c or g
atcgagaccatattccatgtggnggaattccacagactcagagagaacccaccatggtgctgtctcctgccgacaagaccaacgtcataggccgcctggggtaaggtcggcgcgcacgctggcgcagtatggtgcggaggccctggagaggatgttcctgtccttccccaccaccaagacctacttcccgcacttcgacctgagccacgggttttgcccaggtttaagggccacgggcaagaaggtggccgacgcgctgaccaacgccgtggcgcacgtggacgacatgcccaacgcgctgtccgccctgaagcgacctgcacgcgcacaagcttcgggtgggacccggttcaactttcaagctcctaagccacttgccttgctggtgaaccctgggccgcccaccttccccggccgagtttcaacccctggcggttgcaaggcttccttgggaaaagtttcctgggctttttgttgaagcaccgttgcttgaccttcaaataacctttaaggttggaagctttggttggccattgtttttttgcccctttgggcctccccccagcccctcctcccctttcctgcacccgtacccccgtggtctttgaaataaagtcttgagtgggcggcaaaaaaaaaaaaaaaaaaa

SEQ ID NO: 153646 - DNA, 1809 bp, Homo sapiens
gggagccgagactgcgcaaggctggggggttattgtcccgttccaggcagaatgatcaagagggcagggagggagcacaggggtggccagcgtacggtccagcacgtggtgtggtaccccagccctgggttcaaacagggacatggcaagggaacacaggacagagggttccccagcttccacctcacccaccgccaattcatttagttagcaggcacaggggcaagctccggcacggctttctcaggcctatgccggagcctcgagggctggagagcgggaagacaggcagtgctcggggagttgcagcatgtacgtcaccatgagggcgaagcggccatgggaggggggccacgacacattgacgcagcaaggaggctgcaggagctcggtctgtgggcgccgagcccacgaggcactgcggcccagggtctggtgcggagagggcccacagtggacttggtgacgctgtatgccctcaaccgctcagcccctggggctggcttggcagacagtacagcatccaggggagtcaagggcatggggcgagaccagactaggcgaggcgggcggggcggagtgaatgagctctcaggagggaggatggtgcaggcaggggtgaggtagtgcatcgggcggcgagcgggaggcatctggactccagagcccgtggccaaggcgggcctcgcgggcggcgacggagccgggatcggtgcctcagcgttcgggctggagacgaggccaggtctccagctggggtggacgtgcccacccagctgccgaaggccaagacgccaggtccggtggacgtgacaagcaggacatgacatggtccggtgtgacggctaagacttaggagcgctcgtgcgttgcttgtgaacacattatgctggtggggctgcggcaagaagcgggctctgattctttacttcctccacggagtcggcacactatggctgccctctggggttcccagaacccacaacatgaaagaaatggtgctacccagctcaagcctggggcctttgaatccggacacaaaaccctctagcttggaaatgaatatgctgcactttacaaccactgcactaccttgacttcaggaatccggctcttggaaggttgaaagctagaggaaccagaccctcatcagccccaaccatcaaaggacaccatcgggaacagcagcgcccgcagcaccccacccccgcacccggcgacttcccatctttcatggccacccccttcgggggaacgggttgaccaacaagccacaacatcatccccagagctgagctccctccaagcgggatgactgccgtccccaccaactcccttcttcttctttttcaacccttctggtcctctttgtttctggagctttccctgtctttcccttttttcctgagagatttcaaaagcctcccacgacttctgttttcccccgttcccttctggaatttaaatttggcactaaagtcattttgcactggttgggagttgtgggagaagggccttggagtcttcagtaacggagtgtggcgtgagtgtggaggccaccttgggcaagtgcctgttgcaggggcccgggcggcccttccatctgggggccgggtgactggggcgccggctgtgtgcccgaggcctcgaccctgccctcgcctagtctggaagctccgaccgacatcacggagcagccttcaagcattccattacgccccatctcgctctgtgcccctccccaccaggggcttcagcaggagcccctggactcatcatcaataaacactgttacagcaaaaaaaaaaa

SEQ ID NO: 153647 - DNA, 486 bp, Homo sapiens; identical to SEQ ID NO: 146659

SEQ ID NO: 153648 - DNA, 3898 bp, Homo sapiens
  misc_feature (1)...(3898): n = a,t,c or g
gtgggagggacagcagggcttagagtgggggtcattgtgcagatgggaaaacaaaggcccagagaggggaagaaatgcccaggagctaccgagggcaggcgacctcaaccacagcccagtgctggagctgtgagtggatgtagagcagcggaatatccattcagccagctcaggggaaggacaggggccctgaagccaggggatggagctgcagggaagggagctcagagagaaggggaggggagtctgagctcagtttcccgctgcctgaaaggagggtggtacctactcccttcacaggtcatgctccatttttccatcgggaccatcaagagggtgtttgtgtctaaggctgactgggtaactttggatgagcggtctctccgctctgagcctgtttcctcatctgtcaaatgggctctaacccactctgatctcccagggcggcagacaatgccgtcttctgtctcgtggggcatcctcctgctggcaggcctgtgctgcctggtccctgtctccctggctgaggatccccagggagatgctgcccagaagacagatacatcccaccatgatcaggatcacccaaccttcaacaagatcacccccaacctggctgagttcgccttcagcctataccgccagctggcacaccagtccaacagcaccaatatcttcttctccccagtgagcatcgctacagcctttgcaatgctctccctgggggaccaaggcttgacactcacgatggaaatcctgggaaggccttgaattttcaaccttcaagggagattttccggaggctcagatccatgaaggcttccaggaactcctccgtacccctcaacccagccagaacagcccagctcccagctgaccccaccggcaatggccctgttcccctcagcgagggccctgaagcctagtggataagtttttgggagggatgttaaaaaagttgtaccccacctcagaagcccttcacctgtccaaccttcgggggacacccgaaggaggcccaagaaacagatccaacgatttacgtgggagaagggtacttcaagggaaaatttgttggatttggttcaaggagctttgacagagacacagttttttgctctggtgaatttacatctttcttttaaagggcaaatgggagagaaccctttgaagtcaagggacaccgaggaagaaggactttcacgttggaccagggcgtaccaccgtggaagggtgccctatgatggaagcgttttaggcatgtttaaccatccagccactgtaagaaagctgtccagctggggtgctgctgattgaaataacctggggcaattgccacccgccaatccttcttcctgccctnatgaagggaaactacaggcacctggggaaaatgaactcaccccacgattattcatcacccaaagtcccctggaaaaatgaaagacaagaaggtcttgcccagctttacattttaccccaaactgttccctttattgggaacctattgattttgaaggagcgttcctggggttcaactggggcttcattaagggtctttcaggcattggggcttacctttcccgggtcacagaggaggcacccctgaagctctccaaggccgtgcaataaggcttgtcctgacccatcgacgagaaagggactgaagcttgctggggccatgtttttagaggccatacccatgtctatcccccccgaggttcaagttcaacaaaccctttgtcttcttaaatgattgaactaaaataccaaacttgaccaggcccagcaggccccagaagaccattaccctatatcccttctcctccccagtcacatggccataggcctgctgatggctcaggaaggccattgcaaggactcctcagctatgggagaggaagcacatcacccattgacccccgcaacccctccctttcctcccctgagtcccgactggggccacatgcagcctgacttctttgtgcctgttgctgtccctgcagtcttcagagggccaccgcagctccagtgccacggcaggaggctgttcctgaatagcccctgtgcccagaaatcttcctctggcctagttgtggagcctggcctaagtcgcacattgctggagatggtgaagctgaccagcatgagaggtcagtttctagaagcccaaatcccaacaggcataagcctcaccctccaatatcagctctatcagaaacaaacaaacaaaaacatgtcttattcatttgtccttttcctcaaatgggtggcacttgggcagggcagaagggctggttatccaagcttggaagatgctgacagcagacgcttcaatggcagtaggagttttctgatcactgtcattggtatcacgcttactgttgaaatcgtgacatcaggaatgatgaaaggaactagagtcagatggtctggagcggggaatgaggggatgatggggctggaagagggaaggaatgaaaggagtgtgaaggaagcgccaccaaggagagctgtggaagcccaacccaaagaccgcacctgggatgtcgggaagggccaaggtacagaaggagaaggaagagggttggaggtggagggccagcagcaccaaggctcggagccagggacaataccattctctgtctcatggggcgtcctcctgctggcaggcctgtgctgcctggtccccagctccctggttgaggatccccaggaagatgctgcccaaaagacggatacatcccaccatgatcaaggggactgggaggaccttgcttgccagaagatctcctataacgtcaccgacctcgcctttgatttgtacaaagagctggctgatctatcacaaaccagcaatgtcttagtcaccccaacaagcgtggctatggcctttgcaatgctctccctggggaccaaggctgacactcgcacagagatcctggaaggcctgaatgtcaacctcacagagacgcctgaggccaagatccacgaatgcttccagcaagttctccaagccctcagcaggccagacacccggctccagctgaccaccggcagtagcctgtttgttaacaagagtatgaagctagtggacacgtttttggaggataccaagaagctgtaccactcagaagcctcttccatcaacttcagggacaccgaggaggccaaagagcagatcaacaattatgtggagaaaagaactggaagaaaagtagtggatttggtcaaacacctgaaaaaagacacaagtcttgccctggtggattacatttcctttcacggcaagtggaaagataaattcaaggctgagcgcattatggtagagggcttccatgtggatgataagaccatcatcagagtgcctatgataaaccacctgggtagatttgacatccaccgggacagggagttatccagctgggtgctggcacagcactatgtggggaacgccactgccttcttcatcctgcccgatccaaagaagatgtggcagttggaagaaaaattgacctacagccaccttgaaaatatccagagagcctttgacataaggtctatcaatctacattttcccaaactgtccatttctggaacctacaaactcaagagagtccctaggaatctgggcatcaccaagatcttcagcaacgaggccgacctctctggagtcagtcaggaggcacccctgaagctctccaaggctgtgcatgtggctgtgctcaccattgatgagaaagggaccgaagccaccggagccccccatctggaggagaaggcctggtctaagtatcagacagtcatgttcaaccgacccttcctggtcatcatcaaggagtacatcaccaactttccgctcttcattggaaaagtggtgaatcccacccaaaaataa

SEQ ID NO: 153649 - DNA, 1885 bp, Homo sapiens
  misc_feature (1)...(1885): n = a,t,c or g
ccatgaggaggaacaagccccggcagcgcggcgtgcgggaggcgcggcctgcgggaggcgccgggccgggctggcgcggggcccgttgttccggcgcaggtgagggaggtggcggcgagcgacgcggttcacctcccgctgccctcgccctcgccccggcgagcggcccccgcaggaactttcctcccgacgcgagatgtcttatttaccaacaaatccaccagggagcattcttacttgctggctcggcgtctctctcggcagtcaccggagtgcccgagggggaagcacgatttacggaagactattgcccagaagaaaagatgtttggttttcacaagccaaagatgtaccgaagtatagaggggtgctggtatttcaggagctaagtcctccagttctcgattcactgacagtaaacgctatgaaaaaggacttccaagagctgttttggattgcatgagactcgttcaggagacatctggcaatgcctgtgtgctgcttgtgaaaagatggaagaagttgccnggcaggattcaaaaaaaaactggaatcatgtggtagatgcaagggctggacccagttctaaagactacatttgaaccaaaagaaagtgaaaactctatctggggaacaggattaaaaggcacccagatcagtaaactgcagaaggaatttaaaccgttctaattctgatgctcacagtaccacctcaagtgcctccccagctcaatctccttgttacagtaaccagtcagatgacggctcagatacagagatggcttctggttctaacagaacaccagttttttcctttttagatctcacttactggaaaagacagaagatatgttgtgggatcatctataaaggccgttttggggaagtcctcattgacacacatctcttcaagccttgctgcagcaataagaaagcagctgctgagaagccagaggagcaggggccagagcctctgcccatctccactcaggagtggactgagtgtccagacctctcactggttgtcagctggaggcccccgcttagttccttgccagctgggtgctccctgcatggcctggctgctgactggaccactgacatgattactgtcactaccagcaagtgtcgagagccaagctgccagcaagaggggtcttttcagagaagaaaagcctttcccaagcggctgccgaagatggcggaggtgcaggtcctgttgctttaatgttcgaggcccatctcctgcggcccgcctggccggccattcgtggctaaacaggtactgctgggccggaaaggtggtggtcgtacgcttgtgaaggcatcaacatttctggcaatttcttacagaaacaagttgaagtaccttggctttcctccgcaagcggatcgaacaccaacccttcccgaaggcccctaccacttcgggggcccccagccgcattcttctggcggaccgtgcgaggtatgctgccccacaaaaccaagcgaggccaaggccgctctggaccgtctcaaggtgtttgacggcaatcccaccggccctacgacaagaaaaagcgggatggtggttcctgctgccctcaaggtcgtgcgttttgaagcctacaagaaagtttgcctaatctgggggcgcctgggctcccgaggttgggctggaagtaccaggcagtgacagccccccctggaagaagaagaggaaaagagaaaagccaagattccactaccggaagaaagaaaacagctcatgaggctaccggaaacaaggccgagaagaacgcggagaagacacttgcaccaatacacagaggtcctcaagacccacggactcctggtctgagcccaataaagactgttaattcctcaaaaaaaaaaaaaaaaa

SEQ ID NO: 153650 - DNA, 356 bp, Homo sapiens
  misc_feature (1)...(356): n = a,t,c or g
ggcggtggcggacccttggggtctggacgcaacggcggcgggagcatgaacgcccctccagccttcgagtcgttcttgctcttcgagggcgagaaacaactcctaaaagacccgcaagtgctatttgctggctacaaagtcccccaccccttggagcacaagatcatcatccgagtgcagaccacgccggactacagcccccaggaagcctttaccaacgccatcaccgacctcatcagtgagctgtccctgctggaggagcgcttccgnnnnnnnnnnnnnnnnnnnnnnnnnnnnnnnnnnnnnnnnnnnnnnnnnnnnnnnnnnnnnnnnnnnnnnnnnnnnnnnnnnnnnna

SEQ ID NO: 153651 - DNA, 513 bp, Homo sapiens
  misc_feature (1)...(513): n = a,t,c or g
atgaagaaaagaggtttaattgactcacagttctgcaggctgtacaggaagcatggctggggaggcctcaggaaactgacaatcacggcagaaggcgaaggggaagcaggcacgtcttcttaatattcctttgaaattccttatggcgcacaggtagcgtagaaaataactgcttcacgctgactgtggtccctctggggtgggggtagggggnntnnctgaatattnttccatnntgatcaaacacccatcgagtcccaaccttcaccgacgcgtgggaggtagaaatggtgacatcgttaagccttcaaagttttcttcttctaccccacatccattgtctgaaacttcaatgagatccactccatagtccttaagctttagatcaatattagtggcaccagcatccagactgttttctactaactccttcactgcagtgcttagactcagtaccactggcccagagcaaatctgatggactgactttcgatcaatacgtttgatggcctt

SEQ ID NO: 153652 - DNA, 442 bp, Homo sapiens
ttttttttttttttttttaatttatgaagaaaagaggtttaattgactcacagttctgcaggctgtacaggaagcgtggctggggaggcctcaggaaactgacaatcacggcagaaggcgaaggggaagcaggcacgtctggccatgttggagcaggagagacagagagagtgaagtgggagggctgcacgcttttaaacaaccagatcccacaagcgctcactcaatatcacgagaacagcaagggggaagtcggcccccatgagccaatcacctcccaccaggtccctcccacaacactgggaattacaatttgacatgacattttgggttgtggatacagagctgaaccatgtcaagggtagttcaaccgctgagattgattgattgattgattgactgagatggagtcctgctctgttacctaggctggagtgcagtg

SEQ ID NO: 153653 - DNA, 653 bp, Homo sapiens
aatttattgaagaaaagaggtttaattggctcacagttctgcaggctgtacaggaagcatggctggggaggcctcaggaaactgacaatcacggcagaaggcgaaggggaagcaggcacgtttcttcttaatattcctttgaaattctttatggtgcacaggtagcgtagaaaataactgcttcacgctgactgtcatccctctggggtggggggtagggggtttcctggatgattttcccatcgtgatcaaacaccagtcgagtcccaaccttcaccgacgcgtggcaggtagaaatggtgacatcgctcagtgcacacagtgagctcagagcttccccctgaaaaccgaaagtttcaacttcagttaggtcggcaaactcttgaatcttacatgtgtgatgtttcagagctgaaagagattaagccttcaaagttttcttcttctaccccacatccattgtctgaaacttcaatgagatccactccatagtccttaagctttagatcaatattagtggcaccagcatccagactgttttctactaactccttcactgcagtgcttagactcagtaccactggcccagagcaaatctgatggactgacttccgatcaataggtttgatggccttagcaggttctgtactgga

SEQ ID NO: 153654 - DNA, 1028 bp, Homo sapiens
cggacgcgtgggcggacgcgtgggggcgacggtggcggacacttggggtctggacgcaacggcggcgggagcatgaacgcccctccagccttcgagtcgttcttgcctcttcgagggcgagaaggatcaccattaacaaggacaccaaggtacccaatgcctgtttattcaccatggaacaaagaagaccacacactgggaaacatcattaaatcacgtgcctgcttccccttcgccttctgccgtgattgtcagtttcctgaggcctccccagccacgcttcctgtacagcctgcagaactgtgagtcaattaaacctcttttcttcataaattacccagtttctcatagttctttataggcagtgtgaaaacaagactaatgggacccttctggttgaaggaatgcagccattctgcttgcttgactatgtcctttctattcatctctatttcctccgaggtggttatccaagtgcatataggaggtattggtgaccgcacagtcccctcagtgttctgctagtaaatagttgaaggttgatcagtgatctcctgcgttttcagtctggcatggaaaagcccccatgcagctggtaaagatatcagtaagcaccaggaggtatctaaatccaccaggagccataggcatcacgttgacgtccatttaccaagtcttccctggcaagattcttctgaattgtgctgccttggccaaaagaggtatgggaaggggctgggcgccagtggcttgtgccctgtaatccccaacattttggggaaaccaatttcagggtggatcggtagaggtccagggggttccaagaccatcctgggccggcatggtgacatcccatctctactgaaaatacaataagttagctgggtttggtgttgggtgcctgtaatcccagctactcgagaggctgaggcgggataatcgcttgaacctgggaggaggaggtggcagtgagctgagatcgtgccattgcactccagcgtgggcaacaagagtgaaacgtcgtctca

SEQ ID NO: 153655 - DNA, 730 bp, Homo sapiens
  misc_feature (1)...(730): n = a,t,c or g
tttcgtggggcgatgagccgatccttgggcgggtttgccccgccggagtaatccggaagaggcctcttattagggctctggtggcggcggtggcggacacttggggtctggacgcaacggcggcgggagcatgaacgcccctccagccttcgagtcgttcttgctcttcgagggcgagaagaagtaagtgacgccggctgcggcgggccgaggatcaccattaacaaggacaccaaggtacccaatgcctgtttattcaccatcaacaaagaagaccacacactgggaaacatcattaaatcacagcgcgacctaaaggacccgcaagcgctgtttgctggctacaaagtcccccaccccttgggagcacaagatcatcatccgagtgcagaccacgccggactacagcccccagggnagcctttaccaaccgccaatcacccgacctcaatcagtgagctgtccctgctgggagggagcgcttttcggggtggccataaaaagacaagccaggaaaggaatttgagtaggggggccagaggggggctctgctccggcctgtgaagcccccgttccctaactgtgccctgaccctccgctccaggtaccacaccgaggagagcggccggtcccagccatggcccgccttgtggccacccctcaccctgacaccgacgtgtcctgtacatagattaggttttatattcctaataaagtatagcggaagaga

SEQ ID NO: 153656 - DNA, 441 bp, Homo sapiens; identical to SEQ ID NO: 139611

SEQ ID NO: 153657 - DNA, 1927 bp, Homo sapiens
agtggaagccgccgccgcgctgggagctcgcaggcgccgcgtagccgtcgccaccgccgccagcccgtgcgccctcggcgcgtacccgccgcgctcccatccccgccgccggccaggggcgcgctcggccgccccggacagtgtcccgctgcggctccgcggcgatggccaccaagatcgacaaagaggcttgccgggcggcgtacaacctggtgcgcgacgacggctcggccgtcatctgggtgactattaaatatgacggctccaccatcgtccccggcgagcagggagcggagtaccagcacttcatccagcagtgcacagatgacgtccggttgtttgccttcgtgcgcttcaccaccggggatgccatgagcaagaggtccaagtttgccctcatcacgtggatcggtgagaacgtcagcgagctgcagcgcgccaaaaccgggacggacgagaccctggtgaaggaggtcgtacagaatttcgctaatgagtatgtgatcagtgatcggaaggagctggaggaagaattcatcaagagccgagctgaagaaggcggtgggagccaattacgacgcccagacggagtaaccccagcccccgccacaccaccccttgccaaagtcatctgcctgctccccgggggagaggaccggccggcctcagctactagcccaccagcccaccagggagaagagaagccatgagaggcagcgcccgccaccctgtgtccacagcccccaccttcccgcttcccttagaaccctgccgtgtcctatctcatgacgctcatgggaacctctttctttgatcttctttttcttttctcccccctcttttttgttctaaagaaaatgtcattttgatgcaaggtcctgcctgccatcagatccgaggtgcctcctgcaagtgaccccttttcctggcatttctcttccacgcgacgaggtctgcctagtgagatctgcatgacctcacgttgctttccagagcccgggcctattttgccatctcagttttcctgggaccctgctttcctggtgtaaccactgagggggcagctggggccagggagctgtgcccggttgcctggcagccttcataagcacacacgtccattccctactaagggcccagacctcctgggtatctgtgccccgggcttccctcatcccacctccatccggagttgcctaagatggcatggtccagcatagggcagggatttgttcgggtggtgagaaggttagttcccggctcagacttgaataagaaggagataaaattttgccttaaaacttacctgggcagtgggtttgctggcacgggtttgaaaaccacctgtttcccaccctctttgaccgaaattttccttgttgacacagaggaaggggcaaaggtctgagcccagagtttgacgggagggagtattttcagggtttcatttcagggggttcccaaagcgaccaagatcgtttagggaaaaaagccccccgggtggggacctgggaattttaaggaagagctgggaaacgggatccccctaggtccaggaaagcctcctgtgcaagcctgccgaggatggccttggggcccgaagggttgctctgccccgccgcgcctagctgtgagctgagcaaaagcccctgggctcacagcacccccaaaaacctgtggcttcagtccctgcgtctgcacccacacattcaaaaggatcgttttgttttgtttttaaagaaaggtgagattggcttggttcttcatgagcacatttgatatagctctttttctgtttttccttgctcatttcgttttggggaagaaatccgttccgtaatggggattgaaaggaacatctctgcactcagacagtttacagaaataaatgttttttttgtttttcagaaaaaaaaaaaaaaaaaaa

SEQ ID NO: 153658 - DNA, 2664 bp, Homo sapiens; identical to SEQ ID NO: 131466

SEQ ID NO: 153659 - DNA, 1454 bp, Homo sapiens; identical to SEQ ID NO: 146677

SEQ ID NO: 153660 - DNA, 2367 bp, Homo sapiens; identical to SEQ ID NO: 146678

SEQ ID NO: 153661 - DNA, 1371 bp, Homo sapiens; identical to SEQ ID NO: 146679

SEQ ID NO: 153662 - DNA, 1473 bp, Homo sapiens; identical to SEQ ID NO: 146680

SEQ ID NO: 153663 - DNA, 1890 bp, Homo sapiens; identical to SEQ ID NO: 146681

SEQ ID NO: 153664 - DNA, 2676 bp, Homo sapiens; identical to SEQ ID NO: 146682

SEQ ID NO: 153665 - DNA, 3048 bp, Homo sapiens; identical to SEQ ID NO: 146683

SEQ ID NO: 153666 - DNA, 2145 bp, Homo sapiens; identical to SEQ ID NO: 124332

SEQ ID NO: 153667 - DNA, 1551 bp, Homo sapiens; identical to SEQ ID NO: 146685

SEQ ID NO: 153668 - DNA, 1458 bp, Homo sapiens; identical to SEQ ID NO: 146686

SEQ ID NO: 153669 - DNA, 2031 bp, Homo sapiens; identical to SEQ ID NO: 146687

SEQ ID NO: 153670 - DNA, 1549 bp, Homo sapiens; identical to SEQ ID NO: 119533

SEQ ID NO: 153671 - DNA, 1946 bp, Homo sapiens; identical to SEQ ID NO: 146689

SEQ ID NO: 153672 - DNA, 2127 bp, Homo sapiens; identical to SEQ ID NO: 146690

SEQ ID NO: 153673 - DNA, 2253 bp, Homo sapiens; identical to SEQ ID NO: 123239

SEQ ID NO: 153674 - DNA, 2485 bp, Homo sapiens; identical to SEQ ID NO: 126666

SEQ ID NO: 153675 - DNA, 2622 bp, Homo sapiens; identical to SEQ ID NO: 146693

SEQ ID NO: 153676 - DNA, 2831 bp, Homo sapiens; identical to SEQ ID NO: 146694

SEQ ID NO: 153677 - DNA, 4955 bp, Homo sapiens; identical to SEQ ID NO: 146695

SEQ ID NO: 153678 - DNA, 669 bp, Homo sapiens; identical to SEQ ID NO: 146711
  misc_feature (1)...(669): n = a,t,c or g

SEQ ID NO: 153679 - DNA, 2437 bp, Homo sapiens
  misc_feature (1)...(2437): n = a,t,c or g
tttcgtgcccaggagtgagtagctgccttcggtccgccggacacacctgtactatatagacgtgcggacggcccaccaccccagcccgccaactagtcagcctgcgcctggcgcctcccctctccaggtccatccgccatgtggcccctgtggcgcctcgtgtctctgctggccctgagccaggccctgccctttgagcagagaggcttctgggacttcaccctggacgatgggccattcatgatgaacgatgaggaagcttcgggcgctgacacctcgggcgttctgcacccggactctgttacacccacctaacagcgccatgtgtcctttcggctgccactgccacctgcgggtggttcaagtgctccgacctgggtctgaagtctgtgcccaaagagatctcccctgacaccacgctgctggacctgcagaacaacgacatctccgagctccgcaaggatgacttcaagggtctccagcacctctacgccctcgtcctggttgaacaacaagatctccaagatccatgaaaaagccttcagcccactgcggaagctgcagaaactctacatctccaagaaccacctggtggagatcccgcccaacctacccaagctccctggtgggagctccgcatccacgacaaccgcatccgcaaggtgcccaagggagtgttcagtgggctccggaacatgaactgcatcgaagatgggcgggaacccactggagaacagtggcttttgaacctggagccttcgatggcctgaagctcaactacctgcgcatctcagaggccaagctgactggcatccccaaagacctccctgagaccctgaatgaactccacctagaccacaacaaaatccaggccatcgaactggaggacctgcttcgctactccaagctgtacaggctgggcctaggccacaacccagatcaggatgatcgaaaacgggaagcctgagcttcctgcccaccctccgggaggttccacttgggacaacaacaagttggccagggtgccctcagggttcccaggacctcaagctcctccaggtggtcttatcttgcactccaacaacattcaccaaagtggggtgttcaacgaatttctgttcccatggggtttcgggggtgaagcggggccttattacaacgggcattcagcctcttcaacaaccccgtgccctactgggaggtgcaagccggccactttccgccgtcgtcactgaccgcctggccatccagtttgggcaactacaaaaagtagaggcagctgcagccactttggtttctcagtgggggtctctggggaacagagccagacatcctgatggggaggcagagccaggaagctaagccagggcccagctggcgtccaacccagccccccaccttcgggtcccttgaccccagcttcgattgccccattcaccgccttttccctgggttcccaagggttgcaggttggggcgcaaggcccggcccccatgacatgttacgcttgggctcatgagctacgccctgctctccctccacagccacccagaggcaccccatgaagcttttttctcgttcactcccaaacccaagtgtccaagtctccagtcctaggagaacagtccctgggtcagcagccaggaggcggtccataagaatggggacagtgggctctgccagggctgccgcacctgtccagacacacatgtttctgttcctcctcctcatgcatttccagcctttcaaccctccccgactctgcggctcccctcagccccctttgcaagttcatgggcctgtccctcccagacccctgctccactgggcccttcgacccagtcctcccttctgttctctctttccccgtccttcctctctctctctctctctctctctctctctttctgtgtgtgtgtgtgtgtgtgtgtgtgtgtgtgtgtgtgtgtgtgtcttgtgcttcctcagacctttctcggttctgagcttggtggcctgttccctcccaatctctccgaaaaccctgtcgcctgtccctttcactccaacaccctctgggccttctgccttgagctggggactgctttctgtctgtgacggcctgcacccagccccctgccccanaaaaccccaagggacagcggtcttccccaggctggcctggtcagggccttgccccccaaacctgtactgtcccggaggaggttgggaggttggaggcccagcatcccgcgcaagatgacaccatcaaccgccagagtcccagacaccggttttcctagacagcccctcacccccactggcccactggtggctaggtctccccttatccttctgggccagcgcaaggaggggctgcttctgaggtcggtggctgtctttccattaaagaaacaccgtgcaacgtgtttttttctattttaaaaaaaaaaaaaaa
